United States Patent Application Publication US 2014/0057251 A1 - sequence listing, part 14

SEQ ID NO: 17233 - DNA, 4362 bp, Cannabis sativa
tttattggtattatatataagttaatattaattggtattgaaaataatttgttataatatgtaatgtgttattattacataatggtgtcatatgtaattttatattaatgggtatcaaaataaataataataataataatataaaagataagtttatgttacttgctaatttgtataatggtatctataagataagtagcttatgttacttgctaattattaatttaaatgcatctttatataaggaaacattttgtattttagagtaaattaagagaagttgattattttataaatttaataaaataatttataaaaataaatatattttaggtatatttgtaattatttactccacttagtgtagatatgtaaagtcccttttaaaatttgcccaagtgttatgggcctttgcttgatttgaaaatgatctgatttattgaaattttgatttgggtgaaatttatttgtttatttttggaaagtatttatatagaattgattgattttaattaattaagtagtttatatacttgatttaatatatgaaagaccaccatattgctgcaaaagaaaaaaaaatgtacattaaacatgacgagtatatataaatctagttatgttttgtaacataacaaaacataacaacatcctaatcctaatgttaacgggtgaattttcatcttcatggttttctcccgcgattttttttccctttattcttattgggatttagaagttttatctttagagtattatttttctcatagtattatcatgaggaatagtattgtcaccattattctcatcaaacaaaattccaaaattatcaaaaaaaatatgtctagttcaccaaatttgactgatgtaacctttccactacaaaacaagaacaattagtcactttccaaatcacttatgagtttccacaataatggatagatcaagacctaactcacatccattttagttcaattagacttgctttaacccatcacataaagaatagcgttgcttgatacaatactgagaaaatttcaacagaaacaccctaaaagtaacactcaatgcagacatagtcatcgttatattctatcccagtttctaagaaataaacgattactagaagctttggtaaaagttcaactacaaatcgtggcatcgatcaagatccttattctgtagaatcaacgctacactatcaaatggcatgcagagtgcaaaaccatgcaataaaatttaaaatttaaaaatatattataatttttaaataataatattaagtgtatcaatataaaagtacgacgtttataagagtgtacacataagtaatccaaattagcagttaactgtgaaaaataaataacactttaaatttgttaatggttatgtggtttaaagggttttactactaaaataatagtttaaaaggtttagccgaaaaaaactcaatttaaaatgcatgatttgatatttggaggacaaaaacattattaattatgacaaacttattctaatatgtctttaaaatcaagttaagaattttcttgttctaagttttgcttttattctttttgtgtttattgtaagttcaattcttttcgtgctttcaagtttaactaattttttttactctcttattgcctataaatcaaaaccaataacttctcattttgtgcatcattttctcaattttattttatgaacaaatctcaaatctcatatttttctctaattattacacttttgcagtgtgatttctcatattagtgaaggttttttcatgattaatttctttttctaattattctcttctagtattgtctttataatttctttttttttttacatttatagaaattaataattttatgatcatataacttgattagagtgcaaactaattagttgaaagtattttgacaatataatggttctttttttttttcgtattttttgtacttaatatgttatgctatttttatttttatataattataacaaacaatattacataaaggaaattagaattatatctagctatttaggcacatagggattctacatagaaaacaaattcattttttttaaacacttacacatgaatgtttattatttaatattttttcattaattgattcattaatttacttatgtattttggcaggtgtatacttggaatattaattgataaaaaaggcatagaaaaatcaatcaatggaactccaacactttgctcatgagcatcctttcatcctaaaagaagaagatcctacatctctaaatcaaactcttcgatgtaaaatatgttgtcttcctaatttcatagctccattttacgcttgcgatttgtgccaacattacgttcacaaatcatgtgcagagttgccgcaatatttgtttcatcaccctaaacaccctttccacactcttatggtgtctttcggtcaaaattattataagtgcaactcatgtgaaagttactatactaattctcccactttcacatgtttccaatgtgattttcacttagatgtaaaatgtgctatcatagccccataacaatcgaaaaagtagtacttgaccttgacgatcaaactactactacaattattcaacattctactcatctacatccattggttcgtatcccactagacattgttgatgaaattattttttgttttggttgtcagtcactaattagtgatggtagtccagtttatacttgcaacgaaacttgttggtatttccttcacgagtcatgtgcagaatttccaacaaaaattcaatatcctttccatttgaaccatggtcttcttactcttcacgtacaatatttcaactggctcaatgataaatgcaacttatgtaacaaaagctacacaacactcttcattttcaaatgtaatgagtgtagctttcagttatgtttgaaatgcgttgcaactaaaatagatgcgaaagggtctatcaagtatagatatcatgaacaccttctttgttttgcttcagaaggtgacattcttgttgatgatcagtgtagcagttatgattcttattgcaagcaatcaactgctatacttgacactaaagaattttgtaaaacctctccttatgcattttattgtttggaatgcaacttcaaatcacacttgttgtgtgggccactaccgtttataattaagtatgagtatcacattcattctctgtttcttctagagtgtttaaccactgaagaaggtgtagaagattattattgtgatgtctgtgaaatggaaagagatccacgaatacgtgtgtactattgtgcatcatgtaaatatgctgcacatgtacattgtcttattcaagaggtacgataataattcttattaaaatacattaatttattatttattattgaaaatttgcttatgtataataggtgatagtattatttctaaatttttttagtttaaattcattaggagaggttttaataagagttatatagaatcattttttttatgagtttttacaaaaatattagattttggataaaaatttataattatactgtcacacggaatattttacaaaaatactatctttttagaaaacaacaaaatagaataattaaaacaacagtggaataactaaaaaataaccgtggaataattgtgaaaacttaacacagtacacattataaaatttacacagtatttttgaaaaaaaaaatatgcctcacagtaaaaaaaagtcaaaaaaattaaaaatttcagtatgtagtgtaaaaacccattaatttatttatttattttggcttggacaatacatctttttttaataacccaaactttttgttttgatgaatgttaataggttataaatatatttaaaggaggtcgaaagcttttcagaattatgggagaagatctttggtctttggaatgggatacacctacatcaatggaagaagatgaagccaagtctccctcaatattgattgatatcatgaatgctcttcctcaatcagacaaagattatttaaagaaattttatgtatgggatgattcgtggtcgaaaatcaaaggacaacccgaaaaacataagcacagtcacaatactattcagtctaatcttgaagatgaagatgttaattggattttggaactttcttctttagaatacaatttagatcattttgtaaaaacaattgttgtgccccggttttctagagaaacaagagaattgaaagccgaagatttgggtttaaagcttgtgaccgtggaaggttataaaatacctcatattgtggcatcggttttcaaaagattactaagtgtgcatggcgacattagtttgaattgtgataagatg

SEQ ID NO: 17234 - DNA, 5520 bp, Cannabis sativa
tgttcaggggtttctccgaataacagatatctatcgaaagaagttattagctcagttaatcgggagaaattatcaacagaaacgtatttatctcgttttaatggagcaaatggggtgacccaaatgagagtacttgaagctgttgatgatgagtatggtggggtggttgttgatcctgaaaaattgccatcaaaccccaatgcttttgcttatgtgcttcgttcatctctttcccattggacaatgaaggtaatttcaaccatgtttagcttaggcaactttcattcctgtcattttgctcatatttctcaataatttatgactaggaccaagatttatgtagatagaaggtgtctagcaatacctgctgaactatttgtggttacagactcaccatttgttaattctttgaaggaagttgaggtttcaggattttgacaatgggaacttgtttgagtgtagggaaagaaaggagtttggcttaagcttccagttgaacaatctgagtttgttccaattgctgtgaaggtgagtttcaatttgaccaatctaaaagactgtcaattttgatacaagaggaatctgaattgaacccataatgtctaataagttcaacttttggattgggttatctttttcacttatgtgttaataaagatgtaaaatttctgagacaaatcatttggttgcaggaggggttcgaataccaccatgctgaaagaggatatgttatgttgacatactggattcctgaaggcccttctatgcttcctaataatgcttcacaccaagttggggtcgggggatttgtcatcaatgaccaaaatgaggtatgattacttgtcctaataatgtaaaagactgaaactgaggagaaaatcaaagcaacccatctttactgatattaacttattcactttagattctgttttattccaaaatacttgtttccttaagcatttcctttgtggttcttatatgcttcatctaaatcatcatctatgtttatgtcttttttctgttttaatctttgcatttcaccttagtgttctataaagtgattaggtgtagactgttaaagtcttttgtatgaaaggtgatgttaaagtgccttactacaggttcttgtagtacaagagaaacattgtgatcctgcattcattggtctatggaaaataccaactggattcattcttgaggtatatagaaacaattttctattttcttaccattaaagccatctagattgtccattttgtatattcttcattaattattgcttttgtatcagtcagaggagatcttcacaggagctgtgagagaagttaaggaggaaactggggtaattttacatatttctttgttctattctatattgtaaaataagaattttttctttatcaaggtagtagtttatgaattacaacatcttaccaggctattccattgatagaagttgtaattctttttattgcagatcgacaccgagttcattgaagtcatagcattcaggtatcgacgacttgctataatttaagcttgcattggttgttgtgaatattttctattcaatctttgtctgtaaaattccactctttagttcctaaatatccttttcactaattttatactgaagtagttgtgtacatcttttgataccaggcatgttcacaatgtggcttttgaaaaatcagatttattcttcatttgcatgatgagacccctatcaactcagataataattgatgatcttgaaattcaagcagccaaggtacatgtttggtctccaccagagtacattgacttgtagtttttaatcttattgctactgctatcaacaaaattggtactgttatcatcacttttagaataactaagatgagcaagcatagaacaaagacttgaattggaagttctaaacactctttagtactctctgacttgtttgctttcttatccatggttgttgtctcatctgctgtcattccttattgctgacttgaaattgtttttcttttttcggtacataaaaatgcagtggatgcctttagttgagtttgtggagcaaccccttatacaagaagactccatgttcaagaaaataatggatatatgcttagctcggctaggaaagcgttactgtgggttagcttctcatcaattgatctcaaaatttgatgggaaaccatcaacattgtactacaatgttatggagactcacaataccaactgtataggcaattaaggttattcaaattcacccagaaaaacatgcaaaaagattcatatcctgttgttatagcagcagattcttatccttggatctccttgagttctgattttgagtgaccaaagtgctgatacattgctatccacgtaaggagtactcaaaccatcttgaacatatatttaacatgtaattacaataacaatgacttctctatatctaatgtatatataggcttctatcatcatatagtatcatccttggtcattcccataagaaaaaaggcattgaattttgttgctctgtttgtatatctctgtatttatctttccaagtgtggagttgggctattttatttttgtggccagcatatgtgttattgaaaaaattatcttgtgatactcaacgcccaatgataaaacctttatgtatttttgtggactgaacttacatttttcagactatttcttgtcattatgagttgctgtaatttcataaactggtttaagagcaactactatgtgaccacgttataagatatctttttccttctataaatattgcatatataataatataaagacaatattgtgtgtcacaataaaaaatgatgcaaaaaaaaaagctaccaactaataagacaagacttacaaacaagatttcaactcgaatatagtttttctttttcttattagtttatttggtcgtgtttctttataaatattttacagtatatagcagcatttcattgcaacttttcatgtttgtttgtttttgtctattgcaactacttttggttgcgaaggtgattgtcatcgtgttctcgaaaaacagtcttggcattttgataaatccctcataatatttgccaatcttgagggttttgacaccctcactcctgagcaatattatgttcctttttggctccaagtccataacatcccctttggccaaaagtccccctagttggcccaaattatttctaacgaggttggtgacctcattgaaactcaccctctatctccacttgatttggtccttatctaagaataagatcctattggacataagcaaacccctaaggagggaaatgaatgttcgtttcaggaaaattactattatcaagtggttatgtttaagtttgaaggatacaataaatgtggtaagtacctgcagtgttgtgataagtacgttgttcccccacttcttgggtacaaagattcccttcgtgctccatctcaagctatcttaaaaaaggatccttttgaagtgtccaattttgtgcccttagaggattttttttgggtagggatatggatttgattaaggcttgcaacaagtcattaaccaattccttaacattggctctgactctagtggttttgctgctaacctagttccccaaccaggcactcagcgtgctcaatctaaacaacctagatcacaatttggctatgctgatacctatagtgctctctccacaatgccttttccccctgttgtgaccacttttgttataacccatgttattaaggggaaggatcgtgcccaatgtgataaggggaatggtttggctcttagcgagccttcaaggccaaatccatccattgtcataggcccaccaagaggcttgtctatccctagtcctactaagtttgtccctgttacggtggctggtgtcaaatggtccttttccaaacaaaacgtccatgtgggtggctctgtcagaagcatgctcaagagagtcagggctggtcaagctaattttgcagtggttcctgtgtttacttttcaatgcaaagaggcgagtgttgctatgcaaccccgcctagaaaaatgagtttcttaagttggaatgctcgaggtttagggagtcctcgagcattccaaaacctctcccagctggtgaaacaacatctgcctattttctatttcattatggagtctaaacttcaacttagtcagggtaaaaactttaagaatagactgctttttaataattcttttgaggtccctagaagagatttagggggaggtcttttacttttgtgaaaaaatcatgttgttgttaatattttattttactctaccaatcatatcgactattttgtaaagtttaatgatgaagtaaattggcatattacttatttctacaaatctgatacttggactttacttaatagactttttgatgttgatctcttgatgccttggatgattattagagattttaataattatttgtctttgcatgataagaatacttcttccaaactccccacacatgctatcaccaactttcaatctttcttgaataagtatgatatgcttcccatggtacatactagtagtaatttcacttggaaacatgagcacatccttgagcgccttgactggtgtgttgttaataatgaatggaagaatcttctccctaatgcctccttgttgcatctccctttctatggttctgaccacaaggcctttaaggttatcctcgagtatgatcttgggcaccaaaatgggaataaacgtttattctttgagaaccattggcttgaggatacccatttttatgacattgttcaatcttcctggtttgctaatgagactgactctgaggccaacaacctcaaactttttctccaaaagcaaactacttgcattaatagcatacagtcttggagcaacaatcatggcagtcttaggaataagattagggccacccaataaaacttggacaacatctctaactccactaccttaagctacaatgacatggacaaggccaaaactctccagcctctcttgacacttttctttacagagatgaaattttttggaaacaaagattgagagttgaatggcttagagcaagggacaaaaatacaaattttttttgaccataaagcctctagcaagaggaaaacttcattagatttaccacccgtgaggatagcctggtagttagggaaaccaacactatagtttctcactttgttaacttttacaatgtggtcgtttctgagatcctcgctggtatcaataatattctctcccattctcaggttatctcctttgatagcaccttcactgagaatgaggttaggaaagctctttttcatctctttggggataaggctcctggtctggatggttttaatgcctatttttactagaaaaattggaccactcttaggactgattttcgcaaagccattttgtctgtcctcaataataactctgacatatctctcatcaaaaacaccatccagacccatcagtctatgttctac

SEQ ID NO: 17235 - DNA, 4764 bp, Cannabis sativa
gtctgctgaaccttctggtaagaaagagaatgacgatcttggaatggaaggaaaagctgatctgtggaaacctttaacctgtcttgtagaagttgctaacagaaccaagacttctaagtctaccaatactcaaggcagtactgtcgctaaatcagaaaaaagtatggcccttgatagcgaagtacatactcctgataccaaaaccgaagcagactcaccaaatggtctggacagtcagtcatacgagcctaagacgaaaacaaaggagtctgaacagacaaaagtgaaaaataacggtaatgggacaaccgtgcttccagggcctgtgaaacgtagaaggatgcgtgcagcaaatcgtaaaagagctgcatcatctggagagagtgcttcagctcaggtgatgctagatgcatccggggcaaaccgtgacagaagagatagcccaatttggttctcgctggttgcttctgaagacaagtaagatgcttctttgcctgcaaatccttttatttgaggtgtttgaattcaatatcaaattctatgttaattggtttcaggaaaggagaagtttccttgccccagatttctgcatgctacttgagaattaagtgagtttcgcgactccctttgcttcaaagtttttttgtctcaaacataaaaattgttggtctataagaaatcacctattttgaaaataaaacgtgtaatgctatcatttggttttcattggaatttgttagtttcctctgctttcattctgtagtaataacttgtttggtgtgttcacagagatggaaagatgcctgtctcattcatccaaaagtatctagtaaagaaactcgatctgaaggaggagaccgaggtgagttcatctcagtttccctccaacacaaaaaccccaagatcagttagttttggttcatcgctttataacataatccaatccttgttttattttatttctgtttataggttgagattctgtgccgcggtcagcctgttctcccgacactgccactgcagaacctggttgatctgtggttccggacagcgtccacatcaaagaaagtaccggcatcagtcggttcgtcagccaaggactttgtgatggtcctctcgtattgtcgaaaagtccaagatgcatgaaagagcttagttagaaaattttcagttcattttcaattttccaatacacagtcaccaatactgctgttgttgttgttattggtagatttaagtattagcttctcatttagtcatgtgttgctataccatgcggagagtgatatttatgtttgaattctttgattgttttattccatttatttttctccatagttattatcagataaatacatgtgctttttatgttatccatccctaaatgttcttctgttctaaacctaaagccaaacaaaaataatctccattaatatacttgcaatctactggttttggatgttaaatactttttaaccagtctcatactctcatttaagtaaatttatacgtttttacaaataattatatgtaattataaatgtgcgcaaaatatataaatctcatataattaataagaatggatcgggtttttaacaacaccaacggaatgtaggactaatcttgttttgtcttaaatcaagatttgtattagtttgatataattttctaataattaatacttgtcaattaatcaaactattgatcggataggaatgacatgcataaaaatctgttcccataaaatttaatggcaaatcttgtcaattatggtacgaatgataaatttatttatttattttgcaggggagtatgacaaactttttttgattccaatagtatgacaaacttttaattagtacttgttaaaatagattaaaaattattatctaaaaaagcaaaaatctatagagtatagaactgtatttaagtttaaaagctcttacctacccccaaaagccccgttatactaaagcgaaagttaacggtttttggttttctttaccctttttctttcaagtacagttgaccgaggttgttatggtaatattacaaagaaccgacccggatccgactgggtggaggagctggtatggtatataaatattgaaacttgatttgcgtttaagagttaaagtgagtgttgagtgttattctggggttggattggtggatcaaatatgcagcagcaacagcaacaggtacatcaaaatcaaaaaaccctaaatattttgatttgatttggggatgttcttatgattattataatttaaaatatagggtcagagtggaggatctgaaatggaggtaacatgggaggaccagcaaaacattaacaaatttggaagattgaataatcgtcttcacgagcttgaagacgagatcaaaatcgccaaggtactactactactgctacgagttttatgatatgtgggtgtttctccttctgattttgcatttctttgaaatgggttttatattcgtctttgattccatcttcagtcttatgggtgcctctctttctgctttatatattttaaagtttatgcctttgtagcgattaggttacacacttcgagggaattggaagtacagagatttaaacattagaaatattttagtactaagattttgaacctatgtaagtagttttgagtcttttacagcttatagagttaatgtagaattggctcagagtatattcgatgctggtggtattttttttttcttattattattatttattttattttattttattgaaattaaagattggcatattatactaagtttactgaaagaatgtagttgttggagagactattttgggggaaagttttaggtcgaaaactgattcacagtctatatatacgtccttactgaatctttctcgttcgcaagtatactcactaagcaaatactggaactaggtatcagttgagccatcctatctctataatttgagtccataatgagaattccaattcctaaactaagcgaaagcaaaaataggtggctcagcaactatgactgtaggtatattttatatgaatctatattctcatttctcactagtaagtcctgtcgattcttatatcttttctaactcttagcctgaaagattatggagaacaaagaacactaatggcttgaaacatgtttggaaatgctttctaaaaagtgatatttccaccatctcatatgcttgtgtgtttgaatgaaaaagtttttgggatatgtcagagccagagcctttaccattttacaccaagctacggtactggtgaaaattattagtagatacaagcatgaagttgggttagcaagagtgttttaactagacggagttgcagttcttgtgttgattgtaactctagaattctcaagcaaataaatttgaagacctttgattgcaatttttctgatattgctctctttgtgaagagttgaatgtttcagagtttgttatcaaaaaagaatgtttcagagttggcactgtggtgagcattgagtcttgttgcaacgccaagtttcgattgtaaaattagcaccaacccatacctcagtgttacggtgacattagtgagaaggaattttcactgctgaacttactaacctgtgggttggcactgcggggtgctgcggtctgcacatacatgtcttaatccgtagctctgcacagcagcgtccagcaaactaaaaaaaaatttatgtgtgtgtgtatattattgtgatcactttcctcaacatgttaactaccaaatacaggtgtataagtttatatattcaaccaaataccaacaatcctcacgtatctcttgctctctctcctctcaccaactctcaataaacaaagctctagcctaagcacataattaaggaatatatatcaggctaacaacacttctctttaacatagattgatagatacccaaacgttttcaaactcatctacatctagttttttttttgataagtagaaccttttattagaaaacaaaaacacacctagtgaccacaacagggggccacttcccttagcaaaccagacgcagcagtcttggtttctctagcccatctacatctagtttaattaagaataatgtgcgtgatttctaaaaagactggctgatgtccctgttatgttgacatagttgaacctgatacttgtgtttcttctaatgatatttaaaaatcccaaacttcaaaagaggtgttacaaaatggtgtgttcatttgcaggaatcaaatgataatttggaggatgcaggcaatgagttgattcttacagatgaagatgttgttcgattccaaataggggaagtttttgctcatgtgccaaaagacgaggtggagaccaggatagagcagatgaaagaggccactagccaaaatttggagaagcttgaagaagagaaggaatctataattgctcagatggccgagctgaagaaaattctatatgggaaattcaaggattcaatcaatctagaggaggagtaaaatttctcatatttggtaccctttttgtaatgttttgaaaaagagattctgaaatatgaatttgattggcatacagtggccatgattttgattgaatatcgatagttgaattaacttcatacttcagtgttagcacattattctttctttctttctggtgttggatgagcattctagctcttgaaatcaatttcattaactttatttttacattatagaatcaactcgtgttagtatctatgattcactaaactagtctcg

SEQ ID NO: 17236 - DNA, 5531 bp, Cannabis sativa
tatagatataaatgaaaaggaaatcctatataatagtcactgaaacaacaaaacaaaacataaactcaaaaaaggaaaagcttatctaaattgaacatatcaaaagaaaagggacaaagaaaaaaaaaacttacaaaaaggtgtataagagaataatgactcaaaatctatacgagtggttcgttcatagtacaaacaatagtactgagcttctttatatgcttaaacctttagaatcaattctatctggtttataaactttaaaactgatccttcactttaaaagttgatttcctagaaaattatcaaaactataagaccactaaagctgtaaaccacaacttatacaatactaacaaaatgcataggcaaacaaactctagaataaacagtgtgagaatcagtaacaaatgctaatatcagatttatgaacatttatttggatgatagagttagagcagtgagtattgtagtctcataaaaatatagaggaattcagaaaacaccattttcactcattatcatgtaaaagttagaagcatattgataatgcaccacagtataagctcaatcccctcagcacaaaacacaatgtgtaagtaaagacacaaacggattccataaataatttaaggcttcatcaaaacacaacacatggaaaagcaaaagctaggtttcatccgtaaatttatgagcattttattttatgatcaagcaaaactaatttacttttaacaactaaatgtagtatcaatattagcatatcatcattcagtagtagtcttcaaattacgtcacattaaattcttgttcattttattgatgaaatgggtacctattttttaagtcttcatcttgttcatttgatccagaggcaaaattaccatagctttgcttaacactctttcacttgcatatttggtacagtcttctccactatatttcccatcattataaaaaaacaagccacgccactgcagagaatgaaatacttaattctgtcagccaaaatacagttcacacatagatatatataaatacttttttcatccaacaaaccttctctccaattttatctcaaaaccacctaagagtatcaaaatattctgacttcattacttgggactactctgaataagttctatatgaaaatgagaagaaaaaaaaaactaacaggacctacttagcaatggtaataagagtatatacaaaaagaaaatccaataaccaaatagtaatataataatctcaagaaatatgagagcatttagcacatttgacatcatatcagcctcaattccactaactcgttgtttaggatatacctctaccattcaaaatgttgtatcagttttttagagcctgtaaaagacctgccacgagtactaagcatcaacagatcaaatgcatacattttccattttaaaatgttcaattaatgcataaattctagaaaagtttaccttatctttacacttccttctctcatatcttgaatcaatttccccatagctctagataagtattaagtatccacacctaatggaaactctgaaagaaagatatattggttagtgtccacaagataaatgagagatgtaaagtttttaaataccaatgtgaaactatatatcatagtataaatacacgtatcgcattaatgtaatttgataaagataaccaagaaattgttacatactttacatctccaagaccatccttttagatttttgaaagaaacattagctttctctctgaaagggccctaaccaatagatcaacaccaatagaaccaatattaggaaacaaaaatggaaattaaaagtgaaaaagatctatagatgcaaaattgaggatcaatttaccttgagaaagccattaatgtttgaaggttagatcaaaaggcaaataatagaaatttaacatacccatttcgattttgagtcaaatacttcatgagaggccgatgttgtttcctgtattcttggcaaactcttcaaaaagttttaataagtaatttagtactattggaagggcttccagagacatgttgacatacagaagtttgacccataaagcatcatttgcaagaacaaaaaccctagagaagaatagttttgagatttgcgactggaatctcttgaattgcaataaaataattagatttgtaggtgtatatatatttaacagaactgtaaagtttaacgaaagggaaaaaaaaacaccgctaaaccaatttttttcattagatagccacttttaatatacaaagatttgttgttagatagtgcaaatggatgcaccaatgcagttgttgaaaactctcagccttcaaatcataggtaacagaatagtcgataaagaacaaataaaagaaagaaaacaaaaaagcttcaatgactcaagttgcagcctagttactggactattaactcccacaattgctctgagaattgaaacactcttctatattgcatcttagacttctccaaatcccatctctccattatatactaacaaaacatcttcacctctatgatgctgtacatttttcctgctaattacaaacacatattcagccaaatagaagcatagccccattatgcatactctatcttgatatttgtggcatgagatatgtcaaaactaatttaattcagaaataacttgatcatcaaaacagccttttaaaaagcatccgcatttgatatcaaacacaaaacagtgaggcaactccataacagtttttttttattttctaccaaaggtatataagagaatgtttcaaataaactgaacttactgttatgttctgagaatatgtgcatttttgtactcagaaccagcacacactgaagagaagattttcaaagttgtcccttgcatgctcttcagtaagtgcccttggtttaatttctcctcaacctaagacaaagaattctcataaacaaatgacaaacttcattttcttgcttaagaaagccccaatagctccacatatatttctcatcaagcataatgaaaatgtatccaatcacgttacttgaaaacatgaaaatatttttaccaagaaaaaagttcaagctgaagaatgaattgtccttaaccatgaaagtgcagctgtctcatgtctatcattatcagtgagagtacaactttaatatgttctatctccagatgagattgatctcctgcaagaaacaaatgaaccttatccttcaccatgatccagctacaacctggactcttccttatcctctttaatctcttgctcatccttagctgctcaccatcttttttcccagaaacaaaacacaagttagacatgaccacataaggagttgcattatcaggttccaattcaataagttgttgagctgccacttctgcaagatcaagtcgtaaatgtgtcatgcttgctccaagaagggcaccccaaactccaggatgaggctcaaagggcattgagtggatcaactccatagcttcatctagtaaccctgctcgaccaaggagatcgaccatgcaagcataatggtcagcccctgcttcaatattgtacaaagatttcatcaatttaaagtatttccacccatcttctactaatcccacatgaacgcaagctgaaagaacaccaagaaaggtaacttggtttggcttgcatcctttattctgcattttgctaaataaatttagtgcttctttggcaagaccattttgtgcaagtccactaatcatcgagttaaaagaaacagtatttggtgaatcaatattcatgaaaacctgccaagcatcaggaaagcttccacatttcatatacattgagactagagaattttggatccgcaaatcaaaatccatattcatctttattactagagcatggatctgtaatccttggtttagagttgctaaaccagctgaagcactgagcatgcagctcaaagtaattggagtaagcttgatagcattgcctagcatctcagtaaaccaacgaaaagcttcttcatatccctcattattaacaaagccagaaattatagcagtccaagaaacagtatcttttatgggcatcattttaaacaattggacggctttctcagtcaacccttcactaaaaaatcctgaaatcatagtcgtccaagaaactacatccttcttaggcatcctctcaaaaacttcaaaagctttttccatttcagaacattgaacataaccaccaatcaaggaattccatgataccacatctctcttggtcatcatatggaacatcttactagctgcatctatacagccaaatctgcaatacatggtaatgatagaatttcctaagaagatttcaaactctaatcccattcgtgaaactaacccatgcatctgaataccttcttcatattttgacaaactgccacaggcctcaaacattacagtcaaagtaatgggattaacttccactctactttctcttttcatatttagaaacattttaaacccttcttcaaaattctcactcttcatatacccatcaatgatcgttgtccaggtaaccacatttctatcaggcatcttatcaaataaatatctagcatcatcaacccttcctgctttgcaatacccatcaaccatggagctccacgaaaccacatccttaaccaacattccatcaaaaatacatagcgcctcttctaaccttcccagcttcaaatagccactgatcaacgcattggaacaaaccggatctcgcaattcagttggcgtctcaaagtacaacttcttcgccttgtcaaacatcctcgcttgcacaaaacccgtaaccatagcagcataagagattgcattccgctcaaacatcccagaaaacaactcaaaagcttcatttatcatacaattcttcctaatataagctgttatcatcgcattatacgaagcaatacttcgttcaggcattttatcaaacatcttccgtgcattgtcaatgtctccattttgtgcataagcagaaagcatggctgtccaagatatgatatttttgttcggcataccaaagaaaactgactcagcttctctgatatcaccatttcttccatgtttcgtgatccgggcgttgaatgaaacaagagatttactggttctgtggctttttccagagtccaaatgggctttcggtggagtcccagatgaaacgggggaatgaaattttctatactttatgggttggtagaaaactctagttgtgggtttcaatggcgtaatgttcaaaattcgtaactgatatccaaatgttgaaacatgaaatctcattgtccaacaatagaacactcatgcagaggttaatggagcaacaatactcattttttctggagtctccgacaaaatcgaaacggtattacctgtcactaacagacactattacaatacaactgttcttgtagctctcttttttatttataataacggtaattgcattagatttagagatgggggaatttttacaactagtaaacatagcgcggttttgtaataaaataaat

SEQ ID NO: 17237 - DNA, 3022 bp, Cannabis sativa
tctctctctctctctctttcaaagttttagactttctcactcttcaaaagtcataatatgtctgaagaggctgagttttggtctgaagaggaaggaacacatttggaggaggaggaaaaaaaagaactgggcccaaacaacggatctgaccaagtatggttggtaggctccattgcccccacctagtcataccctccttttattgctgcgagtttctcaattctcactaagtaaaaccaatcactctggtttttttttttttttttgataacaccaatcactgtggtttcgccttctggattttcgcagtttttttttgtgtattctctctctctctctctctgctttgctgtggttgttttaccttttaatgtttcctcactaactaaaactgacgtcttgtgttttagtcatccttctgtttgttgtgctatacagacctagtcaagctatacagtcggatgatttatggccgtttgattcaaaatttgtaatgtttaaatgtaatttattgttgctttactaaaataaataaataaataaaaacagttgtaaactgtcatgtgaaaagtcaattcaatcgaaccgaatttatggaagaaaaaaaaagaagctaaatttagtattgtctatacctgtgataaatttggtagcaagtgtagtatattatgctctacatcattatcttttgttacaatcgattattcttctttgagaagaaggaaacaaaatgtacatgtaatacaatataaaaagttcaaatgaaatatatattggtttgatacattcattttcatcaagcttattaagttgagaagaagggtgtgattgtgaatgtgatggtctttgccaacatttcatatgcaactttgcagaatatttcctacattttgtagtggtaataattgtttgacttaatttgtattagttatgcatcatcatatgcactatgcagattgagccattgagaaaggttcttttgcaccataatgcttcattcattctccctttgttgaaaagtgcaactttttttttgaggggctttgatagtatagaaaagtctttttctcccatatctttagtactctatgctatagtgattttacaatactatccccccccaaaaaaaggcaaatttgaatatatattaataataaaaaaagcctaagcttgattcaaatttgaatatatattaataataaattgttgtttttctttgtaataaacaataaaatgaccagcaaagccttaattcaattttggaatattgagtatgcaaaatacaatgtactaatcattcaattgtcccatgaaaaagacatgtactaatattctatttttagatataaatatattatgtttttgtttgattataatcatattttcttgggggtaccttttttttttttttttttttcttacgaaaggttatttcaacacaataaccaataaaaagtcattggctttcatttaagcatacacaccactagactagtttatatcaatgtgttcacacaatatatttcatctatttttaaactatgattcattgatgcagcaacatatacatatgattagatttatatattacatatttaaacttctttatctaccaaaacactgttaagttgacttaaaattgtatttggatttggctctttcaacatcagtccaaaacactcttttggtattactaatgagcacatgcttccatgtgaaaacatacacaaaatggagagctatgatccattcatgcacataatttctccatttattcaatggcttagatttttgacacttggaatagagaagggaagaggaagaggaagatttttctttatttatttcttttcatgagtttggaattgaattgagtacaaaatccatagctaccaacaaatttattgccccacaaatggtggacaacttaggagtacatttcattgcatttatttcataaaataataataataataacacttctagtgttgtttgtcaaaaaaaaaaaaaaaaaacacttctagtgtttggtagctacttttaggacaaaatacttgttataatatcaataacattatcatattataaaatattattgtgattttacatttcacaaattcgttatgaaaaacaaataatttgaaatgtctactcgatgggtccatttttttttttgtcaatcttgcaagttgcatggttattgggttctatccaaaaggtgtggtgggggcatgggacatggaatagtgtcaccttaccatacccatcaccatcctaagttaatccaatccaatcaagctcaactcaactccaagtaaagcacacttgtcctcttttaagcaacacaaccaattcacttgacaacatttttgttttaaataaataaataaataagaaatcaatctgattggttgtgttggtgtaggaccaaaacatcacccataatttgcttatagttatatttatatttgtgtattttggggcaccaaaaatggactggactacacctggaaagtgttggtcttagaagtttggataaatgcgtagtactcagtactcactcactactcataatgaggcccataatgaggaagttgcctaggttcctttagctgttaataattaaaatacaattaattaaaggagataaaatagagcagggaggggactatgctaaatgctactattatatactaaaaattatgagacacatgcacctaaagaaaaggttatagtcttcgtttttattaatttcaaattgattgttttggcttctttctttattactattactagagtaaagcatcaattgttctacaattcaaatatatttatgaatggctaatcactaaagtcaggggccactttatcttatacttaagggttattgttgcaaattaattttctattgttttgattagattacagaaaattttcaaaagaaaataatgaagaaaatgttgaaaaattctcattacaagagagaataggagaattataatcaaaatactcaaaatacaaa

SEQ ID NO: 17238 - DNA, 7746 bp, Cannabis sativa
  modified_base (6645)..(6647): a, c, t, g, unknown or other
  modified_base (6817)..(6835): a, c, t, g, unknown or other
tatttttataaatatttgtatgtggactgtataaatgtttaatgggccggcccaaagtatttttgtaattttttttccttttttgtatttttttgtttttttccctactaaatataatataaaatttataaacactacaaatttctcacacatgagcattgtgagacaaacacacattcacaaggttttttttttttttaatcacatcaaatatattatttatccaattactaaaaccttatcataaaatgatcacttgtcatttttatttattagtttgtaaacattggtcttaaaagtataatttaaccatctcactaaacaaaacgaaaatgaaaaggttactcaaaggattaatactatcaaatagataatatatttttcttttctttttaattaaagtcaaaataaataatatcatgaatacaatcaccactagaatctcaagcctctctaataacaagaatagaacttgagccattgtttgctaggacatggacaatcatattcatatatatacctttttttttttgatagatcaagaaaattttaaatgggaaattatgaatgaaacaataccaacttatgtttttgtcttataaagaaatcagatcgttaattaaccttatgacactaaataattacgaaaagttgcaaaaaaaattatccaagatttatttaaaatgttttttttttaaatctattcaacttttattggcatggttggcaaaatgcgtcggaaaaagtaattttgttgatatgctgagaaaagttatttttgttggcacaaaaatagtattgctctatctcaatatttttgctggcactaaaagttgaattttttgtagtgtaaataattacatatactataccacattcaactaatggaaatgacggaaaagagaaatgctaaaatgtattaatagtgtttagtacttttttgaagtataatgtaatttaatatcgaatctcagtgatattaatttaagaaagattacaaagaactgttaactaattataagacatcattgacacgttagtgtcccatgtaacaagatgaaaaatgtcttcaaacaaagtagtctgacaagtgacaccacctcccacacacattacaccagaagtgataacaatgagttactgtaaaacaaattattatatatatgaggacaaaattatagaacttccgccatatcatataaaaatgatgaaacaccaccgaatagtgaaatacaaacatccacacacgaaccttattggaaaacaaaacaaaaaatatttacaaacaagccaaaataaatatagacaaagacatgcattcaccagtgaaaaaagacgaaacatcacaaagagacaagcaacttcaccattaccattggccaagaaaccaagagatccactgtggccgcaggagagatcatgtcttctcccgagcaccaccaccaccaacgcaccttccactcgcttcatcagcgtagcgctcacatgtgcatgttggggagcttctctttgccgaagcttagcacttcgatcaagagatccacttgcaaaaaaagaaaaaagaaacaaagaaactctaagagtatgtttggttgataaaaataaaaacacaagcaacaaaaatagaatgaaataaaatttaagaaatttttgtagcacaccttctaaagaggtgttctagaagattcttatatattttttttcatgattgtgtatgatgtaactatataggaccgtaagtgctttgtaggttaagtttgggctaaggccgcgtctagagcccagccagtctagggatttaaaaaaatattttcacccaatctcagggttggccttagtactttgggaatgtatgtttgggatattgcctaaaagaaacacaatttatgagtgtgtttgatacatttcatgtatatgggcgcagagcgacataacaaatcaggaaaacaaaatatatgtattctggttagttataacatatatttgcaattaaatgtgataaatataaacataatatatatatatttttttttttaatggtataaacataatattagttttggtatgatgattaaattatcttacacatattatagaggtgaagggttcaaatgctaacaaaaataactttatttttaatatttagtttactttttagcccttacaaaaaaaaaaataagtccctctcaactttagttctggatttgccactgattccatgtatcttaatgacaaagattagtggagctataatcatcccacgtgttgtagctggtactgaaaaaagatatgaatgtgaaaattctattaaagagaagaaagagttggttgattacaagcatagacttcagtgtttctcaattgtgtttgaatctttggccaaaggaccacttgcacagggcctggtttgctaacatctggaatcggttcaaagcgccaatttgtcatttggcttgcctgtttacaaagtttacgtaccagagagagattggctcgttttggagttatatatctcatataactaataatgtttgatttgtggtcaagagcaagaatctcaccatcacctttacttcaattgttgttatacaatagaagtggcttggtagattgctagttgggtgggtatgcgaacatagagatccttggaggattgtttgaagttgattttaagatacaaaatgttaaagtttcgtagagaagtttttgtaacttgtattaatgctttggtgtataatatttgagaggttggggatgtatttgtaggaacaaaatgtacataatatgtaaatgttgtagtcgaaaagataaaaagagatgtttttaataggttttctcattttaaaagagagaaaactagtaggattgatagagtggttcaaaactttgaattcctttaagtaaattctgagtttggtgttttgtaagttataaatagtattctttgacaaatataattcactcatattcattaaataataataataataattttgaaaataaaataatatttaataaaatattttgatatacatatttaccattttaaaaaattaaaaaaatatatattatagtaaaaatttaattaaaattcacatgttctataaaaaaaatatcattgataatttttttaaaaaacaaatttatatgaaagttttgatttttcacacttacattaggctaaactttaaacttaaacccaagtttaacaacataggaaatgtttgctaatttttatttttgttccaaaaataccctttccattttaaaactcacacaaaactcatctccctcttctttcttctctttttccctctctctcctctccgcgcaaaactcacgtcccctcccattttcgcaacaccactgtcacccatcgaagagaaaaccactaagatggagacccataactgaagaaaccatcggtttgtgatttcttcatgtttttgcttatttttttggtaaaaattaagtttcagtgaaatctacgttttctgggttctttgcgattttttttttttttttttgtatatggtacaatgaggtactatagtagtgtaatctagaggttagagatgaaggtttcataggatacaaaggtacgagagtagttcggtagttgcttaaaatttatgccatgataaaatctatggcatgaaaatattgaggttagggtacaataatgtacgatggtgggtacgatagtagtgtaatatggacgttagggatgaaggttcaatagagttcgatggtgatacaatggttgataaaggtatgatagtatgatggtggtacgacagtgtacaatggcataaatttcaaacaacaacttagccctatcgtaccttacgtacaccatcgtacgactatcatactttagcaattatcgtatcatacatcgaacattcatctctaacctccagattacactactatcgtactcgcaatcgtaccctatacaaaaaaaaatcacagagaatcaaaaaaatatagatttcaccaaaactcgattttttaccaaaaaaataagcaaaaaaaaaaaaaaaaaacacaaggaaatcacaaattgatggtttcttcgattatgggtctcgatcttggtgggttttttctttggtgggtaacggtggtgctgcgagaataggaggagacatgagtttttgggcggagacgagagagaaggaaatagagaaaaaaagagaaagaaggagatgagttttgaaatgagagtggtatttttggaacaaaaataaaaattaacctacattacctatggtaagttttagcctaatgtaagcatgaaaaataaaaattcccatttatattatatataatttattacattaaaataaatagatattgatattgatatttaaaagaaaattttacataacatactaaaaacttgaaaaaaaaatacaaaaatacgtcaacatggaaaaaatttcatttttacttttagaacttttttatttacaaagatacatctttagtaaaaataataaattattttttttatttgttttatagttgtattatagttttcataaggttatttttctggttattttttgttattttatagtttatttatggttgatttatagttgtcacgaggttgatatctcattaattttttaattgtttttttttttactttttactgagcaaagtatattttgtaattttaaaactttacaagcatacttttgtaaataggctataaaattgtaaataaaacataaaagaagggtatttttaaaaattttcctatttaaaaggtaatagatattaatatttaaaaggataatattgtacttttactaattaattctttctccatccatcccacttcatactattctctctttcccctctccttcccatcttttctaacatagttgtaaatacgttcatgtcgtgttagcccaactcatatttttcgtgctttttaaaagacatcctgtgtcgtgtcggaccataaaaaatataggtagtgacgtgctgtgccataaaaaattatggatcatcccatgtcgtgccataaaaaattattagtctttttccttaccgtgccataaaaaaatatgggtcgtgtcgtgctataaaataatatgggtcgtatcatgccatgccataaaatacatcatgtgtcatgtcggaccataaaaaatataggtagtgatgtgctgtgccataaaaaattatgggtcgtcccatgctgtgccataaaaaattattggtatttttccttgccatgccataaaaaaatatggatcgtgccgtgccataaaataatatgggtcgtgtcatgccatgtcataaagaatatgagtcgtgacgtgtcgtgccataaaaaaaatgagtcgtgtcgtgttgtgcaataattttatagggtagatctaacacgacccgtaagtccggtaatttcgtaccgtgctcagatttgtgtagtgttttattcaaattgacatgtttttcttaaatagatcaacttattttttttattcgtgctcaaatttgtgctctatgtttttgcattattacaattgatgagttaaatacaaaaatatatgtgtattttataattttagttacttttatgtctttttttaataataattacacacaatcatgtaaaaagtaactataataattataatttaaatattactatcattttagttgataaataaatatttattactgttattattattaaattattgggcattttaatgtgttgtgcttttaagttaatctattcgtgtttacgtgtcgtgctattaggcttgttataccgtatcgtgcttaagtttatatttttttttgtcgtgccgtcttgtgcctaagtacatgtttttttgtgtcggatcatccttgttgctcttatacttgtgccgattccgtgctgtattaaaaatctcaacctatatttacagcaccactttctaatatttcatccatagcactctcccttcttacttcctaccaaacataatcttaggacacagaaaccgcgtttgttttattttaaataagttgagttgaaattagctaatctaaagcgccaacagactataacgaaatgaccaaactgaccccaagccctggacgatttcacaatgtccttgtactttgcttttgagtttatgggtaccagctgtaattaattatatgtacaatttcgaattattataagaggaaactcaatatatattttcgtacatgcactgctttaatttttttttttttaagaaaatatataaatagatattataattagtggtttttttttacttgatattccatttccattttaaaataaaataaaagagcatgtgatgatagagaaactcaagctgtaaatagctggagttgtactattaattagctaggtaactgtagtgtggagtgttctcacagacagaagtagagcataatactttctattttttttaattaaaaaaataaaataaagagtcatttttattgttgtgactcgaattatatttttgactaaagttatatatttaggttgggctttttgacacgacacgcaaaaataaggaaacttactaaaatactgaaatttaggttaatttttacaaaaatactgccacacggaatttttttcaaaaatannntgtttttataaaacaccagtaaaacacaaagcaaaacaactcaaaacaacagtagaacactagtaaaacaccagtagaatactagtgaaaacttaacacagtatactgcagtatgaaacatttaaaaaaacacagttcaaaagtaaaaaataccgcctggcagtattttnnnnnnnnnnnnnnnnnnnttagtataccatgtaaatttctcgaaaaaaatattaatttggacccaacatgacacgaataaatatgaacctacgcacgacacgaataatataaacttaagcacggtacgacacaaaaaacacgaaagcaagacacgaaaacataaatttcttagcacaaaaacacaacacataagtacgacataaaacacaaattcaattccataaaaataattttttatttagtaattcatctgctctttcatataaaaatactttatttaaatgtatttttatttagtaattcatttactctttcatataaaaatatgacacgaacagaatttttcttattgagattatgttgaacatttctgttttgctgaaagagattatgctgaacattatgtgaaaatttagtaatggaccacaattatggtgatattaatttgattattaaacatgtaattgtatttattttgtgattttaaagttaattttaactgaaacaatctattcgtgttttaaaatataaaaacaaatttgaaaagtacaaaaaatggcaattttctataggcccatttgataaatatgggtcggccattttataaaaataggctggcccatttaggcccagcacgggtccgacccaactagaataatttgtgcttatgagctgggctgagcttactttggaaatatggatcaagcccggcttggcccgacctattttatagaatgggtcaagccaggcaaccataaaaaagtagccttttataaaaacaggttgggccgccaaatgtagagctttactctcaactttaatcaattttattgggaaacttacaaaaatattggaatttgggttaactcttacaaaaatactgtcacacgaattttttttcttcaaaaaaactgtatttttataaaac

SEQ ID NO: 17239 - DNA, 4110 bp, Cannabis sativa
tcactactgccaccggcaccggccccgcctcttccgacgaccctatgcactcgtggtgggagtcaatctccaaagctcgttctcgcatccactctctctcttcaattctcgaccccacctccacctcctcctcattctctctctcctctctcgccgattccgaccgccctgctctctcactcctttcttccatcgacgcttaccttgctatctcggcagccctctcttcgcctctctccggttccggctctgaccctctctgtcactggctatacgacacgtatctgtcgtctgatccccatctacgacttgttgtcttctccttcattcctctcctctccggcctctacctctctcggatccactctctctcatccgattcgccttctatcccttctcttgcaggattcgaggccgtacttcttgctctctacgctgccgagaccaaggtccgggctgggaagcccgtcttagtttcggtcccggacttatctcagccgtcgctttatcacacgcctcggcagaagcccaattcgaaccctggtagtggtcacaccaggaactcgattggtgttctggctccaccactggagccccaggtagcggtcaagtcaacgaagagggctggcattgttggtgtcgcccttgattgttattacaagcagatctcgcagatgccggcttggtctaaactcgatttctgccgattctccgcggcttgggccggccgcgactgctcttgtcaggagcagtttgacgatgaacctgaaattactgggttttctgagactagggtttcggagaatgggtttcgaattgacgatgtaacggaagagatcagtcaattgaggatcgagaacggtaacggtaacggtaacggtcatagttatagtaatggcaatggcgttggtagcagtagcaacagcagtaatggtgatttgggttctaaagggtcgagaattccgcttccatgggaacttttccagccggcgttgaggattttgggacattgtttgttggcgccattgaattcccaagatgttaaagatgaagctgcatttgcagttcggcgattgtacgcaagggcatctcatgatttgcttcctcaggctatcttggcaacccgaagcctcattcagctcgataagagggctcgagctgatgccaaggcggctgcagccgccaccaattcatcttctaacgctaacactcctagcaaggctaggaaacccgaagttcttttggtctcaaagtgattgattggttggttggtttattcagaacagagaagatgtttgctttttcaggtaatataggttgttgtatattcattctcaagaagtttttctaaacagtttgtgaaagctaattctgtatgtgccatttgtacttgtagattttttatttcttttcattgttcttcattttaatgattatttatttgtaggtgtacttatacaaacttttctgttgctatagtgtgtttgagtgagcttgttcctcatgttttgataattcttatttcacacaattcttttcttttgtggagagtgtccgaatgaatttaattttatactttttcttttctttttataatatgaattcggttcgtctgtgtaatttgttttagccatgtcttattatttggtgtatgtaattctgctatcttagttgaaattaaactctgtttggtagttgatgtttggtggtgatagcaaaagcaagtactagttacctggatacattaattagaatgatttttttaaaacttaacagggattcaagtatataatgtgtacctctcattgtggggaagttcttattatataataagaaattaatgggtgatacatggatacttgaagtatacacacaagataaagcctcacaattagtgtatcttctttaggtctgtaatatttaagaatataatttgttcagtttttggagttttagctgtttaactctcatggtaagatattggttgagtgatttggtgttcttattctatagttaggaaaaatgggtgttttattgcttcttgaactgtttactaagaagaaagcattctagtttttgcttcttaagtcagagatgtgtaagctttatagattatcatggcctctgctcaaggatcacacacacaaattgagaaattatttgagttttagtccaagtttaactgatgcttagaggcttagtaatctgttgttacttgactacaagttaggttgcattgaaagtgcataagccattgcaatagcttccagtttccctctaacatgcacttttggttctttagagtttcctactgaatcctgatgtacattacatttcgccgataatactagtgcagcctctcttgaatgcagctgatggctcgatgttcgccgataattggtttgatggaaggaactgctaccttacttggtgggctttctcttttgtacattacataattacttttcctgtttgttttcctaatattcttatgtctggactaagtattcaaaatcaataggtcatttgtatgattatgtgaagatttctcaaggactaaaaacaagagtgaagcccatttcttctgttagctataagtgaacttttttgatagatgaggcatttctaggatttgtatgtatgtagaataaaattttaagatgagaagtttgttaatctggttgtatgagatttaggatttaaaattctgtttctttcatgattgtgtaagcatgcgactttgactattgactgatacaaccagaagtaatggtaatggagtccattggctattagtatcagtagcagtgatagtaaaagatgtggtcgaatcaatgcccatcgcattttcttttgtgataatccatcatctatgtgattataattatgcacgagatctagaagaatgtaaggagatacattttgtattatgtttggggtgaatgagctttcttcttcatataaaagaaagtggcatttctatttttggtctaactaatcttttgattttggttaattgtcaaggaaatagttgtagcatatgtgagacaaattataggactaagtttacactatatcttgtcaaggaaggaaatggtattatgaaaagaagggaacaagtaacttcatgtaggaattacactaatcttcagatgaagcatgtttttgaaagaaaattagggtgtatgattgttagtgcagtgatgcttgtgtcaaagttcattttttaacagaacctctttttgtcaagttttcttatctaaccccttaccaaatttttatttattcattgtattgatacaagcatggcttaccttacccctagtattggtgtagatttttttttctccagaagttgcagttgtcttgaattgataatctgtgattctagatatagacgatgggtgagcatgtatgtatggatgatgtattttgactgaaaagaaattgaactgttacaacatgtttggttggatacatggaggattccatttcattgtttccttttgtcagttaattaaagagaaatgataatatagaaaatggtttaagggggcaactcttgtctgtgaattcttgtggtattagtcttaggctaaggctaaggtactggataataatgttcttaattaaataataaaatcatcattattccaatgaatagcaattctatttttcaacggaggccacattccagctcatcaccattcgcaatctcttttcattatcaaattatatataaaataattgagttttttttttttgtcaattcaatattaattggattctattcatatatcaactaaacaaaataagtttgttttcaatatatagacaagtaacacaatattcttattctaattattatattgaatagacttgggtggtaagcttatttatcttttctttgaggaattggtgtaattaggtattatattttacatattttaggttaataattattgtgtaaaattattaatcactcacaaatcgccatctcgatattgggcatcatttttttttgattcaagcgtttatatattacaatcatgtttttacctgggacttgaacccaggacctccaagacacacacctgttgggttttatgc

SEQ ID NO: 17240 - DNA, 6789 bp, Cannabis sativa
tgaaaataataccaatactagactatatacttaactagtgaaaatgcttgttgtcataaatttatttaacaagaaattctcaaccaacatataactagttttttcttgctttttaaaaaaataaataaataaatatcttgttttttcttagtggaatatacaatgacttatgcaatataaatcataccaaacaaaatttgattacaagagcaagaatcataaaacaaaacaaaaaaaaaaaaagtggggggaggggggcaataaacacataaagcaagctaatcaaaattcaaaattactaaatagttccacccaattgctttgttaagtgttatttttccaagaaaaaaaaaacaaacgattacaagagacaaaaacttagaagctgtagtaaattaaaaaaaccaaacagcatctaaacatgattgtttctacagttgacaaaaccaccctctttcccccccaatcatcatcatcatcatcctgttcataaacacagtacaatgcttttttttgcttacaacctaaacttttgcataagagaaagaaaacccaattttggatataaagcacaaactttttcatccccacatccttgaaaacaaataatagacaagaacatgggaaatccaactgttctagagaatctatacatattccaacccccatccctccctccctcaattttcataccagggtattaaattcaacaacagagcatcaaaataaagctctaggaagaaaaaaagaaaaaggcaaaatccataagaatttaagaaagagaaaaggaaagaaaaaaaaaatgtagaaagacaaaggaaggaaggaagggcctgctaactagttatatcccaaaccagtaaacatgtaatatgggacaaaaccatataaaatctacagacaactaaaacttacccccaacaatgctatgcccttcatatactcaacattattactgtccggtgttgctaattaccatatcactagtagtagtagaagagcaaaagatatgcaaacaagtttgctgctcaaacaacgtgtgcacgtatcggatattctctgtttgtttgtttttttttcactttttaaagtacagtatctcagttcttccacaaaaacttgtatgctccactgttaactcggtactgattctgaattcatccgtccatcatttcctccattgtgaatgttagatccagacacagccatggatcgtcgagtgaaatccaacaatacttgcctctgttgatcattggtgtgtggaagacttgcgcgcaaaagttctactggcaattcacgactaatagatcttgctgcatctgctcctatagcagccatattggttgggccctgaacaagaagagactgcatgatactatcgaacttatttacgcaatacttagttaaaaggccaaaaaattcatcaaatgaagcctgccaaagagatcggtttgtcatattatagttgctagcaacatggggatctgtcaatagttcagttgctctctcaagaactgatttcaggattagagaagccccgtctccagaagaactgccaagaggacgaagtggaggctgttcggatgaacaaaccactgctgcaagacaagcactaagagaaccaaggtccatttcacaaatgcatgttgcaacaacctttgcaaggttatctgtagtttctgctgctccaggatcagagggtagtccaccaaacaagaaccgtaagtgacggaatatggccatacaaactattcgcatgagatcaccaccagggaatagaagctgaaggtaccgtgccaaaagtttacgacccttgtgtagagagactaatcttaagaacacaagatcatcctttggaacaggcccaactgtatgactatttttcccaagtggatcaaccaactgaagtgatgcagcaagcccttccaacacagcctgtcgcctacgtctcaattgcgttccactgtcagggagcagattgaattgcaagaagcggtcaatgtcatctacatcaagaagaagacagagcccatcctcaatcgcaactctagcagcaagcattggttcctgctctaagggcttctcagtatccttctgttcagtacccccagagcctgataaagttggactgtccacttcaagaagaggacgaggcctacgaatagaagagaagggaatcctcccaagagcatcaacctgaagaaaagcatgtggttcattattaggtcgtgctcgtggtggaagatccctcaagtggtttgggcaaaaatgatgtctcagcttagcgccagaagattttttagcaagactggcctgatggtaataatcatctacatatgggtcattactatgtgttgcagcaagttgcattctgagaataccctcaatttcatcagatgtcatgtacttggatctgtactgtggccacccaacatcattcctatggttattcatatcagaacccatctgaggaaatcgaaagggtctgcctttctgaaccattttcggtctttgatcaccaggaccgagcattgcatcaaatttgcccattaaaggtggggaagggggaagatgaggattaaataattgagactgcattcctgacatatggttaaatgatggctgaactgaatggtgcattctctgttgctgctgctgctgctgctgctgagccattatctgtggaggcattataccattttgatgagacaactgttgctgtaacatactatttaacattccagggtgatctcctggatacatgccagattgattagcccattggttcggcatccggttattattagcagacagaccaggagtaagttgtggcacacttccaccaaaatgagatccatgaggtaacccggccagttgaagctgtgagttagaaaatggcgaaaggtttggtgaagataatcccccctgaggtcctccagcaagatacggcatattcgggtgacctgaatgttgattaggtgatgcttgttgagatctgccacctggtggaggataagaagtgaaggaagatttaggcactggaataggttcactggaaaagtgtggttgatgttgttgttggtgttggtattgctgctgttgctgttgctgctcaggatacgatgaagttctgtacaaagagtttgattctaggaggcgagcagctgaagaaaatggctgtgaagaccaccttttgccttcagacatgctatcactttctatcatctgatggtcattccaattcggaaactcctcttgtgcccattctgtaacagatgagcctgtaaagacaaataatgggatttaagattacagtgcaatgcaatgcactaaaaaacatcaactagaatgttttttaccagtttgcttttggtcagaacaaattatacagcacaattagttaaagacaagatatgaaagcaatcgaaaaacattcaatttcttgtgttgttcaaacaaagggccttaaaaatagttattcaacatcttcagaaacacccccgcatataacattagaatatggcaatacttactttctctggatacaacatcaccaactggccccatgtttctcgatccacttactacctggcaaccaaataagcttttagaacacgcattaacactgcaaaagcctaaagagcataaaaatgcgatgtacacagccaaacaatagagaaaaagtttcatgtgaaaatcaaaattttccctaattgataacggacttaaacccaagacccacccagtcattcagaagataactggaaagtggaaaagccactagattttattaaactttacaataaagattgaaccgtcgatgatcattggtcgcatgatgtacccaatgatcttctaacaaatctaaccatcccaacatagaaatcaataaaagcgattagcaagttattgcaaatggagaatcttacacccaattaagtttaagctacacacacccactaatccaccataaaccatccctcaagaaattgtcaaatatagattaaaccctgtttccagactcgcaataaatgcagctcatcttcaggccttcaataccatcatttcttaagcgtgaaaaatcataacaattaggactttcaattcaatatataagaaaactactacttccccttttcctttccactatgttaagtgtgaagaacatttgtaaattcaaaaacattaaataattaaacatttgaaaacattaattttcaagaattgcctgcattaaaatgctagtgtccacttaactaacctttgaaaatgcacttgctaggctatcaatatcagatagagaccttgagataggagcctgtattgcatataagaaaataacaattagttccatccagctaaattagtaacaataaacataaacgttaacacaacagcagaacagactgaatctcaaatttcttttcgaacgaataaaattcataaacttaaattcaaaggattatttattacctcttctttaccataaagaaactcctcttcctcaaacccagtagcaggcatttccacttcttcatcatctaatcctcctaactcaacttcttcaaggacatcatttccaaagaatgcatattgtgaagcatcaaaaacctcacctttattgaaacatattaacaacactagtcaaacaaagatattcaattacaaaaaaccaaataccaataaataatcagtttattaagcaaaaccagtgaaagagacaagtatgaagtaaacacaagtcaaaaacaatagtaattcagatccaaatcaatcagcaattcccaaaataataaattctcaacttagcttaataaactccatacatttgaatccattaattattactatttctattccaactatcttaaaagaaaagcttagaaatctcattgaatgaaaatcaaaacaactcaaaaatcagtaaaagcaaaagaacgatttcttcccacctgtggaaccatttcccaattgcttgagatcttgatgattgggagtttctcgaatactactcccacgctcgaacgcttccatatctacacctctctaggctctaagtctaatacttcaaataacatataaaataaaaatcgaacccaaatagcaaaccaaaacccaagaatcaaaacaccactaactctcttccttcctaagtcaaatcagagaaaagcaataaaatctaaaccttttacactaatcagaaacccaaaaccaacaaacgaaagaaagataaaaccttttgtaaacccaaatttctagggttattgttaggatgttagaaaagatctgtacagtgattcatgacagaaattttcttaatttttaaaattctagggttggatttgagaagggaaacaaagggaagaagggaaccctaggtagaagataacgattgtctcaattttttaggcttaaaattcaatttattgaaaagaggagtgactttgaattgaaatggcttttttttaattttatttaattaatttgtagatttattttctctttctaagacaacaaaaatataataaataaatatttctcaaaaaataaagaaataaatattagtagtagactagttgttatgataaaatataatttttatttttcaaaataaataaataaataatatacccaaataattaaataatgattttagagaacttttttggtttcttttatttttaattttttgggtatttatgtttgatttgttttgtggggatggtggaggtgaagaactattggttgggtggcttttttttggtgtataataataataataatacatagaaaaataaaaatcacccaaaaggaaaaatagttgaaattttgagaggcatctttgtgactttggcttccctcctttttagtaataattaaaaagattgctaccaagtatttatagtgtttagcattacgataaaatgttatcgtataattgattagtgatattttataatatttattataataaaataaatagaatacaatattaaaattactaatagccatattacattttataagagtgttgggcataatggatggcccttagtatttttcaataattaattggtttttttatattttttattatttattaaaaaaattgaaaaattgtgactaatagaacttgtagatgtggtatgggaccctacaaaattatatgatgagagtgatgtagataggtttatgttgaggatcaaatttttaatggaagacaggttatagaatattgaagagtacatatatatatatatatatattggagattctatacaagttttgtaagtttgttggttgaaatttatataacaatggaatcacaagccaataatatatacacaaacttgttcctaataaaaaagaaaaggcaaattatatagtgcctcatatatatatatatatatatatatatatatgaggtgtgtggattccttaaatcatttatcaccacatgattaaatttatatattaaaactttcaatttaattggatgaaaatatttgagtaaagattttaaaaaaattagttactagttggggcttctttttatttttagctaattaagattttcgtctcctcaactttgacatgtaccaaattatgttctttgaattttctcacagataaaaatttcccttaaactatcaagattgttgtatttaaagacttttgtctaatttcattcaatcaaactaactcagtgagtgtccataaactaaatcatgctcattagactttgatattcactaaattatgatcatcaaactttgacatgtgtcaaat

SEQ ID NO: 17241 - DNA, 3971 bp, Cannabis sativa
aagccttagtgtctcttttactacagcttgaatataatgaaggttactgatgatatctgactcttctactaatctagtttttccaatcacattgtctacttctcttgcttttctaatgatgtatgggtggtttatcagctcagtcagggcccattcaattgtaatggtagatgtgttttccctgctgcaaacatatcctaacaactataagcctgtaattagtcactaaatatacatttatatgtatatatatgtattaattcatacaaaaaagtcttaatcaaacataccaagataatgtctttatgttatgtgtggtcaatttgatctcttgactctcatcttctgatacatcaagcaagtcctttactttgctacctctaatctccttcttcttttgtcttgcttcttggtgttctttcataactctatccattatcacatcaaccttttctctaacatgcttaagcctttcctaaatccttacaaagccaaattcttaaggaaccaaatacaatcacacaagttaaattccccctaatctcctgaccttcattctcaatttctcatcctcacaacatctctatcccataatcattctcgataccatattgttagttaacctcaagagctctccttcaacatcaacagatctatttccatcaacatttttaagcatcaaacacaaaattctctttaactcattgcgcctaatggggagaaggtggtccaatgtttggccaccaagaagctcagtcatgcaaagcttcttcataatttacaataaggagtatagtgagcaaaagcaaagccaaccattgtttgttgatggtttgagaatagagttcttgtgtctaaaggaactttttttccatctcaggggaggaaacaattagacaagggacttgttggaattcgatcttgaatccctacacaactcacaaaacttatcaagacacaccagcaaatcaatgttgatcttgcagcaatgaatttcacaaatagattcccaaattgtacaaaacatgtcacttgaattattaacttgttagtgttaattcagaactatgattttaatcaagaaccacattcaaattattgaattaagatgcaaaacaatcaatgcttaacacacatgtacaatgtaatcaaaacagaattaaagaaaaagtaaaacagagagaagtagaggtcaaacacaagaattttggtaaggttcaccctaaaacttggcctacatccttgtgagctcttctcgggaagatcagctcttttcactatgatgaaagcttgaacagttacaataatggaggagatttcttgtcacaatctttgacaggtaatctcaatgatctttcgatgcactttgatttggcttctctctttcttgcagaaaccaaaattctaactctctttctttttctttctctctctaacattcttggagctagtctcactagcttgaagataaaggcttgctctaacttgatcaaaatgattaaaggtacttatatccttttgttgaagtcgattgagagagtaagtggcaattggagttagtattgccaacttggacgtttgttaagttggttgagataggtggaatcagttgagtctaggcttagtttcgagtgatcaagtgtggagaggattattgtaagttgttcgtgcttatgatggggttcaaaacaacatttccaccttcaactccatcaatagcaacttggtagagtagtcttcttctccttcttcttcttcttgagggtcttagctcaatatggtaatgaccaacctctattacctaatcctagaaaatccaaacagtgcttgaacttgactaggtttagaattttagtccctacatctgcaaggttctcttttgtgggaactttcttaatctaaacttcctcttgtgtcaccttatctctaatgaagtggtacttgatttccacatgcttggttttgtcgacagaattcttgcactaatggatacaattctgactatcaaagtacatagtgagaacttccttaagtaggtgtagctctttcattagacatttgatccaaatagcttcttttattgcctctttcactgaaacatacttagcttctgttgtagacaatgctacaataggttgtagttggactctccatgtaatgaacgcatgattacaatatggattagtagggcaattaacattaattattttatagttatacgaatatttttattatggtcccaattttagaaaataggcataagagttataatttctcgattctggaaattttattaaactctaagagtgttatttatgctaaatataaaatatgtaatttttatgatttgtgctcggcgatgatggaaaatgtgacaaatggcaattagagtcacatgggtaagtttaaaacctatttcttagtgggacaaacgtatgtgatattttgaatatcgggtgtaaagtctttttttggcaatttaggtgtcaaaatatttttatttattgcgtgatcattttgtgcatttaaatcgattttatctccatgatattgtgtagttattgctcttttctatcaaaggaaagaatcattgttcagctgtccattttcttgttttggaaacttcttgtgagaaaagaaattctcttatggaaagttggctttacatggaaactttgaccattgttatttctctttaatgagttcgatgcgtcttgataagattagatcagccacactgtttttggcaggtatgaaatccaagttcataattgggcatccttttggcaagtttcctattctggtctggtttgctgctgcagaatctgattctaatgctaaggattttcttttgggaaagtttgtacagctgtggaatcaattttgtagctgtctctagggttcctatgttctataaatagaacctagagagcagtcaatcagttcaactcttctagctttcattttcttacatattttcatttatgaagagagagttctttttgtgagaacatatttgttcatctaggttttagtatttatatatttgttcttatactggtcttagggttggttagaacaacatgattaaacaagagaaaggtcttcatgagaagacttgttcaagccttatttcgggaggaagtaaacactcacacctcaaagacaaagggagttcgctgtttgaaggtggttcagaaatcaaattcgtgaagtgtgttacaaaggattgcggcaaagatttagagggaatctaaacttatataagtccattgtctttgtaatttctgagactttactaatcaatttctttctctgagcatggccccgtggactaggagtgttcgaaagaatactgataccatgtacaaatctcttgtgtcaagtgattttattttctgctattatttttatttctgttgaatttattgttttgattctggtttgtttctacaaaactgtgttctgtagtaacagaatcacattctgttgctgcagactgttacagttaaatttttaccgtttttctgtaataattattgacattagcaaaaactctgctttttcaatcggcgggacactaaactcttaatgtggtccattaacatttctgtgtatttttgtgcaatatgtcattttttgcagaaggaagtttgatttctctaccaccattgctcaatgattctaattatccttattggaaagttagaattaggggtgttcattagatcacatccaatgaatttggacacaaccgatccaatccaattatttattagatattgaattttgtcatccgatccaatcctattgaattgagtcatctgatccgatccaatagatgtattagattagatcggttccgaccattgaatgtattgactggttttttattagattggattggatccatccaatccattttagctaccatttaagttaatttcattaaagagaaaaatatatatata

SEQ ID NO: 17242 - DNA, 3365 bp, Cannabis sativa
gatggagcttatgtagaattttcaagcctactcataagcggacattctagaatgaacaatgataaaactcataatcctagtcacatagctccacagaattggtcattattctatgtctagtagtagtagtttatgcaggttcccgaccaatcccatgcagcgcagctacatgactcggctagtgagttccaataattaatgaatagtgtgtcatggtatagcatgaaacctggaaaatagcttcttggtgaggttccatgtgctctttgcagctgcatcaactggacatgaaacaagtcctatgatgaaacagaccccccactgagccaaactcaaactctcatccttattggcggcatgggccacctcaatgaaagtgacttgtaatcctagtaccaaaaccacagccaagggaaaccatagattttgatgaatccccatcatcacatttaccttctctagctctcttgaattcaccatattaaaaatttggcagaaaacaaaactgttgaaaatcatgggcttactcacatgatgctgccacttatgatgaaccttgaagaatttcagtagatggtgccctttgacttgaaaagtgatcaagatagtagtctgatacatagtctgaatgatcatatttctccacatgtgttttgaaatgacaaacttgtttggtctgattggacccctccgcatcaactcaatattaggttgttccatcagtagaacaggaccaatgacaaaagttgtgacgaaattagtccacaacagttgaatgccagtgattgagtttgatcccaaccacattgtggtaatggatgctatcaatgttccagcaatgttggtgacgaattccagttgaatgtacttctgaacgttgtgataagtacatcttccgcacttagtaactttaagcaaggatttcaaccttccatcaaaaacttctaggtgagaactctctctaaccatttggcagctccatcgccccattgtaacaccaatatttgcttgtctttgcaagagaatatcgtttgttctacttccgagcgctacaacaacttctcttttcccttccaagtatttcattagaagtactctgtgacatggaagagagttacccattacacaaatcttatttgcattatcgatcctctcttgctcgttgtacctttgaaaatcttcacctgtaattaccattccacccagggaaagaatttcacaaggaatagctatccttctaagctctgacgtatcatcttctgagaccaatatgaacttcacctgagcatctttaaactctttcagtgtttttttcagctctgcgcaacaggtgtacttcttcataccaaccattgctattaaggttaagtcatgatcctccttttccaatacaattggatcatatttccgcttgcaagcatatgcaatggtatttagatctctcaattgcatctcttcaatatgtttgttgaaaatttctctcttgatgacatccaattccttgatatgtccattcctgtcataatagctggagcactttcccaatattgttgatgcaggtcctttgaaatgcaaagatatattctctttctcagtactgttgttcccctttatcaaaactgcacttccttcctcatctgagctcaatctcttgatcttcataattttccaactttgccccagagtgtcaaactttatcttcaaatttaagcaagcccatgtacgaagtggatcctcttccttccgaagactcaatggtaacacaaagggcgcacagatacctttccctagagtttcaagaataggtgttgataccttagcaagattggagcttgtagtgttgatgacctcttcagcaccaatgaaacacataggaacatcaattgggttcaatggagctttatcagtgcaaatgactgtaccagatcccactgtcacagaactcaacagtcctaaatctgaataggcttctttaggcaacatcttctttatccttaaaatggatacaaaagtaataataaagggtattccttccacaactcccaccattgctacaagtaaagctactatacttgaacatatatttcctttttgtctcgtgaaaaccctctctataacatccatgatttcgtagcttttagttggcttccccttgaactgaggaagatcagtgtcagaatcaaaatgtttgtccaacataacacgaactaaaataaccaccagaatgatcacagaaaatgaaagccctataatgcgtgtaactttacacaaccaatcaagctgagcaggccaccgagctattctgtccggggtttgaccactagaggcttcaaaactcataagcttgctaaattcggtgtctgcgcccacagttgtaaccagcatacgtccacttccatgagtcaccatgaaaccatgaaacaaaaagggatcatcttcatcaacagtggactccgatccgtcatgcaccactagaaactcacctctaataaataaaccatctgcgggaacaacacacccggtctccaacaacaagacatctccttggacgagttgagagacatacacttgttgtttgatgtttcctctgtaaacaaacaccgaattctgcttcaagataggcattggtcgattcctacgtgagcgtttaatttcccagaggtcacgaaatgcaggggcaaagacgagtattataatggaaaccattataaaacacccttcgtaccaacctgtctcggggccatctaacttcattcccaatccaaaagacaaccctgcagcaatgaagagaatcatgatgggtatattgttgcagtgatttaggatgattctgaagaagcttggagaagttatagcttcagtacttgcgtgtcctgtattgttggggatatctaaattagtacttgttcgcctatttagatcttcttggtggccagggattccagcctctaaatcagtattgagagcctctgcgactcctttgagacctccaatttgggttaaggaaatcaaatccttggttctcgtaatctctgcgattctgtctttttgttggtttataatttcatcagcagtagtagcagtaccaatattactgctagtgttgttggttttcgcaactacctctcgatgattgtgatcatgttcatcaccattgggtgatgcagggagtagtagttctgcttcatctgtttcctgatgattaatcaataaattgaataagtcaaaaggtcaattgatgctgagagctagctatatcatttttgtgtgtgctaaaactgcttcgaaagaggtatgagtctaggagtactgacttgtaatgctttatcaatattatactaacatatatttggaaatatattcta

SEQ ID NO: 17243 - DNA, 5990 bp, Cannabis sativa
  modified_base (39)..(64): a, c, t, g, unknown or other
  modified_base (212)..(219): a, c, t, g, unknown or other
  modified_base (3949)..(3949): a, c, t, g, unknown or other
  modified_base (4895)..(4922): a, c, t, g, unknown or other
gatatcctacaaaattttgagaaattcggaataatttannnnnnnnnnnnnnnnnnnnnnnnnntctattttacacgcgtataaattataaaatagtcacgcgtgcaacacactgcttgagcgtaattttcggtgtgttaaacatttttgaatttcttaaaattttgcaggatgtattaaataactataatttacatgactatgagaaaaannnnnnnnaaaaaattatttcagatattaaaacagatagagatatatggatgtatcctttttaaggggtgcattataaaattttccttaaatttaaatacatgacgatattatttatctttatagttttaagttaatataaaaattaattttgtaattggatattcaattaaaaattaatttaatttaattagtaattagattaaattatattggattttaagttgaattttttaaatctaattacttgaattagatgggatgagtagaaaaatagatgtcaaccctagtaatcactacttgtattcatgtttttccgaaacacgcaaaaggcctgattaagtaataatttcatattcttcgtccttaaagtaaccacgttcaaagcaaccaactttattcggcctggtcagttgtaatcttcttcagttgtgagaaaagtaaatatctaaggtgaggtttaaagggaagaaaagttgggtagatgtaaatggaattctcacgcacgttttacctttttactaatcaaaatagaaaattgcactagtaaatttacctattggtaaataatttgtttaatttggaaatacataatttatttatttgttaagtagatataatgttctttataataataataaatatttatatacttttggtgcttattgtaattggatggtttggcagttggcactcccttggttgaccaatagaatggaggccttgtaaaagtattagaaaaagtcgggcatccctatcatgaagttttcattaagttttttcgctttttcccaattccatcttttagaagaaacagaaaacatgacaatcaagtttgaaactattaaaattaaatcttctttcaaaaaaaaaaaaaaaatcttataattaaatctttaaatatattcttttgtgtcttttctcaaaaaaaaaaatatatatatatatatatattcttttgtgaatagcttttgtagttttccatctattatatatttaaataaatacatataaaaaatcaaatatttcatccaaaaataaaaaaaaaaaaattgctgaaacgataaaaacttagttactgaaatcttgaaggcataattaccaaatattttttcaataagaaattaaatttccaaattacgagaaatcaaaaataaaaaaacactcagttactgtttaaaataaaatcataacaaattaatgatatttttaatattttgtaagagtcatgattaaaatctgattaatcgagcacaataaaattattaaaagaatccaaagaaagtagtagaacggcatgtatggtaatactattacttaaaacttaaaaataaattaaaaataagaaaatcaaagaaaagagaaagaataaatagatcattgtgcagaacacgtaacgcgttaagggttattgatacacatgttaaacaccgctgatggtgctggcttcatcgtggccttatgcgatcttaccatgcaacacggaggacacttccactttcattttttttttctccagttttctctgttttcacacatgtatctctaatacgtatccttgaaaaaacacctttccaaaccttttaataaactcaactacgtgtcgcaaacaaaatcccacgccacaatgagatagggaaatttaacttaaaaaaaaaaatataggaaagaaattcagatcaaacaataatacaggaaagaaaccatattaagtaacagcccacctgtcatcctaatcagttatcagtcccacacgcaaaagaacacgatatttatgtgtgcccaaaaaaaatccaaaaatatcagaaaccaaaagaaagaaaaaccattcttatcttcttcattttttatccccaccaaatttgatctcatccgaatcagtacccctcactctcactcactccccttttcttgtcttaccttacttatatattaatgtgtttaaatttaatcaataaagtaattgccccaaatcctataggtatataaaaacgtaatgataaaactcttataataatgtaatgattaaaagaaagagattaattttgggcgtgaatgtaggtccattattagttgttgttacggtagaaagagtcagagtgggagcagaagcacgcataagcagcactaattaaatcaatttgatctgttttttatccaacatgtgcaagtggcctcaactgaactcaacaaactctgtcattcacttcttccccccacgcggttctgcatactcattcctaatcatgctctttgcacacccttcccctttctcattcccaatataatattccgacaattatatttaatattcataaaaaaaaaaatacataataaagagcttactgaatataacagaaagttgaacataaaaattttttttaaaaaaaacaattgaattaattgaattttaactattacaactgaccaacaagctaatatttaagataattctgcaacttatatgtacaggaaaaatgagtcttaaaaaacataaagttccattttcctaatttgataaacgaatttttcaaaatataaatggtagaagttcaattagaatgctaattcgagtggtgttcagggatttcgatcttcagaggtgagttcgtcaggcggatctttttgagcgggtggggactttcaacctcttcgtcgccggagacaaagaaatcacgggagtattctggcagagcaggtaggttcaggtcaaatccgcggtggctttgacttaacgaggtgtgagtgtgggaggtggaccctatgccttcggatgttgtggtcaaagcgctattggcagtggctgcagcggtggtagctgcggaagcacctccgccttcatagtggcacctcttgtgtccaccgagggcttggccggttgggaaagatttatggcagattgaacactcgtgagccttaccagtaccgttagagactctggcagccgcggcagacgtggtagtggtattggtagttgtcgaagacgtagactgatctaattcgcctccatttcctttcctatgactagctttgtgtccacctaaagcttgataagatggaaaagccttattacaaacagagcatttgtaactcagcttagtaggcgaggtagttgccatctgatgatcgactggagcacgagtaggagtcaacttccggcgctgttgatcggcaccaccacgagcgagcatgattaagcagagagcaagatactcttcttcggtggaaggatgatcgtgacgagaacgcttggagcgcttgcgcttggcccatggctccaggtagttaaggctggccacgtcttcgaagtgaaacggcgccgtagcggtggtaggagagttcaaagcttccatagccataatattacacaaagacagaaaccctttttctttgcaagggaagaaataaaagagtatcttcagagagtcgtgtatctgtatgtgtgtgtgttttttttttttttttcaagggacttggaatgtgaattgagtttggaatgtgaattgagtgagagtgagtagggagtatataaagggagaagaaagagaaggataggaagttgcgtgtcgagtggtgagaaagtaatgagggagtgaagccaagcctgggacccaaactacttttcaataaaatgaatgaaaaattgcaccttttttccaatttgcaaaaacaaagagtggagcacgtttatttggttagtactttcttggtgtgcaagtagagagagagagagagaganagagagagagagagagggactaagtcggtcaaagagtgagactgtgaatattaaggagtaggaggagaagtggcaagtgtgtgagtatttgtgggcccatgaggctaaaggatgtgagaatacttaattaattaattcggagtttgggtccaactttgaaaaggaatcaaagtcttccaacccaggagaagaggactgaggccagaaagacggctataaaagtcaaatattaaggagttgatgaaggtaaaaggataaggggtttggttattcgtaaagaccaacccctgtctaactccaaccaagacccgatcaacagtgtatcagggaggagcagcagcagccgtggtaggattattttaggtagtggcggcgacttttccttcttataattttataaatatgattttattttatttaagtgtataagacacaactaccgtgtttggattgacaagttgagagtgggtttattaaggttccatgtattaggacacaccggcatatttaattcttagtgataatgatccgcaacacgtggaggtaatatccatctgtttctttcttttttatcttttaccccatctaatctttgattatatataatttatgtaattgctatttggagcttgaactcaccacctaatttccatcttattttgtctactttttaccaacaaaagaacaaaagggcctccctagtttttcttttttcactttcccaactaatgctcggttaaacaaaaatgcggtactgacttcaacatctcagtgtcttttattacagtaaagtgttgttacggagatgaacttgtgctggatattgtccaccgtctattttatattcactgttgctatagtaggctcgtattcttattgtggaggctattataatataatttattctccactaaacaataggatttttattattattattattatnnnnnnnnnnnnnnnnnnnnnnnnnnnnattattattattattatttaacttggtcaagatttatgttttttgacgttggctttttacatttgaatcaagactgaatattgtcactattctatcaactattcatctttccaccacgatggacctatgggtcatcatggtggagtcgttcgttcatataggagaatttattagccaaatttctggaaggagctttattcttttccttttgtttgagtcaaattcatcaaatacattggagtacatgattgggcaattggctagatgagaaacagatattgattgcataaatgcactaaccaaatttccatcctaatacaatattgcttcactctagaatttaggtcactgctcacctattatgggtactacaaaatagtgaaaatacaaataagggaatgtaatggtccagtccagctagagtcattaaaaagaagaaaagaagtaggccactacccattgctcgcccacaaagaaagcaaataatatttttcttataagaaaatgtaagtatttgagaaaatatttaggttttttaagtttttaacacttaaatactggagcatttttttccgcaaaaatgattaggtggcttaatttcaaataacattccaactcattatatatttgatgtaccatgtcggtcatttaaaatatgcaccactacaaaaatgatagcgtcaaaatccatatatacatttattgggaatattgacggctaaacagctttacgatttgtaagacttaaccacaaaaatcaaatttttagcggctaaactatctaaacactagttccgttttgctctgcacaccttcgtccaaaaattacagttaaatgtcagggtggactgtccacgtgtacacacttatatacgtggcgaatttttaatagtccacgtagtattagtgttaaaaaataattataaatatttaaaaaaattaaaaataaaaaaaattattttttttttactattttacttttttaatttacaaaaattaaaaaattatttttttttttattttttcatactccaaaccgaatctcaattcacttacattcaaacgttt

SEQ ID NO: 17244 - DNA, 10966 bp, Cannabis sativa
tcctagcaatcgagtttgccatgccttttttactgatgcttcatgggtaaggggaagcgcgggagtggctgcaattgcagtagattatactactggtgcctggttcgtcaaagccctcaaatgtgaaacggctttagcgctagaagccgagttcaaggcaattcaccttgctttaacttgggcattggagctgggatggcatgaagtgctagttctttctgatgcaaaagttgcagtccaatctttaattacaagatcaagatctcctgattggaaggcgtcgaatattttcttttctattgttaatgttttgaaaactctgtcagttgttcgtttttcttttatcaatcgtagtcttaatgctttagcggacggcattgctaaaaatgctagagttgctagcgatttagctattttgtatcaaggggagggtaatcccttgtgattcccatcgactttcttatttaatgaacatatactccgaaagaatcttagacttgcttttataattatcattattagaaattttagtgtcctcgttgcatagctcggttgctatgtgccacaaaagaatgctttcggtgtattgaaactcgcttatgctccatttgagtttgatatagctagcaaaatcttgaccaatactctgtttaagagccaaaccacctctttctatacatgcctctgttgcttctttgaaagtgtttgccttctttgatttttctttcagatttttaaagatgaattcttgtagatcttctgtgaccttatatgagctcgagaatctcatgattttcagcttgtcaagaaattccctaaggtgaaaaagctcagagaaatcgaaaagccaagttggtcgctcatctaaacaatagctaatcatattatattgaaaaaccaatctggaccatctttttctttttaagataattgaaggaacatacctcttccaagtgtgattaagcaccacaagaatccaatcagagaaaatgagcttaataactgatatggtgtcaaggaccatggctccaataagcagagaataactaagaatgatttcaatccttttgaaacctttcttttcagttaagaagtatgctatggtggcactcaaaatcgaagataagcttatgaatcggagtatgtaaccaactctttggcgcaccacaaccaccttggtgtgaagaacttggaacaagagacttagctcatactcaactactctgaaagcacatttatgatcttcaattttcataaagtactctctgcatgattttctatctttggaagttagaaaaaacccaacaatgagtcctttgaaccttccaaagagaatatgagctgccttgagtaatcccaattcatcacaagcttttaaagtgattctattaagttctatgtaagaatcaagcctagaagaactcccaacaccactctgatttgctttactatctccctgtattggaatttgaagaagtttagagaagtagtttgtggaaacctcttcatagtcaggcccgggatctggttttcgtagagcagtccttccgaaacgttccaagcttgcaaggtaaaaggctcttgtcctctcagtgtacttaatgatgccaacaaagaagataaggagtgtgggaggccatagcttgttattagggagagtgaggtagaaactgtaaccagcagccatgacttgtaagacaagaccaaacaagtgcctaagccaaaactcattatcttcaagagcaaaagaggtaatggtatcaggtccaccaagatggagtaagagaaaagaagcccagaatgcataaatgtcatgatcatattttccatccttatgatcatcacaagatctggtctgttcttgtgtaattaggcctatggaaactgcagcaacccaatcagctagcaaataggctgcccagatgagaatgagtaagaatgagttcttgcagcgttgtctagaggatgcaaacaagactagaattatttgtagaagaaggctcagcataatgcacccccgaaggctccataaatcccataacttctgtattttttctgggattggtaattccatgtttcttttttcttgatcatcaagtattggttagttcaattagttgatttgggtaatcatgattttggtgagggtacattaagtaccaatcacacaagcacaccagctttttccacaatggatcattctctttcttttgcaaaagtttaaataataatatccatttataagagcaagataaataaataaaagagaatcagtattaggccccgtttttctatcttttcaggcctctacctcactttaactttcacattaacatgatattgtccgctttaggcttaacccattacggttttatttttaggcaccttcctaaaaagcctcatactaatagagtaagtagaacacttgcatccaagacaactccttttttattcttattcttacaatttgggttgattctccaataatcctctcctcaaaccaaggaccacatattcgtggcctctcctccagcgaagccacttatgttgctgctatcaccaacggaacttgccgcccgaacatcacctttgttaggaaaacttttgacacaagtcctaacactaatctccatattgtaccgccgtaattatcaacagacacgccgcctgactacctcaatatcaggtagactttcgatataagacaccatatagatattcaaatgtgaggtcatcacattaagagcttctcccacaatttttttaccttgttaggctgctacctcacctcccacattagtatgatattgtctgttttgtgtctaagtcttcacagttttatttttggtcacattctcaaaaggtctcatactaaaggagtaggtagaacacttggttgattctccaacaatcaccccatatactatttttttatttttacagattactccgttgtggttactcagataattgctgcgtgaattgcaatgtgaatttaaaattgctatttaagttggagcatgtatttttgcccaaaaaaaaaaaaaaaaagaaattctttgaaatgtataaacgaaaaaatctcatgaataaataatgtgtatgtcttctaatttgaattttggttaattctgaacagatttaacagatttccttggctaccccactcactctttttcttgaaatgaagaagatgagttttgttgtttgtggtcttaactttaataatatctcctgtctttgtctactttatcaaatgttgattccttcttctctctctctgtttattccacactttccaccattataaaacaaataagtcaagtcgcgcaacgtaaatttactatccttttgtgaccataataattatttttggtgggccaatataaattatggttgtttctgaaattacagaaagttattttgttgataaaatttgttgtaaaattattttactaataaatttttaataaattgcggtataaatatttaatgttttagattttatatatttaaatactttatttttatttttgaaggcaaaaatacttaatattacaattctcatgtatccgttactgttacttttattaactcacaaatattatttttaccaaaaacattgttgtagcaaaagtaaaaaaaaattacattaaatttgtgttaattagtgtaacaattggagattgtgttagaatatgtaagatattgaattggactaataattaacaaacacttactcgtggtggtattgagcatatggtatttctctatgtttcttggcttgcatagtggccttttttcatcttctagttttattagcttgcatatatacagatatattctgctctgctttatcaatggctgcagcaaaatataatctcacctttgttgcaagtcggatcctgaaattgctgggttctgaagaagagcatatagcacagaatgaaatgttgatggggctaaaggagatcattgaagagcatgctcttgtgcttcttcatgcagagaacaagtgttggcagggcgacgaggacgtgtatcgttggatgatgaagcttgaaggtgtactgtgtgatgcagagaacttggtagatgagttgagtagtactggaaatgtaatggcgattaatcattttattcgtaattgtttcatctcaccacatactcccaagatgtctaataataaggaggtcaacagagttaggaggagactagaacaacttgctgttgacggaagagatttccatctggataagcttagtgagaaacaagttggtaccatgaaaccagacattaatcatgctgcagtagtccaagaagaattttttctttctacagacgatgacaaagcagcgatcttaaagtttgtgtcgaatccacatcagtccgatctggtgaatgttgaagttcttcccataattggcatgggaggaattgggaaaaccacgcttgcgaaagaagtgttcaatgatgagatggtgagagatcatttcgagttaagaatttgggtaagtgttggtgatatctttgatgtgaaacaaattttgagaactatacttgcacgcgcaactaaccgagcaatagaggatcttgaatttgaagtgattgcaaatgcattgaaaggaaagctgtaccttattgtattagatgacgtgtggcatgtagacactgaggaatgggatgtgctaagaaatattctacgtgttggtgcacacggaagcaaaataattgtaaccacacgattagaggaggttgctaaaattacaggcaccatggcagcgtattgcttagacatgccttcggaggagcagtctttgcttttatttagaaaaatggcttttaaagaagaagaagagccttcggagaggtcttaccagaaagaaatcggaagggagattgtgaaaatgtgcagaggatatccttttgtgataaagatgttaggaagcctgttaagaacaagtagttcagaagaagagtggcgatcattctatcatgaacttcaagccgtaagaaatggagaactttttgaactgatggagctgtgttacaagcatcttccttcaactttaaaacattgtttcgcttactgtaccttatttccagtagatcacgagtatgatgtccaaacagtaataaagttgtggatgtcacaaggctttattattgagtcactgactggtcaagatcaatctccagaggatgctggttatgattatgttttggaattactcagaagaggtttcttcctagtatctcaaatagacacaagggacagggtgatcaaatttcaaatacactatttagtgcgtcatcttgcgaaaatggtagcagagggccattgcagaacgataggaccatattttagtgatatggatcatagaagaacttaccatgtctcctttaataacaacttcgtagacaatgtcgattttcaagaaattgaagtacgtaatatgcgatcgatggttgtgccatttgagtcactgcataaagaagacaggatacgaggcaatcaacttcttgatatgacagtgtctagatttatatttatacggacactagatatgcatggtttggggataaacagagtaccatcttctattacaaacttgaagcttctcaagtatcttgatctttcagaaaatgaggatataacagaactgcctgattcaatcaccaaccttctaaacttgcaaactttgaaactctcatcatgttatgggcttaacaagttgccaagaagaggctttgagaatctgatcaatctccggcatcttgagattgatggctgctacaatttgaccagtcttcctcgaggcattcatcaactgaccaatcttcagatattatctcaacttgcagtaagtgatcagggcacctctccaaatattggatttaatgcatttaccaaagaggttgatatcagaaatttggggcatgaaaagttcgatatgagcaggtatttgaatgatgtggtatcatgggttcaatcattgtctttgcaatgggaaagtaatgcacctgagtccaatgagcacaaaacgccactacagagtgagttgttgttagctcttaaagaattgactctgcttggttttaggggaaacatcttattctctgctaactgtccaagcaatttggtcaagctttcattgcgcaaatgtgttaactgcagaagcctaccagcacttgaagggttgtggaatcttaaggtacttgtactggacgaacttatcaaactcgaatatatttcggagaatgagaaagccacacccttctttccttccctgaaagaactatggctgacagaactacccaagctacagagttggtggagaaatgaagtcatgaatgttgatgtgttgccttcattcccttgtctttccaaattagttattgaagattgtcccaaactcacttccattcctctattcccaactctggaggaaggtctagctctagactcaacttgctggaagccatttcaactcaccttaaactgcaaaactgcacctcaagaagcatcatcctcgtcgtcctcgccatcatctctaccactctccaacttaaaggctctccggattgtaggcattgaaaacttctatggtgatgaaattgagtggagaactctaaaaagcttagaattcttgagatttgattctcttccaaacttggtgagtcttcctgaggggcttcaacatgttgtcagcttgcaagaattccaactctggcgctgtggtactgaggaaatccctgaatggataggcaaactccatagtttaagcaaactcatgatttgtttatgtcatcgtttgaaatcgttgccggaatcgattcgggagcttaaacttctagagacactagagattgaagagtgtgacaccttattaaggagatgcgaaaaggagattggtgcagattgggaaaagatttgtttgatcaaaaatctgcgtttgggtaggatttatgacaaatgatccaaccactcactcactcaggtacaccattgttacttattagattgttctttcacattttggaatgcctctgttagcatcagctatatgatctcttttagattttattgaaaacatatcacaaaattacagatagtttgctaaagaataccagcaagttcagaacaattggctttggcaaacatggaaaatcagtcattcttataactagtgtttatatactgttgatgaaacatgcttatagcttcatttttagctgatttctattactaatgtttaattatttttctcaggaggaattgcttcacatgcttctttccttgattctcctattggttgtttagttctgttgtagagtttgtaatgtcactattgtgttgtgtggctttgtttggcttgtgcttttttttgtttatttctgatgacattatattatatggtattatgatatcatagtttgatgtatgaatgaatgtattatgtatagattggatactgccttggggttttttcagcatatatatgattatctgatgatgctttttccacccttttattacaacatattattaaggcctcttactctattactaacccaatgagctgtctgattctgattggtttgatgttataaagtgtcaatcatttgagtagcaaataatcacctttatcccaaattcataacattctttcatttcattttatttaataacattcttaaaacaatagtattttgagattaaccagaaggagagatactctgtacaccgtacagaaatatgtgatgaattacccaaacactactgatgattacaaaatcatcttgtttgttttgcccattcccatttgttgtttcaatgttttacttttggcttctctctcttagtcattcaaagatttttaatggagagctttagagcatgtttggtattgttttttgttttttgtttttaaaaaattgcttttagaaatgacaacaaaaaatagtgttttctaaaaacaatattgagtaaaagtaaattggtttttaaaacagaaaataacattttgttgttttcaaaattcttgtttttttgtaactttgttttttgaaaactgttttcaaaaaacaaggccaaacaagcaaaattgttttcaaaaaacattgaaaacaattttctgtttttaaaaataaaaaacagttttttagttatgatgtgaaacatgcactaaagctttctacacctttactacggtcatttactaatataagggattcaattcaagcatcttatattatgtagagcagcaataacactagatagagatctagttagaatggaacaactcatttagttataatttccaagtatgaatttacatttgaaatgtgatcaacaatttgttcaaactatgatcataatatacatacaatttcatcagaaattaaaatacaaaccaaacagttaagccacacaacacaaccaaacctgagaagcaagaataccaaccatgaaattcctcctcaatgtatgaaattttgaaaatcaataataaaaatcagatgaaaacagcacaaccaaacctaagaagcaagaataagtattatttataacaattatatggtctgagatctcaatttagaaaacaattctatggtctgagatctcaattgtacgctgtattctctagtactcagactcaccattactctaaatgtgaattaacaaacaaagaaaaataagattagaagtacctgaaataggcaggagatatttttatcaaactatcatatgtaaatgatcttgaagtactctttcaatgtgagtaacacgagggcagtgctcaaccttcacatttgaggaagtgatgaggtcaattctatcatgtggtattcttaactggggacataatttgattgaaattttgctgagagttttgaagtcatcgatccaagtttcgatttccactaaattataacagcgcaaaatatggagttgttgcaggctggttacttgtctaagtcctcctttaagataatcatttatgtcagcaacattatccaatgtcacagaacggaggctgtgaagggacttccacatatttggatcagaattgggcatgtcaatgatatgtagtgtcctcaatttcgagagaggagtaactgttgttgttgatgaaatattctgtggagctggaactggtgtcttcaatgtggagtcaagagcaactgtggaagaaactggttttggtcgagaaacttttttaaaagaaggtgattttggtttcatatttaatgactttgttcgacgagggcttctccgtgacttgctcttggtgagagtactagatggtgatgatgatgacacttccaattgagatgttagagctcttttctcttctattgctgttgtcacagttcgtttgaatggcttccaacttgtgtttttgagcactagtaattcttctaaacatggaaacagaggcatggaaatgagacaaggacaatcctcaaccaccaatctagaaagacaactaaatgtagcattttcacatgaattatctttacaccatccctttagttttggcaaattagtaagcctcagctctttcaaggttgaaaacaatgttgtttttgttgatgtttcatccataatgtattccagattcatcaactcatctactaccaatacttgaagattagtcaactgatccagccgcggtaggcaatggcatctgttgcatctcgatattgataatttcactagatttttaagcaatggaagccaactcgaaaacttgctaccaccataagtagatattgacagctctctcaagtttggatgtggctcaagatcttctagtgcttcttcacaatcagcttcattaacagaagagttaatatcccaaatcaaaatcaaagataaaactttcttttttccctttcatgtttgctgctgctgtcttatcatctttgggatttcttagatttttgattttgatctcgcctctcaagtagtttagacaacttagttcgtcgagctttccatttggctttgaggggttgtccttactcagcccaaattctgataatgttcgaagatttgatagttgacttagtcctcttggcacctgagttaaacaatgacatgacttgttttcgagatgtctcagattaaataacctcgtaatgcctctgggaagtgtttgaagattactgcaatggttgagtttcaaagtctgcagaaaatatagcccacaaatagactttggcaatgccttaatatcaccattttgagacagatccaaattacacaaaagcttcaactcactaatagaatcaggtaatttcttgatgcctgtgttatgcaaatccaacattcgaagccactcgaattttggaattacatcacaaatagactgacttgatccgccttcaattgcccgctgatattgccaaggcaaaaacagacttcgaatccttttcaagtcagaagatgggattgaaatctgccatgatgaatctaaatgaaaatcaaatgatacatgtcgaacaagtgttgcatcatcaatgctatcttcctttaagattaaagtagcataagctttcccagctatttgtttagcaagatcatgcattaagttaggcattctgcatttttttatgtaacccaactgatcttgctcaatttcatgaaagaaacatcttccatgtaaatccacaaaatacttataacccaatctctcaagatcttgttgttcattattgtcctgatcttgatctgactctgtaataacaataaacccctgtgacatccacaaagttatgagtgtgtctacatcaatctcataatcttttgggaaaattgcacaataagcaaaacaatctttcaaagcaaatggtaaatgatcatagctcaactgaagaattgccaaagcattattttcagtctctattatcattgaaaactcatcaaaaaacaatttccactcttgttttgttttct

SEQ ID NO: 17245 - DNA, 2262 bp, Cannabis sativa
  modified_base (102)..(103): a, c, t, g, unknown or other
aaaaattaattatttttttatcaattttttttatccattttaaattttattccattccattcctattcccattcctactcccattcctattcctatattttnnttcctcccaaccaaacgctagaggttatctaaggataaaaccaatttaacaagagcatgagcactagtattgtgctttctattacaatggtgaaggaattatgaaaatccttttttatgttgggccttgaatttctgacgaaaatcacatcaatgagatttccaaggaactcggtgataaagtaaataaacattgaccaaaccttgtgccacttacgcacaactcctaataatttttccatgtcatatccacgaagtttctatgatttttaccaattcagtaacataaataaataataatgataatgaacttcaattaatgagaaactattattattaatgtagtgggagggtacctgatttatttctatattatcattatcttaataatattattatttggaaagacttattagctcaaaatatattattataattttgcatgaccccctgaaccaagtccactctagaaaataaagtagagtaacaagaaatgttgttattttcactatgtactttccacttcttttacaaaaggacttggtccctttgtcaatgcattatgtatatattatatataccactaataattaatgtatttaacgtgcatgcattatataacacacttgctactatactcttatataccaagtaactaatcatcgctatggtgatgaaagtattcatggccaaatatctcaaagattataatatcctatttactagattaatgatgatgagctttgtcataatggtcggagactttgtttcaattctaaggtatattctaaatctatttcgctgtttcatttgttctaataacatggaatattatgagaagcaattatccatattggatcaaatggtagcaacaaaagctatgctacttaataagacgactatgtacggtgatgatgatgatgatgatgatgatgataatggtcaagaagtagcagcaaaaactcatccaaataataataaacttgttcgttttggtgatgcaaaaagtgaagacaccaaaatgtatttaggagatgtgaaaaggatcatgatggaggaattagaagtgctagagagtaatgatggtggggaaacagaagaaggagatgatgaagatgatggtggtggtgaggaagtgaagtgggaagaactgagagaagcatttggtgtgtttgatgagaacagagatgggtttattgatgcaaaggaagtgaagaaggttctatttgaattgggaattatggaaccttctgaagccgaatgtcaagccatgatcacaacttttgataaaaatcaagatggcaagataaattttgaggaatttctcgaaataattgcagcggatgccattcactaaatcgatcgctaatcctttttttttttttttatcatggctttctaagatttttctccttgtagtagctttcgttacctttttctttttaattaaatcggagcatggttatacacgtaaataaaaaaggaaaagccatcatgttagggttctagggtttccatcgtttcaccacagccgcctcttcacagatgacggcggcggcggtgcacggtcctcgctcttcgcagacgacggcggcgcacggttcttccccttcgcagacgacgatggcagagatggtgtaagttcccccttcccaatcgtagctgacggtagagacgtgccttccttcccaatcgtagttgacgacagagacgggtcttctttctcacagtcgtcaacgacggcggtgctagggttgttgttgtgttcttcaacgtggtggatgaatttattagttggttttagatcatttgtttaaaggaaagattactctttttagtttttgtttctattgcttattttatttatttgctgtttttaggttattttcaattaatgttttatgggattagaatttttagttttatgtattgaaactaattaagtttttccattagtcttgtcttttgacatggttttttagtttctcttattcgtcttgtcttttgacatggttctatagtttctctctttggttttggcttattggtttctggcgttagttactggttcttggtctgagttcgttcgggtgtccatggcatcgagtagttatcagctgtggaggcttgaactcccaacaagaaccaacacaacaccaa

SEQ ID NO: 17246 - DNA, 7247 bp, Cannabis sativa
gtttctttgggtaatgttgattcaatggagaggaaaaggaaaggtgctatgctatcattctccataagtacatttatgtttagaaagatttaaagttgggtttaaaacatatatatacgtgtatatattaatatatatatatactcctcatacaaagatttccttcttcaccatgtagttagtatagactaaagagtacttgacacattcatatgaagcattctcaataaagagacaacaaaatgaagcttcctcatcagtaatcaccaaggagcgcttgccacttctttgaacattagctggagatcttgaaaattaactcgaacggcctcaaattcggtctcaagattactcaatctgtcttttactaccaacatctttgcctccaagttccgcaactcctccttggcatctttgtgttcaactttgaccttttcgtatctctttgattttgaagccaaacttactagctgctctagtcgataacacaaaaattccacattcatgcctaacccctcaaaggctttcagggtcttttcccaagtggtgaaatcattgaccgagctggagattttgcttgctctgatggcgtcggctatgttgattgtctctgatatgaccccagcaacaagtttacagttcaggccctcgagaatattctcgtgaagaaatgctttctgactacaacagagctcgtagtacttggccaacaagtatttgggaagctcagagtttatgatcaaaccattaacaagaatgttgaaatcatctaaatgtttcacttgatcaaagcttacagctgactcatctgaaagtctaattccatccaaagcctcaggtcctaaaacttcagtgtctttatcagactgttctgatgtcccggaggtagttttttgtgtgttgttatgagggcactccaagacatcatcaggctttaaactttcggtttccttttcacaagcaatgatggttcctgcatgactcgcaataagacatgaaatgaaaataataacgaaaaaagagaagggaaagctgtttctaagccaaaatttaaacaagtttaccagtcatctgtttcatgtgaccttctaattggagaagcccaagagcaccatccacttcatcaggacaatttgttctaatgatatacaccttaaaagaaaaaattgaagcaagtcatagttatattatttgtcatcagagttatgacttcaagcagtaaattttaccatcaataaacataacaaattcgcaatggaatcgtcaaagaatgctcaaacactattaccttaaatttaataggagttactaaatgaaagactacaacatctccttcaactaaattatgagcaattgaaaaccctctccatccagcacttaatcccaccttcaatgcaagatactttgcatcacatacttgcccactttcatcttccaaaaccatcattgtatcttcctttggcaaatacatatcacagaactttttaggaagaccctgccattgccaaccaaaatgttttagcctaaaaaatcaatctacttatccatgactaagataacatttataatattagataagtttaccagccaaaacccaacagaaacatgagaatggagcataagtttaaccatgctaggaaactcaggagctaaagttgcttgaacctcatatgctcgttgcattgtaggtgataatgcagctttgggatcattgtacaagctttctacattcactttctttcgtttattgctataaataatagattgaggcagtgttacaagataatacatctccaacaaatttaaaacagatttaatggaaaaagttttactcacttctcagtcttcattggatttttatagcaaactagctgaacaagagttttcaaaacaaaaaaaaaaacagtaagatggcaaagtcatgtaacaagactctatacacaatctgtgtaaatatttgtgtatcatttcaacaaatttgctttcttacaaaactattttgtgactgtttcttctattatacactacaaaaggaaaaaagtaagaacatttaaacaacaaaatagattttttttcaagaaaaaacaaaaacccacaagttatttttcatattttgacatcaaattgttgggattgtagagataaaaagaacataatgggtcttactctcatttccttttttttggtaagtccaactcggttgacctgaaatgagtcatagcaagcttaattgggttacaaacattaaacaagaaaagtggaaattgtgagagaaagtgaaaaggagtaaccttttgaggtgaagactcagatggtgattgtcttcgttgaggaagaaccatggtttacaggcaaagagttgggagctcaagggtctctctctctcaggacagaactttcaaaagttcaaaaaacaactgacaagaaagctaaacagaaagttttgtattttaaaataataaacaagtcctttcctttcttaaatagaaaataatttcttctttcaaggcaaaatatatgttatagtgatattagaaaggaaaatatttgtttattgattgatttaaaataaaaaagtaatataaatgacttccccctttaatttgatacgtgtgtctcgtgcttagtgttgtaagtacgggtcgagtttttttgacacagcacgagtctagaaggtacaagtatgattaggcacgaaaaaatacgagtttggacacgacacaacacgaaaagtatgaaagacacgacacataaacacaaatagactaacctaaaaagcacaacacacaacaaacctgaaaaacacaacacaacatattaaaaaccttatgaataataataataatatgaatttattaattataagtaaattaaaataataataaaacttaaatataatgctagatattataattgtataattaaaactattaaaatagaaaaattaaaattatatattaatttatttagagtgtgatatagaaatttgaatattcattagtaaatattaaagttctaatgatgttaataatttttttatatgattatttataaaatattgttgaaaagttacataaatataactaaagttataaaatatatatgaaaaagtaaagcccgaaaatgaaaataggcaggtctgtttaagaaatacgagttggcacgagcaaagcacaacatgaatctgagcacgacacgaaaatattaggcctacgggtcgtgccatgtataccctttaaaaatgtcggcactacacgacatgatccatatttttctgtggcacgacacaccaactattttttaaaaagtatggataaatatgggtcgggtcagcacaacacgcacgaacttacagcactactcatgctgaccaaattcaaaaaatttgaaaagtctcgaaaaatatgggcagccccgtcctgggcataagcaggctaggccgcctgtgcctaggggccatcaagtccaggggctaaaaaaaattttccttttaaaattaaatattttttactaactttgaaatattacatttttttttttaaataaagacccaaaaatatttttttcctatgacctactatatttaagggtcagccctaaatacggattatgttgggtcgggctaaaataaaattgtgagtcataacatgtcttgttgacaattttataagtacacctaccacagtttgtaggtctaaaattttcatatcgtgctttactcgggccaacactatattttttatatggaaatgtagagggtagaaaaggtaggagggagaggagtgaaaagagagtcaatttcacttgttaggcataaaagaaagttggaaggaaataatagatggatggatttggtctccctctaaatcttttattttcaatctctccaaaagtgagaagattgaagataagacaaaaaaaatataaatcaatttacataattacccttcaaatatattaaaagtatagtttataattaatgatatagtaattttatatttaaaatttatatctatcatctctcctctcctcttaataccaatcaacatagaggaaagctactatcctttccattttattatattctttatccttaactctcattcctctctaccaaatatagcctaaatgtcaacttattatgtgagtatttacagtatcctactaataataataaacattgtagagtcatgataaatttatttatttattttaaataattaaataatttatttataattaattaagaacttcgaatgtatattaataaataatataatattaaaaaatatatttttagtattgtacttaaaataaaaaataaaattaatattaatttataatttttttggtgttaattcaacactatatttgaattttactattgatgttggtctaaataagatcgaacgcttagtatgcacgctcattacttgacatatttttttttttgacgcggtgatcaaaatctcacatgattaacaacgcagctctccataattagtggcgccaccttctcgacccaggatagttcatcatctaaccaaaagcatatttaccaaacttgacacatttttaaataaagataatataacatatcaagcaagaaataattcttttaacacaaatccgtaaataaaaacaagataagctcatatacaggataaccattaagataagtttatgtgactaaaactaatatttaattatctctatcatatatttaattatctctatcatacttcttctattacggaagcatttacactaattataggcctcatgattgtctataaatataggaatagggcaacatgtaagagacttttctctcttttgatattaagcacacacaataccaaaattaaagatagaacaacatctttttcctcttccctcaatacaaatgacttaagtggaattaagttctcattaataagatttgaaatactccttgtaacttgcaagtgagagcatctctaatatagagtactaaaagtgtgatacatatacatattttaactcactttgatagtggataaaaaaatctaaatttaacacatactaaaaattatatcataaaccaaattttacaccataataaacatcctttttttatttactatcttgtctcctagtgatgtaattaataactaggaataaaattggcatcctaaaaaacaaacccttattattgctgtatacaattttgcataataaaattcatagaaaactgaaaagaagaaaatgaggtaaagattttcaggtcttatttacatggtatactatagtgtccggacttataaagcaacaagtcttagctatctacaggactactgactacatataactcataacaaaaactaaccccaatctcaatacctcatgaggattttctcccaaaatactaataactacattcacatgcaatcgtcttcttaccctgtccaaccatcgatgaaaaactacgctttcagtgacaccgtcgtcctccttataacctatacaattaaaaccttgtaaatctgatcagtcaccagagttaagacattcttaaacatataaacttatgtttacatatgtttattacattatcaatggacctatcgtttcgtctatacccttcaggcaaggggtccggtctgatttagtaacattagcaactggcattttgaatgggaacagagtgttgtgttgatgtgacttatcttcaatgccttgcaatgtcaacaaatttgtacgcaattttagaggtgttttttggccattgtctctttcagaagctgattgatcaagcaacctgtattgcactatctatctctacgaagatcctcctaaaagctttgactctataatctggagcgacgggtgcttttaatgccaatgaaaggtgaatgtttacgagcagaagcaaatggttgtcggttcaaagagccacagaatttaatatcccaaccctcaacattcttaggaacacatgcatcaaataaaagccggcccaaaacactatgtgcattaatgctcgggggtgcaggtagatggactggtttttctttcccttcatcttgtaaaggctcggattctttaccattttgatattcagaagagcttggcaagtagaaatggtcagcaggcccacgggcaactcttctaagactctgatttgagttaactgctgccttctgtaggtcacagattaattgggatatctcatcatgagtaccttccatgtaaattctttcatcttccagttgccgcattttttgagaaaaaactaaagtagccttctccagcagatcagacacagcagccctatactggattggataatacttataatgacctgaaatgaccaggaaatcattaatttagttctaatcttctgaaaatatgacactgacatagaacacagtgaagtgaaataattccacaagaaaatggttagcaaaataatttcattttccaaatctagaagacaatatataattaagttgtagacgaatatataatcattttcctagcttagctgtgtttttttttcagggtatggggactccaaggcgttccgcaccagggttaatataatggagctcaatatatacaatagtgttaagagatgaaccttgaatatatgtctaatggtttcctgaatgccaaagcacatagcttgacatgcaagataactttgaaggtattatacacaacaatgagatgtaaaaataggtttatagaacagaggtaggattttagacaaacctatgtgacaggaacctttcattttcacaaacttgacatctcccccaagttcttgtagacgttgagtgaaattgcagattatatgacagggagcgagatcatctttttcagaacccaaaatgagaaatggtgcacccaaattctaatagtagagggaaaaaaaaagttcaagaaattttccaacaaatgaaacgaataaccatcaatcaggttgataatacacaataaaaacttacaacagaggaatatagtgcctgccaatactcagtacgctgagattcaaatctagtaagatataaagcatccaaaccagaagcaatgcctttaactacccaagaagcaagtttagaagatccaggcattctctgaatggttggatgtagtgcataacgagtacccaaatcacttgtaaaatcaactggaccggaatcaaagatattcccagaaatacaatttctgaccaatcgatattcacccttcaaaatggaaaa

SEQ ID NO: 17247 - DNA, 5725 bp, Cannabis sativa
aacaagcactctattaaggtgagagtgaaaatttattcaattataacgtccgctattattaagttctgaatacaaataggattccctaaccactaaatttcactttttcttttgtcaaagtaagtttagcgcaacaccattacaagatctgctacaatgtacaaaactaacatcttcaagcaagactaaaaatatcatttaaaactagaccattttggacagcaaaatcatagggcatgatttttttggtcaacttttaagaaaatactaaaattttaaaattaatgatttaattattgttgtttaaaaattttcaataataaaagatatattaaaatttcaatttgataaagacacgcttgaataagttttttttttaaaaaaaaaaaaatagtttgattaagtaaacttaattttctttattagtctagtacaaaaatcaaatcatgaaataaacacatatttagcatgtaatgcaccccatcattttgtactataaaatacttttattattattatttgtaaagacttttatatcttttataaattgaaaagatctcatttttcttacctcataagaagaagaaaaacttattttcaacataaaacattacatagtaataaatttcagttttcacttattctttttctttgtagaaaagaaattgttcatgaagctaaggtagtgggttcacaaccatcataaacacaagccaaaacatctctatagtctcttgagatggtaaaggaatcatagacattgccatcactgctcttcttgtactcaaacaatagccatgaatggttgaatgatgtaagtttgacaaatccaaagtcaacatctctatatatactccatgttggttctgtttccccaaattttgttaagtgactcccaccacctccaaccactacgtgaattgttccattaactgtaccagaataatgtgatttttcactattcatacattgattctgcattacaaattaatcatcaaacaatatatatgttagttgggtttggtatatccttcagacaattttggttaaatttgtttggtgtaataatatgtgcatgaaaaataaaagctttgtttcactatggaatttttgcatgggacaagggcatggtaaatcgagatatcaagaactttgtttcagtgctagatactattaaaaaaatattccgatatatatttttagagtcggagatcgagaaaaatgttgaaatagattgaccctagcagtagcagagtacttacctggtaaatgggacaagtcctctcataattatggacatggccaaagaaagcaatgtccaccttgtacttctgccatagcttttgtaagctctcccttcccatgggctccccaaatgacccatctttccagtaagacgaagaataacccaaaacccgatgagctgcaaagatcaaccaaggctgtttttgcctatctgctgaggcaaggcatttctctatgaacttgtactgttctgaaccttctctccagtcatgttcactatcagctatacagaagtgaaacataccaaactttgttgagtacctgaaaaaaaaaataacattacacatcacacaccacaacatgcttttcaaaaatcccagatgataaaagaagcattcaactgtgttaacagattgttaagataattagatgagaaagaaacatgtacattcatgtattgtttttaccagaacttggctctgttctcagcaggaacatagaacatgttctcagctagcacaccacactcgccacctgaatcattgccatcgtagaatgatcctgaccccggtacatcacgctcatgatttccactgaatttggagtttattcaacaacatgcaaacaagcttttaatccaacacacaaactcagaacctgagcatactacaagagctacaaactacaatattaaattctaaggcacataagaacctttgttgattcaaagagaaaaagaagaagagcagctcaatatggcctctcttagtttctctctaaatggggaaggggtgagttagggaccataaccctagtatattagttattaatagttttaatttgacccctcaccaaataagaaatgccacataacgtatctatgcaatacaccaatgacattttaatacctaatacatgtcagtgtgacagaacaaggatgtcaaaccttgctatcatatatggcaaagttgatgcaataggctctacttgagctgtgaactggtcccattgtgagatgtatccatttgcatatgaaatatctccaatgtggaaaactatgtctatgttgtccaagtccttgatgatttgatctgtggtgttaagtgagcctggttgataattactgtactcatttgaaccatctcgctctgcctgcaaaataaacaagaaaaaaaatactaagaaaactatgtaaaagaccatataatagttattaaattaaacttattttcttcttggtatacttttcccatgtcaccaaatataaccacacgctgtaatgaattttgtccaggatatggggatgatttaaaatagtaggttttgctccagataatggtaccattatgtaacatatgtccaagcttgtaagagtacctgatcaaacaaagagtcataaccataagaacaacaatgtcaattgattttttgcagttgcaagcatttctagtaccgaagaatcttactttgagttaggccacaaatccatcagaaaacttgtatggatgaaaccaggatcacgccaaccgaatgttcgagctggtgtgcctgcaaatttaagtgagcttggttgataaagtggtttcgattgcaatatcctattcttttccacaagctaatcacaaaatcgcctctctctgagattttgtgtttctagagtctaaattgaagatgttcctgctaaaattgtttctcctaaactatgtttgaacttcttattcctcttaaaaaggacatagatgaaatgattagtaccacacatgctgtttcgaccaaaagtcaatgttccagctggtgattgaatttgaggccttcctttgaaaccccactcgacaaagggtacagcttcattaatgtcatagccactagtccaggttactgacatctgcatcaaaataaaacatcattctaagaaacttgatagagtataagccttttacactaattttccatagcttcataattgcatattatagattaatactgaaaacagttacaaatggtcggtggtgtaggttaccaagggctttcaatgcattatcagcagctaaatggctgtccaaatgaaatttcagtaaccaaataacctggtgtcagttactgagagctctcctagtgcatattaactaacaaatcgtctagtgtgggatactcatgattatgcattttcagcaactaaatggtttgtctgggatactcaaggctatcctagtccatatgcagcgactaaatgtgctggtgtaggctaatgtaacaggtgtcgtaataaagtcccaaatgatattttggacaggtcttcacactcataagaatactaaataatttttttttaaaaaaaaaaaagcttgaacttacttcgttccaagacctcccttgtgcaagacgaggataaaggggggcctttggatttgcaaagcttatagaattagaaactgcaaccaatttcggctatacattccaaacataagagttaggcaacgagtaaatgctaaaccaatagaatattaatagagctgaaagataagagtgaccctacatacatttgataacccgcctgagaacaatgcgaaggagaaatcttctctttgattgatcaaccgaaacttcaaattggccttacctgtcttggcataatcagtgttggaatcatttgcaaacttgtactgaaacaaaaacaacaagctcaacaatgttctttaaagaaatttaaataactcttatgcaataactcataccttaattggagccgaacatatatatggagcttcttccataatgtctgtagctggacaggtagaggagctgccataatagaacaaacaaatcgataatttacaatgagccttacaagaaagtaacaaaacaacaaaaaaagtcaaacaaagaagacaaaacttgaaatttgctggagaaaacacagcaatccaatcatcatcactaggcttaggtgattcaaatttgacatcgatccattgaaaatcttccccctgcaaaacaatcccatcacctaaaatcatttgagatgatgttttacatataattaccacagtatcaatgataaatatacatatagacaaatatagatgttcagttataaaagtacaaaaccttggtgccaagaacaagtggtagtgttttgacagacgcattttcatgaagctcataaacagctctgtggatagcaatcttagacagtggctgaactccatctccatctccaccatggctgcctctggagtgagccactggaaaatgtactaatcctaataatgtaatattcagccataaatagttcaagcacttcatttttttcagctgaactctcataattatgctatttgttgcagataaactgtaatgatacacagccctctgttcttggtttctagtcaactttggttctatctatattattttatcagtttccttttattcatattaattttcaagtttcaaagattatgaccctctttcagatcaatactaattttaaaaggaaaaaattagttgtaaagtccaagccggccttcagcagtgggccagtggcaatataatcaataaattactaattttaagaggcaaaataaaaaactccatattcgtttcccggttcttaattactttagaaggactacacatacacctttgactaatttgaatctgaatgcaatcaaacaaagcaaaataagtactaaaattcagaactcatttagtcaatgaaaaccaaaataataagttaaactaaatgtattaaaataatctaataagtactacatttcttttcttcctgattatcattagttagcaaatctggcaatttcagtcaaggaggagggaaaattggggacaactcgatatggcattcagttttcagccttagaatgctttttaaatctacagagaggctaaacatacaaactttgggaccagtttttctaggttcaatgtatgattatcaaataactggatcttggaaacctttacatgctgatactcaaaattcttcatttgattagttcttgatgcttcaaagattgggaaagtaacttctccaactccactaaactggtaggacgtaaaaaaaatcaagaagttaatgaaaggtgataattttttttcaaaaccaaatgcaatcaaaacgacagaaacaagactattgcccggcatacatctcatatttctgcaatgcttccttttgcttggccaaatatgcatcactatctttcggtagatcaattgcattgttgcctgcaaaatgaagcaagaaaaagtaggtggaacaatgtaaaattattcatagcaaatatttattttaaaaggtgacattaagactcttaatgagcttagaaaacatagaattaacaagggaaatatgctacaaaaaaaaaacaagggaaatattgaaaaaataaaatatttacagaatcagattgtgagatcaataaattacttgatcaatgtttattatttgagatgcaga

SEQ ID NO: 17248 - DNA, 4386 bp, Cannabis sativa
tatattaagggtaattgtaaattcatttttttacattcttaatattatttatagatagtttaaagtagaggccacataacttttcataatacatatctaacttatatgcgtcacaatatattttgatagatagaacaagtgaatagggacacgagatttaatgctgcttatttaatgttttactaagctgagataagtccactagctaaattctagtaagagtaggagagtcaaggtcatataaacccagtaaggcaaatgaaggaataaatgtttggatagaaagaaactccagctcaccatcatatcatatcaaataatggtaaatcatgggacagacaagaataaatagttgtattccttaaagggaaatagagtaataacaacagttactttttcaatattgctattggacactaatattattcacactttatgattagtaagtgaatttttttgaaatctattttcttaagttacatgacacccacatcgagaatgacactaataatacttttagcaattctcttacttttatcatcgtattggttcaataatattatattctaagtctataaagactacaagcaagtaagataaaattaataactcatcactaacacccaaaagggaccacaaacaaaaaaaggtttaagctcaatgacattattaactattgttgcgtaccttacatttgcatttttcatgcaaaagaagtactcaaaatttgacatgaaattgcatttaatattgcttttatgtgtttgaggtctgtcttgttagatgtcacatacatagaccaataaagggttcaatattaatcatttaatgaaagctatggaagaaactcctgtgttttcacaaagatgaaaggttgttttaaaccccctttggaaaaggactgaaatgaaagcaaaactgagtataaatgcagatacacataggtctgtgtttgtagcagaagataatctttcttctgcaaaataccaacctcattaagtgtgggctgtttagaattcttgccaatcatttcgtcattttttgctgtcatgcatttatacttataccctttagttggtttaaagattaaataggttcaaacccagtcatgagccagattaaataggttcaaacccagtcatgagccatactcttatgatgtttggaccatgtgctcttaatagccaaaacctccttttaacttgagaagaaaaaggaaaaagaaaaagaaagagagaacacctttcttgtgtgatttgtgaagtagtactctttcagaactaggggaaagcttattctcttataaatgcaaaccagccttaattttcttaatattgcctccacattcaatttttcccctcttccatgatgagtttcatgattatatgtgaaaattgtagaaatgggtgttccctgcagcccaaaacattgtcttgatgtttaaacaacacttgagccatttgttttggactgaagggagctcctaattcttttattttcccttctctagtttccaagcttcaatattggtccatggtcatctcattcgtagtgggtaagttctcttttactcaaatttgttactaaatttgaatgattaaacaacccattttctattattttttgcaaaaactattacaaacccattttatatacaactttttgattctaaatctatgtttgtgtgtgtatccttcttgcttgtggattggtcaaaatatttgatcatttaacagtgtgctatgtaatagtacactaggctccaattattagaagtgcaatatttaaatcgtgtaaaatctaaataaaccctttactgttatataaagcaaaggttcaaaaacatgttcctttctgaaaaatcaatgacatgtacaatttaatagtacctttaattcttttttccttattataaggtaagaatcatgagactccattttttttaattttaattaagatccacctttaccgcaaaataataacaaataataaaaatttcaaaaaaaaaataacaaataataaaaaaaacttttctaacacaccgataaatagtacaacagctcactaatggattagataagcccacttgtatgtcgaaaatgaatatttttttttaatctttttcttttaatctggcattgtattgaatcaaatgagttcttttgaattctatttatgttgacttttctttgttgtgtcttacatctgtgttaaaatatatgcgtccaccagtaattttgttcaactatgcattaatttagttttgtgatcgaatagaacattcccaagcttattttataatacgagttatgatttcattatatttttaaattaattttaatatacatattattttaacctattcacggttgttaaaaacataaaacaatttggtaaactggaaaagttccttctcctcatttctttttcaggaaaaaaaaaaaaaatcgaagttcaattatgggatttttatgtttttagaatcatcaaaataaaccaacaattttgattacaatgaatcggatcaaatttgtaagtcttaagtactagaatagtagaaattcataatcttttagaatgtaattcattaacaaaattaaagaccgagaacaaaaaatgaaaacaaaaatagatatatccagtttacaaggagagctaatccagaaagattaacatgagaaactcaattggtacatccaaaaaaatgagaagtgagataaaagctaaaacaatggcacaaacaaataatgttgttcaaaggcttattttgactggttgttgttgttgttgttgcatttgatttacattgcagctgattcttgaacatgattggactgactcttctgttaatggaatcactggaagattgtcacagttgcaaatctcaatcattagtccatctgggtcatggaagaaaagttggtcaacaaagatacctccttcttctactctccttttctcatacttaatatccatttcttcaagcttgttttctactgttgacatgctctcacactgcccgccaattcaaaatatgaaaaaaataaaaactttagtattcatttcaccaaagaaaatgcatacaaaaacatgttagagaatgggagagatttacttggaaagatatgtggttgtgcttggggttgatcccagtaatcttgggcatgttgtcaggatcgtcagattggagtagatgtatcccaatgccatagttgaatagcctaataaatcacaaccagaaatgtgtaaatattacaaaaagccatgcatgattgtaataaggaaacaatagaaaacatttcctctgtttttctttttgacctttttttgatatggaattttgaattcttaccatgcaccatcaaagttaaaggaatcgggtcttctaattgggaaaaacccaagaacagacttgtaaaaatgaagggatttcttcactgatctacaaactattgaaatgtgattcaaggatttgagttgcaaaggatttcctctgctttccaccatatctctttcttggtgtctaaacaaattaaggcttaaaaagtcttctgttcagatagtaaaataagagagaccaaaagggtttgaagagcaataaatggttgtttggatgaattaatgaaaactcaaagagtgaaaggatacaaaaagattgatgagattagaattctacttgggaaaaggtattgatttgagtgtttatatagagacgagagaagtgttgacagataatctgcagtgacatttctgaattttcaagttgtttttggttttggattgtgattaattctttattacacgtaagttccacgtttgctgactcataactagattactataactatagtctatatggcggacacgttaattttcctcttccttcataattttcttttggttatcttttcctccataatttttatgagaaatggtaagccacattttataatactaaaaattagtaatattttaatattaaaactttgcatattttaaatttaataaataatataaaaacccctaattaattatagatgtgtatcttaaaacaaatttactataccctatttagaattataaaaatactaataaatttcctttattaggaaacatgaaatgtaatcagaatgcataattaattgattaaagtaccttttatagttaaattatagtaaatgttttttttttcagagaaattacaatatatgttagtcatttagacatatttttttaaggattgtaagatatattttaaaagataaagtttttattgcatatttaatttttaaaattaatataaaaataaataaaaattattaccctcaatgacattctttaacaaaatagtgggaaaagtatttcttttcttttattaacaaagtt

SEQ ID NO: 17249 - DNA, 6192 bp, Cannabis sativa
gtgttttgtcaaacaatctgcaaacaagctggctcatgttttagtgagaaattcttgtttctctccaagtcgtgtgcttcaattagagaattgttccgacaaagtgcgttttattattattaacgattgctagttaataaagttgctaagtttattaaaaaaaaaatggttaccataataaaaaaaaagaaattatctaccaatttagagtaaattaaaaattcaacaccatagtatgaaacttaattggtgttttcataaaaatattagattttggtaaaattttaaaattttactgtcacgcagaactttttacaaaaatactgtctttttataaaataaccgtaaaataacaaaacaaaataattaaaacaacagtagaacaactaaaaaacaaccgtagaacaacagtgaaaacttaacacagtatacagtataaaagatacacagtattttttaaaaaaaattcgtcccaacaatgaaaaaattaaaaattttagtacgtggtataaaaatctcaaatttaattcatactaatttggtacataatttagtatgtgttggacccacaaaagtaagtggggccagcttataacaaagaaggtcttataacgacacgtgtcggagtacagttcgtccaattgtctttgccagtgttcatcttccttagtgaggaagtagaaaaactcttcaccttcttcttcctcactactcaccactcatctctctctctctctctctctctctaacattcctccttcttcatctccaaagaaacgaagccattaccagactctcttaaactccaaaaaaatgtaagttctcttactccttttcacttcttcttggtcatataaatatatgtttttactgaaaatgcaaaagagttcaagtaatatgctttttttttttctacttgatcagagttttatgaaattttgggtaaagaaatgaaaagaagagctgagttttcgccaggtaataatacttgtctacgcctccattgaaatccttactagtaaagagagactgtattacttagcttagctctgtattaaaatctgggtttgtaatattgttgttgtgaatgtatatatacacacacacatatttattatatacatgtgattttttttaagtaaattttggtttcactgaagttgtgaattctttcttttcgattggtgattagacttggattcagggaagctcaaaatgcataatagatctggcaaatatggaagtgtaactgaggagattgaaggtctcctcgctaggtcaaggcaattgattccactctttaattttagaaacaagtccaatgttaaggaagtctcaaagttcagaattggaatggattcaaacttggcaaggagaattgatttttttgatttggaggatgagagtaatgaggcaaatgaggttaagaaaacacctgttgatataatatgtattgattcggatgaggaagccatggaagctcaaaaaccatcttatcatccttgggatgagtccataaaacagccttgtggagttactgctgttgaggatattggggtaagttaagttactacttttttatagttgggttgcattgttatggaaattcagtaatatggcttggcatacatgctttttgattctataccagtgtgtttgtttgtgattttactcttttttttttttgcttaattcgatgttttgatgtcgttttatggcattcatcatacttaaagaaaagtttacttttattcagattggaaatcataatgtagaagattcaagctgtcatgatcctgagaccaagctagagaggggtgtttgtgttgacatagaagttgaagatgaaggcagccgaagtagtgttaaggataatgatgatattgaaaatgaagacaaccatcaaactggtgttaaggagaatgatgatcttgaagatgagggcagccttcaaactggttttgaggataatgatcttgaaaatgaaggcggcgatcaaactagtgtaaaggatgatgatgatgatcttgaaaatgaaggcagccatcaaacaagtgtaaaggatagtaatgatctcgatgaggccccctgtacagatagcaaaacccgggtggacgatgcaagtctacatggagaaggagataagaaaccatctcctcctcttcagagtgctgttctcagtcaactccctggagaaacttttgcaaaagatattgaggttagtttacatttggaggctactatgtttcctttgcatatttcaccatcttgtgttttaacatgtaatttccatccagtgtgaacgttaaaagatcagaatttatagactattatttacactaagaaaatagtatgttattttcttcctcagcattatcttatggttggaattatactaatgcaggtcggagaccatgcagatagcaaaagcgctgaggaagattcaagtcctggtgaggaaattgaatctgaaatcaagaaagattatggtatttatcttggcgtaaacgatgtagatgaaaatggtacggaggatgatggtcttgaagatgcttggaatgaaatgtcaatggcattagagcttacaaaggtatctttacaatccaactatgcaacaagagaatgaccctcttctctatcactctgtatattgttcttttgaaatgatgatacttttttctagtttttccttggcatatattgcaataagattccttgctatatttataactgttcatttatttgggtcattaatatttgatttatttgaagttggtgaagaactattagcaataggtatgcaaagacaagcctcagttagtgctatttaattgagttttgggggcatttattaactgataaaaactgaactcatatagaggtttattaataaaggaattgaaagaaaagggcattgaagctcttggactttcaactactgctgaacagtttgtgtcacagaaccttagctttaaacagtcagtttgctagaatttaattgtataaatgtctcatccaatatgcctagttatgtctattgccatctagcttgggcacatcacacacacacacacgtatatattatagtttggatttgttcttacattctaattattattcaatttccaaagttttccatgaagcataaatagtgagcttattttcctgtgtgttacttcttctaggatccagttgtggaccattcatcagaggaagaaaagacagaaaatgaggaaaaatgtgagcactctttcatattaaaggatgaccttggttatgtttgccgcatttgtgggatcattgacaaagaaatcgagatgatatttgagtttcggtataaggtatggtttcatcttctgcatttataactttatacactcaatagtacatcctttgatcagttagagagttcatgagttagagaaaaaccaactaaaatataatcctacgtttgtaaattcagggtgacatcttgtggcaaaagaattagtctctatatatgttgtactgattttaataaagctgagaaaagcagtatatatagggactagtcctccacaatcgttggtactagtacaacacaacaaatgataacaaccttctagaatataaaatgttcataaaatcattgcataacagaaagcacatacactagtggtaagtatagtttcagacaaggtaaaccatgaaagtcagagttcgagttgcaccgattattgaacctgttattcaggaccagcatgcacagttgaattattgtaatgcactgaatgtgagtttattagtctagtaaatcaaccactgaagcaggtggttaggattgttaacaagggtctgttgtgtgaactgtatagttgttaaaccagctaagggccttgttagaagtcagttagagctgttgagctctttgactcatctgtgtaaagagctcattgacacagtagtgagctaatagtaatatagttatttgtgtttcttagctaaaagtacattctttcacatttctcttatgtttgtttcaactttcaggtaagaaagagcactagaacatacgtgcatgaccgtcacgaagaaatcaaagacaaggtagatgacataattaaaccggctatgtctcgggagagagagatgttaaccactctatttgcacacccaagccatttgaagataatgaaagctcaccaaaaggagggctttggttttcttgttagcaacttgatgggagatgaacccgggggttgtatccttgcccatgctcctggatcaggaaaaacattcatgataatcagttttctgcaaagtttcctgaaacagtatccggatgctagaccactagttgttcttcccaaaggaattatggagacatggaagactgagttcaggaaccggcaaatagaggatattccattgtatgacatctacaaagtcaaaggcagcagagcccaacaattggaagtttttaaacagtgggaagaaaagactagtgtccttttcttaggctaccaacaattctcttacattgtttctaccaagggttctaacgaagcatcagctaaatgttgtgatatgctagttaaggttccatcaattctcattcttgatgaagggcacaccccaagaaatgataacacagacgtcttccaaacccttgcccgagtaaggacaccaaggaaggttgtgctttcaggaaccctttatcaaaatcatgtgaacgaggtgttcaatgtcttaaatctagttcgaccaaggtttttgagcttaaaaacatctcgtcccattgtgaaacggatcatgagtaaggcagatttgtcaagtggtaaaaggcaatcaagagcttggggcgatgcagctttttttgaggcagtggagcataccattcagaaagatcaagactttagaagaaaagtgtctgttatacaagacttgcgcgagatgaccaacaaggtccttcattactacaaaggcgatttcttagacgagcttcctggtctgcttgatttcacagtattgctcaatctcagttccaaacaaaaacatgaacttgaaaaaataaagaagctagggagattcaaagcaagttcagttggtggtttagcttatctgcatccggcattggtgccattttctgataagcaaacagatggtaatatgttggatgaggtagtaagacatttggacgtgaatgatggagtgaagacaaagttctttttgaacatactaaacttatgtgaagcaaagaaggagaagcttctggtttttagtcagtaccttgatccattggatttcttgcaaaaattagctatgaaagagaaaggttggcaattagataaggaaattgtctttatttcaggtaaatctactcaaaactctagagacaggtccatggtgcacttcaacaactcccctaatgccaaagttttctttggctcaatcaaggcttgtggagaaggaatttcattagttggagcatcaagaatcataatcctagatgttcatctaaatccatcagtgactcgtcaagccattggccgtgcattccgtcctggacagaagaagagagtagtttcgtatagattggtggctgctgattcacctgaagaggaagattatcaagtttgttccaggaaggaattggtatcgaagatgtggttcgagtggaaagagtactgtggatacaaagatttcgaagttgagactgttgatgttaacaaatgtggtgatgagttcttggaatgcagtcaaaaactagctgaagatataaaggttttgtacaaaaggttagtcccccatacacataatgatcttttcttcattttttttttaacttttcataacaatgtttttttatacaatttcaggtaaatatgacaatataacaggttagagttaaaagataatgttacatagttaatccatgtattttgaatcttgaaaatgcctgaaaatgatacaatgctttgtacagttataacatacttcacttaacataccaatatagtggtttttgcttaaatgaatgaatgggtgagtacactagaaaaattatgttgggaatgatgctctaaattttatttgtaaatttcaaaagtttatattagtgtatgggatttaaggaagattaattatgttcatctaatcaaaatccacaattgtattagagagcattaactattaaagcatggagattgtgga

SEQ ID NO: 17250 - DNA, 2997 bp, Cannabis sativa
ttttgggtcggccttgtataaggtgttcatccaatccaatccgtacaatgctattcataaatatacttacatattttcttatgggaaagagagtatagttatggtgaggctagaaacttcaacatgaagtaatgaattagatttgatagaagcatttgttcaagtatattttgcttttgtgacaagttttttctgttcttcattttcttctccatttgaattgtcatttggtactagagaggaggaccaaattgggaagttttgttaggtaggagagactcactagaagcaagcttcagtggagccaacaagttcatccctgcaccaaattcttctcttgacactctcattgccaatttcaaccaacaaggtctagatgttggagacttggttgccttatcaggtagcaagggacataaattatacaaatcttcacacaagaaaaagtagaaacaatgaaattcttttcattgaaacaaaggttgttttttttttttttttgttaccacaggaagccacacaatggggcaggcaagatgtgcaagtttcagacagagagcttatgatgtggatttcttccatgaacaatttgacaggtacaagagatacaccacatttcgaagaattcttcggtccatatgcccggcatctgggaaagatcacagattagctcctcttgaccttgtgactccagctcaatttgacaaccattactttcacaaccttttgcaaggaaaaggcttgttaggatctgacactgtactcatcagccaagatcatgaagggataatccttaaacaggttttagcttatgcctcagatgagaagcttttctttgattcatttgtggagtcaatggtcaagatgagcaacatcaatgtcctcacaggaaaccaaggtgaaatcagaaggaattgtagatttgtaaatacttagatggtaaatctcacagcttgattcttattgcaatctactgcagtattgttttgctttatttttgtattgaaaaaaaaaagcaaattgcaattaatatactagcaacaaaatattcaatagaactaagaagaacatgacatttgtttaatatatttatttaaagaaaaatgttttgttagttagacactagtagtacttaacactaccaccccaacactttttaaaggttgttaatttttcattatataaaattaaaatatataagacctgatatatattaggacatctctaataaaaattgcctactaaagtcatcttgccactatacaattttcaagagtaactttaagtaaaaaaattgctcaatagagacaatagacacatactctcttttttccttttttttaatttttttattagaaaaaaattattttttttcatttaaaaatatatgatgtagaactatggtgaacaacttttagaattgtcaaccattagactattttcttttaagagaatataaaaactaatatgtggatgagagaaaataaaaaatatatatattttagaatgatgtatattttaacaattataagtgttgcttctattagagatgcttagagtgttcttaacttttctcttaatttttttaagttcctctctttgtaaattttagtggcttattatcaaaatatatacataactgtaaattaaaataaaagaaaatgaaaaacaaaaataaaaactaaagtcgatttaactctaaaatttcattatatggagaaaaaatcagaaaagaattaaatatggtagacaaagatcccaacccaacacctttcgtctcaccaactatctctcttggttcttaccaaaacaatggatttaaactcttatcaatctgaccaacacatagcctaatattttgctgtgtgtgcaaatgtggttattaaaatatctctattctctagtattaaaaaagaaaagaggggacaagataattgggagggaccaagagagaatgaattcactgagggattaaatataaaaggagtggcctatcgctatcaatgccttcaagtctttctttatatgatttcactgaaaaatgctactcacagaactatcatcatgaacgcgccaaatagtttcgcccaacaagttagccactgtaagaacagttaactgaggaaagtaattcttctctgggacaggaatggtgttcgtcacaatcacctcctgaaacaacccacctgaaagcctctcaattgctggtgggctgtcactccaaaaaaaatgaagattaacgagtgtgcacaagttaaattttcagtgtttccttaaccaccaagagtcaatgcaaaggttaaaagctataaaaaaggaaaatgtagatacctgaacactgcatgggtgcagcatgcgtacacttcccgagccccctcttggtgtaaaagggctgcaccttttgaaattgtgcctacaaccagaagcaaccaccgaaacgttatatttcccccacaacacagcacaccacaaaaacacacaataaatagcagcctgaaaaatgatcaaagctgtacaaaaagagctgggcttataaacaaaacgagcatataacccgctgttgtaatcactctaaaaggtgaactgaaaagagagaggccagtccaataaaggagaggaaatgagacacgaaacttaaactaaagtgaccaaataatactaccagagtattaaatcccatagctacttcgaattctgttaggcactatggattagtatggtgtgctagcatataataaataaaaaaggtatttgagtctttgtttgggagagtagttttgaatgagaaattactatatgtaggagagtatggttagaaaggaggtatgcaatgtattaagtaaaactctttgcatctaaggggggcctaagagctctcataagtctataattgttattctcatatattcaatatttggctactgttaggccattgtgttattggttttcttgaggttggagtactatgttctcatcaaattcccccccccccccccc

SEQ ID NO: 17251 - DNA, 5205 bp, Cannabis sativa
tggtaaaataaatatccaacaaggatacctagggggatcttgagttcacgaggccaggtggaggattcgattaaggcttcactggaaagaagaaacttgattgaccgaaacttaggatctagggatgcgaccttacggaccttctcggaaaaaatatctccaataagggtctctgcattttcggtggaagctgcaaaagaataccagtattaaaatcaacatcaaaacgtagcagtaaaaagaaagggggaaaaagaaaaagagaaggaaagacaacaaaatggaaggacatcctaatagccggggtaaaagaaataccaggagctccccagctttggctgataaatggggccgtaaggtcatcggaaacaaattcaatggggcctttagcaaagaagaacctgtccttccaccctttatgagaagtctcttagtcggtaatgagagcttgattcttcctaggacaaagatggtagagccctggcccattttccatcaacgaataaaaatggacaacgtcggagacttcccactgaactcccgccttgtcccccaaaacaattaaacctgaaaggatagcccacacgttaggaagtaattgtgcaggagcaattgagtaatgtaaaaggaactccttaattaacttagggatgggaagccttaatctgattttggactcgaaccaataggagtgcagacacacccactcaacctgaggggagtctgccctctcatgcggcttggaaagtctaacttaaactcccgacggaaaaccgcagggcaatactaaaaaatcgagttctgactatgtcaaaaccgacgaacagcttgatttaacgtccaaataagaacttcccagagttaattgtttccttttagatttcttcagtggaggaactgctagggtaaccccttcggaagggatgacttgaccactactactcgcctcattcccagagcgagaacgggggatgatggaaacgctacctaagcactccacctctgggttcgcgggaacatcgacattctcaacctccatgggaggagtatcaaaaaccagcagggatttgacgaatcaaggagctataatcatggaaagagaatcagaaaccagagaggaggcgcctggataatccacattcaccattataatataaataaaacaaaactcggaacctgaaatgtatttaaaacaaggccagccttaaaacaaccgccccctttacccaatcataacaagggaaatgcaaaatcacgacccccgaaaagctgcggcaaggggaatatcagagttaggccgaatggcgtagggaaggcggacctagaactaagagtaaaaccccatcatctaaaaaccctaagtgttacagtactccctcctaaaaattagacttctaccgctcctaaaaaagggaaaggaagaaaagataaataaaaatgagaaggagaagagagaaagagtgggaaaagaggaaaggagggcggcacaaaaagatacgaaggaaaacaaagagagggaattatcaaaaaagaaaaatagttaaattaagaaagcagagtatatatatatacctgaaggcaataagatcccgcacagagaagttgaaacgagcagcagagagaaagcatgtaatagattttcaaaattcgggatcttatactcgagagtgcgtcgccaaagcacagaaggaagttaggggattactagggcatttataagagggaacagttctcgagacaccacgatcacatcataaaaaccaccattcctcatgaaactatgaaatttgaaaataaaaaatgataatgagcaaatactgacataaaaactgccatgagacgtgacagataaaaaacatatgtatatataacatataaaaaaaattcttttgtctaaaaagggctgttatcaacgagcagttttaggttataagattgtaactggaactggggagtgtagtgtttggaggggaaaatacgagcacagaacgaaggcccaataaacatcgaaaggccgaaacagaacgaatacccaaaagttcgaagtctgaatacattaaaaggcccaacactgtgcagcccagcaagagtcttaaagaatagatacgaacataaagcactaaatgacaaaacagagaagtaaaacaacgacggaagttgaaggaaggaggagatggaaggctaaaaccaaagtctgccagcggaagacttatccaaaacctaataaagaaaaataccaaggcagcacctaagcaaggacaagtacctccgacgggacgaaacctaatccacctcagacgggaattctgacggaggaaagagacacaatctacaaaggaagagataaacacttcataaaagatataacgccatcggactaagagaaagcagtaataaaaatagttgctggctaaaacgcagacacgtagcgagatggaaggaacagaaagaaagaacacatgtcaagaggagagtaggtaaaataacaagttgcccatgcaatcgaaagaatgtaccatataaatagaaaggaaccacgtaaagaaagaggggattagaaactgaaaaagagagaacccacaaaataacaagtagtgactgttcttggccaaaacaatggtcttcttcatagtgaggtcttcttcacaataaaaaaactcatcacagtcatggtcttcaacttgatcacatcaaatttcatctcattctcctcagatctcaaagatttttcgaaatagaccaaccgaagcaaagaatgcattcacatggatgaaaaaaaatataaaatcttttaaaattaaaacctaatacaaaatagaccaaggagagcacatggtacacactgaaaatttaaaggctgggagaaatatttacatagtcaagaaaattcccagtaaactaacgatatatatatttagttaaaagtcagaatttcattcttatgtttaaaatttaccaatattgtacacgaatccaatagagattttggaaatccataaacggtgacgacgactcaactggacacgtcaaaatccatggattttgttgtcggagatcactcgtccgagaatgagagagggagcaaccccggcgatcaccccgatccaaccctcactgtgcaaagcccgtcgccgtctcctccacttcccctgcgcaaagcccttcgacgtctcctccaccgtgccctgtggaattcccatcgtcgtctcctcctttgttgcgtgcgaccgagagaaatagatagatgctttagatgtatggctgtgagagagtgttttgaattaggtttttctcattagggttagaacattttctatatataccccaattaatgattttgttatttatttatttaaaataaagtaaaatttgatacaatatttaatttcactccaattaataattttattatttatttatttaaaataaagtaaaatttgatacaatatttaattggaaaattttatttacaccacaaaaatctctaaagatacctcattttaataatatttattttaaataaaatttatatatttaattgtactaagtttttttaacttttttattccaattcatattttaaaaaaatatcctattaaataaaaataaattatattttaaatattatgaaaaaaaaaattatatgaaattttcttagaaaaaataaaaaaaatatatatacatgatttagaaaaaaatatgaaaataaaatcaaaataagtattgaaattaacaaaaataatgtgaggaaaaaatttcaaaaattatattaagagtaattttaaaaaattaattaagtatatattttttttaataatggggtgtacttatcattttatggggtgcaagtagaactctcctatttaatttcaccccaattaattattttattatttatttatttaaataaggtaaaatctcataataaaatgttatgttaaaaagaatttttccctatagtttataactgttgggaatactaagtataccaaacattttataaatgttggcatttactgttttgctttttaaattccatttagtatttgccacgttctccaccgttggcattagtttctcccaacagtttatttgcttcagttctaaaccgttgggaaaaacttccacttaccttttccaaggagttttataattgactctcttattaaccgttaggaaaaacctcttttgtagtagtggtggcagataggggtgcttcgcccagggtcaatgcgagctcgattataccttggctggcgatactgtcgcgagtaaatccgcacagatttaccatacaaggttccaatttggccttttcgagccccatcttcttcagtgtttccctgtaaaggatgttcattgaactcctgttatctatcagcgccctctttatccttttattggcgagctagatagtaatcaccaatggatcgacatgagggtacctcacgttcttctcatcttcctccgaaaatatgattggaggttcttcaatttttaccttcttggaaggttctggagaaaatactgactgctcatttcttatttccttcacgtacctattttgggcatttttgctctctcctgcattatgcggccctcccaaaaaaaccaggatgtcctctccttcaacaggagggggttgtaatccgtggttgtttgggttgttgggcaaattgtgctagttatgtccattgccatgtctcttcacatactgcttcaagtggccccgagcgatgagactttctatctcatccttcaactgacgacactcgtcttctgtgtgcccaatgtctttatggtacttccagtacctggtcgaatctcttttatgcctcgagttcctcaagggctggggtttgctgaaggcaaccttgtgctcatgcgggaggtaaatattttctcgagtttcattaaacgcagtgtaattagtataaactggcacacacttgtcgtgcttcttttgtttctttttatccttggacgaccccttagaattgtcatttctctttgacctagaggcccttgagttatcaaatctagtcgagacagtacttgttgaaacattactgggtttgcttcctgagccagtttttaacaagttcatctcttttcgaacttcttcttttctgacaaacacctgagccctctcgttgaactcagtgatgttcttcactagaagaccctgtaagtcgtcccacaatt

SEQ ID NO: 17252 - DNA, 4626 bp, Cannabis sativa
ttactatgggacgtgtcattctttggtttttcttgttttaacagttattttactatacctcaaaaaaaaaaaaaacagttattttagtttattcttatatatttttttcttctctttctctcagtgacaatttgcgaatgactaatatctcatcaattcggtaaatcaaagttaatttcttccactaagttgaaattttgatatcaagacaaggcattttcaacagaaagctgccacttgacgccacctaaagaaaacgaacgtttcaatcaaaagtattgtctctacgagagtggcaaatggctcgagtgttttttttttttttaatttttgcaggccactgctatataataatagcagaagaccacaacctaatgagaaagaaagttttcgttgactacatttgtactcttgtcggtattgaaacaagtcaacaaagatcataatcatttaagattatcattgtcctattaataaatgatgtgatgtgtattgagcatggtaccttctttctcccctatttttgttgatagcaacctcaaagtgggactctgaagtttgaagcaaatatgggaaaggcaagcaagtggatcagaaactttttgataggaaaaaaagatgagaaaaaaaagaatgattattcatctcattctacagagtatcaattagccaatattgggagcaaaccaggaactccaaaggttaaacggaggtggagcttcgggaagtcagcaggcgaaggagtaagtcacaagttttcgaggtcgttggactcaattgaagctattaaactcccagttcatgttcctgcagaagaatctggggctcagcagaatcatgctaaggctttggtggtgattcaagaacatattgaaaatgattccgccactaagattcaggctgcttttcgctcttatctggtgcgaattctttctttatttctttaattgtctcagttatttggactacttaagtagataagaaaaatgggattttccttctttctttgtttctcaaatttggattatgttttgtttcaggcaaagaaagccttacatgcgttgaggggtctagtgaagttacaagcacttgtaaggggtcacattgtaagaaaaagaacagcttctactttgatgcgcatgcatgctttgatgtcaatccaagtgagagctcgagttcagagagttcaaatggcagaggaagcagagcttgttgttagaagtaaattacacaatgatatttctgaggactacagagtacgtcaaactagacttgtttcaaaaagctcaagtgattatctgaaccatgcacaaattgaggcccttaattctggacgactttcaatttcgaaacgacatcagtatgaggaatgtagcttcagcacagcagagaatagccctcgaaattactcggcaatgtcccaaagaagtccggtgatagcctcttctccccgtcaactgcctaatttttcagaactcatgtcttatggctatccaaactacatgaccaacacgaaatcttcaagggctaaagtcagatctcagagtgaaccaaggcaaaggccaaagtttagtacgaagcaaaagaacaagcagacagaaacagaaatggctgatggaatgtatgaccgtgaagattatcaactaatgaaacgctcatcttcagagtgtaaattcgatagcgaagaaaacaaccctgattcctggtttattaaactctaccgcacaaaaaaatcatctaaaagcaaatttgattctattaacacaaaaaatagtcactccaacaactattacgatcgttttgccgaatatgaggtatgaagtttatgtttcaataatacatatataaaatgatactctgactatctactgtttcctaattttacttgtttatttcaatgcagcccaattataatttgttctaatttaagaattcaagttgctagagctcgattaaaactcagcaaggaataattgcaggagacttctggtgaagataactgattactaattgcatttaatcaagatgaatgggtttaatatcagtgctgtatattcatttggaaatttagaactgtttcctttcaattatagtgtttctgtgtatgaaatttcccctagttgaaaacaatcaataccgtatagttatgagctcaagtctgatttctgaaagaatgtaattcccgaaactgaaaactcaatagaaaagaaaggaaggagagcaatactacatgattacatctccactgaatataattcagctaaagtgcaagcaaaattgcggagttcaaacgtatagatacaatttctagaacttctacttggttgtcccatttgacaaactataagaatttgaatcagtaactacaatatctgattcagatctcagtaattataactagaaatctaagtggctaattcctgtttaacaaaagaaaaaagtttgctaaactaaaaggcttaccaatagtctaaatggctgcgattacgattatggtacatatggcagaaggaatattggtatcaaacatcctgcttggttgtattttgcttaatgcttttcgtcaaccaaattgcagtttcccttggggagacctttccaggtccgaatggtttcaataaaacctccagctcttcataccttgcctggcagagcaatcttgcactgaattcaagtaacccttccaaagcttcagccctttgctggaatgatcgagtatcaaaccgatggcgccttaagtctgatgaggtgcgacttgatgctccagcagtagcatttaaatcagatcctgcatcacttaattcttccctttctgtcttaaagatgctgcgttgaattccttgccatgcatcagcataactggcctttgttctgtcagagatctgaactgtgcatttgtcttttgtgatcgagtgatcaccaaaatcatatgaggctaacgggaattcagctatcctatcaattctaggagaattaacagaaacatcaggagattctatatgatggaggatgcctgcactggacctggtatcagatggttgacctctagctttggttgacaatggcaatgaagcacggcgagtggttgacactgttttcttttgagtatgtgaaacctagagaacaaaacaaaacaaagccaaaaaagaatttttataatttgctattacacgtaattatgcaaactattctactcaattacaaaataaacttctgtccaggcattcataagggggataactgtcttggagaattcttcaactgatcttaccgaaacacgcttaaggggctccatccatctcttgggggtggcagatgcttttgatgatgacgtaaaccttgaagtccttgctgtatttgatgttttggaggtgattgtcctcttaatgggagtggcaacctctttatgagagtctgcaaaagatagttctgccaacttttaaatcagattattccgagaataatgtggatattcttaagcaaaaatcagaaatcaacctcacctccagatatactgggattcagtgtcctatcattgctaaatgaatgccgcttctcttgaaaattggggtaatgaatttctggctccgaaaatcttgtttttcttgagtagttggactgaggtctctgtacagataaactactacgcctgggattgttaagtttaagatgaacattgagaacgtaaggctgaagatgtggatggccaagcaactctgcagcctgccaagacatatagttcatataatcaaatactatcgaaaatacgtgcattaatcttataaaagaattatacttacacttggcctaaattcaggatttttccgcagcatacttttgacaagacctcgactatattagaaagaggcaaaatgattattccgttataatcactaccacattaatataacatcacaaattgaaaataaaaattatctcgcaattgaattaaatttttgtaactaattgttaggaatggaagctacacgttattctgatatctaaaatttaccacaaaattctagtgaaaattatccttacaattcactcgagtactttgttggaaggggagctactattgacttgttaattttgttaatcagagcttgaatatcctgcacaagaaaattaagtgcatttaaaaataagtgggaatgtgaagcacataattggaaacatggtagaaaaattaggagcgttatggatcaggaggcctgcaaacttacaaatgctttaaatgctggttttagcccagccatttcatatatacagcatcctggaggacaaggttagaggaagcatgatcacttaaattactaaaaattaagaaaggtcacagaattttaagatccagcagaagagcttacctagagaccaaatatctgacttagaaccataaggtatgtcagcaagaagctcaggacacatatagctgggtgttcccacaacctgaagatacaaattataattttcaacggataaattaacaaagatttactacactcaaacttctgatcattcaataaaaaaatacttacagacaaggcaaggtcatcggaggtcaatattttggcaagtccaaaatcacctgacccatcattgatataatattgtcaggactcagcc

SEQ ID NO: 17253 - DNA, 5624 bp, Cannabis sativa
aaattaaataaaaaagaaatattattgatgccttttggaattttgtttatgatttgagtttgagtacttttaaattataacactattatatatgtgagcaaaaggcaaagggaatctttgtttggattaaattacataattatttttttcttaaaataaaaaaaatgatgaaaagatatttacttttttatttttcaatgttgttggcacgtgtttgggaacatgggctttgtgtcacgtagcccaatctacttagtacaaacaactatgatgtttttgtttggttttagaacttagtttttctgttttttttttaataacaataaattcattgaactaaataataaggaaaaaaaatgaaaaaaaaaattaagtggatatattgacaagttaaataaagaaataacttggctattaccctcttcattaaaatatttgttgttgatttttttcttaatttaagatcaagcttaccaaccaccatttggttggtctattagatatttaattatgtgaagaaattacagattttattcaattatatttgtaaattgataattatggattataatacttggagaaaaaaaaaatagggtaaaatctatcttgtttaatgtcaaaatgaacattgaaattattaatgaattctatagtaaagtggtggtggattttatctttgtaaattaaagcttagctataagtttatacacacttatttttttagttttgagaacaatatacacacaacatacttgttgtaatatgtaataaaattcaaaataaaaaataaaagtgaagttgaaatttttagcatttgggtttagttttcatctgggtaaggcttattttagggtagttttcatctagtgtagccttatttgaggttagctcttaaacatttgatttatgtgtaattttttcctcttttggatatacattactctatgacaaatggagttgaagaaaagctataataatgtgctcttcaaatatcttttatgtatggcaataagtgttatttatgtattccacatggtatgtctatgttcaaataattggttggaaaatattccttaaaaagtatgacttaaaatatggactttgggtccaaaaagtttccattttgatataaacaagattagatgaatagatacatcaaacccaaacccaatcataattctacaataacatgagaaagagtagtacaagtaattttttttagtagagttttttctaggtacaagaattgggtctaattaattttcactaaattcattttttaataaaatcccttatttccctaatgcaaaatatttggttaccaataatccaaacatgagcaatgtccatctttaaagtgatgaaacctaagtttgtccctaacaataatctctcttttggtcaaaattgaaatgtactttatacctaaatggcaatcctcacacattctaaggttcttcacaaccctaataattgaagaaccttggcctcgaccggttctcaacaagccgaacgcaatcgcaagcttctcgctatggtacctaagagcaaactccctctcttcttcttctaactcatgtaaaaccgagtcgggtgcagggacataaccgagttccctacaccgcgacattaggtcatccaaataccgataaatttcggttgtttcataatgggacttatctcccatactaaacacataggttttatgatcaacttctatggtactaaatcccacttgcttcttcaaccttcttcgattcatcatcttcctaactatctcaactcgatccattcgacctgccaaggcgtatatgttagacaacattacataatgcccaggattatctggctcaacagctaaaagatgctcagcaacttctactccaagaacaaaattcttatgcatcttgcaagctccaagcattgcagtccaaatcgcgggggctggctctacataatcgagctctttaataaaccgataagcttcggttaaaagtccagctcgccccaacatatcaaccaagcaaacatggtgctcaattcccggaaccaagccatactctttccccatacttgcatacacctttcgcccttcttcaacaagccccgagtgagcacaggccgataaaactgcaacgaatgtgacactattcgggttaggacactcggttttcatctcaagaaagagtttcatagcttgattaccataaccatgaactccatgagctgagattatagctgtccaagcaatgacattcctttcattcatcgaatcgaaaacctcttgagctttactcacattaccacacttagcatacatattaatcaatgaagtaccaagaacaacattcacataaaaatcattctcaataacataatcatgaacccaacaacctaaaccaagagctcccaattgagaacaagcagaaagaacactcacaaatgttgttgaatcgggttttgcaacagcaaaacccctttctctcatcaaatcaaaaacttcaatagcttctcttgaaaacccattttgctcataactcgaaatcatagcattccaagccacaacagttctttcagacatttcatcgaacactttccgtgcaatacccaaatcaccagatttcccataaaatgtgatgagagcagtccgtacaaagggatcaaatccatacccacaaaccaaaacatgtgaatgaacacgttgaccaagtcccaaactcgaaagatcagcacaagacttaatcacagaagtaaaagtgtaactagaaggaaagattccacattgaatcatccgattgtagaaaaagattgcgtcttgagaaaaacccgaaaaggaggaagctttgattagggaattgaagaggaatgaatcggggtttgggattgagttgaagagacggtgggtgtaagcgattgagccggcggtacaagctaaagtgagtagctttgtgaggagagggagattgtggtggcagccggagacgatgaagtgggcgtggagttgttggagtggtcgaatgcgtggaccggcgaggagaagagcttggtgttgtggagagcgcggaggagaggagaggaggagttgaggttcgttccgtttcattatcgttaagactgaaatttgagaagaaaatctccattaaggtacagatgtcgaattcatcttagccgtccacgtcgaagacatagaatgctttggttgatctgaatcgttggatttatttaattaatatatatatatatgcctaacggtccataatattaagggagtgaagttgtgattttccttattgtatttttcatgtatgataatttgaatataatttgatttgcaattatattggagtaataatatgtctacatataaatcactacaaatttatggttagtttgcaaaagttttcttttagatgaaaacctataattggtttagaatcactttagtctttagctatatcttaccactactacttctgtgttaattgcataatttgtatctcttggtttttttatgctctaattaaactagatcaagttaaatttactcactttaaaccatccaactttcattatcaaaatcccaacattaaaaataaatcttaatgtcattttctattataatatattagttcaagaattgaagtttacaaatgggaaaacaactaagcaacactcacatgtcctaaacataaattagagtgattaaacttaaaactaaacaaaaccactaaaggttaaaggtctaaatgatttacatattcatatttacataaacacttacaaaaaatcaaccactctaatctaacttaaattacttaataacaatggtttggaccaggaaatggctgcccttgctgtacagaccatggaggcctctcattgtgtgcctacaaacatagtacaaacaaacaaaaaagttagccaattaaaatttttgtccactgaactttcacatgtactaaatcacgccccttgaacttttttagtcattaaaagtttttcctgaactattgaaattgttagaattaagaacatatgtccaatttcattcaattttactaattctatgattatccatgtactaaacatgctctttagactttgatatctaccaaatcatactcctcgaactttgggatatatcaaattaagcttcctgaactttcatccatgtcagacttttgagaagatttttaacggccttaaaagttcaggagacatgatttggtacattttaaagttcgggagacaaaaatcttaattagcctaataaaaacacaatcttttgcttcaatatcaataataagcccataattgctattagcatcaaacaaaagccatacaattccttctagttctcatactgtttttctattcatactaaaagaagaatatcatcttgaatcatcaactcaactctttagtatttcttagattatttgctatgactaatttaattaataatattttgaatgaatgaatttcacttactccaatctctgtcagatgatgacatgagcaacactttactttaggtgctccataagggtacatcagcagcactgtacaccctccacatttcacttgtccaacctgatgagctggattaggtaaacacaagagattcagggtcaaggtctcccttatatataatttttgtataagtgtatatagtatataatcatcaacaacaaaagaataaagacactgcaactaagctataaaaattaaggttacacatgtactagactactgatcataattcataacaccacattccattgcttcttcacaattagtattggttgactccatgactgggcttagcttaagctcctctattggtacatgacaactgtaataaatggtgtaggaagaagaagaagaggtaataaggtatcgagaggaagaggtaagtctttctatttttttaaaactagtatccccgcctaatcctaaaatattcggggaccagaaaactatagcaatttttacgtaggtatccagaagggactcgaacctcataccttttgggagcaaaccacatacctgaccatttgagctacccccctcttggatggtaagtctttctattattgtgtttaggacaaactattgatataaaattcatagtctaatactgtgatttgcttccacaaaatctgaaattcgagttctttcaaagcctagtttcgatagaaaaacaaataacaaattcagagtctgatctgatctgatctaatccttttcctaaaaatctttccaaccaaataacttaaccccactctaagttcatctcaaagtcgaaatcatggtaataggtgttaacagattgatacaattttccataagaacacattcacaaacagcacataatcaacaaaagcactaaatagagaagagaagtaaaccttctaaaacaaagttgacagtctgacaacatgaacagagaacctgtttagcccctggaggatacttaagcaaagttcggcaatgaccacaaaccatttgagctatttctgcattattattatcattataaagttcagtactttgtaacagaaacacatacatacatattatgtacaaacacataatctaattacaatgtatcttcataggtt

SEQ ID NO: 17254 - DNA, 2102 bp, Cannabis sativa
atataagtataatcaaatagaaactagaagaagaaatagaataccagatattctatattaagcacgctacaaaggatcttggagggaagattaaaaagagggagttgctgattcacttcctgatttgtggatgcttccaactacaaaacccagaagttttcaaccgaaaaaaacgatttttagaaaatgcccaagaacaaaggcagaattttgatccatataggaataatgaaaaagtgtgatgggataggattgaaaacggagtttacctgttccatgtgaccttgaggaaaatagaagactctctctcctggccgaggaacctccaccagaggaccggcacaggcgttccatagttccttgaaaatactgtcctccggacctattcaacacaaacgtacgaaccaacaaatcttcaataaggaaaagtaaatgagtctaaaaacttcatgttcagactcagcttggtttctgagactaggaatttgggaaatatacaaataaaacactacgaactccaaaattgaaatcttaaactagaaatgaaaaatgcttaaccaagttcagctcaaaagccaacaaggggacccaaattttgataaatttgtttccaacaaagtttcctctgtttttctatccatgtatttttcataaacaaaaatctatggcatttccattccatatcctcaactggtctttgtaaataatctatttagtttttttcgttaacgaagctgatcaaaacccagaaacaacacccccacctgtttcggaacgagaaatcgacgagccaccttcaagatgagccattcaaagcccagacacccccgaaaaacgacgtgtcgtaccagagcccagaaaaggatacgaaaatagaaaaaacaccaagaaagcaaaaggcgcgagcggataaaaaagacctcttctttacgcactataacgcataataggctaccccatttgagaacaaggaagacccagatgaagagaagaagaagacgaagagtccaaagaaataataaagagctaaacagacaggacggttatgccaagcacactcataattatcagaagtcgtacaattatctctccttttttcctttttctttggctctctgtaacgactgtgatatttttaatggcttgtggtgcagttctgctatctgagtctgtccctattcaccgcttcagttacgaaaaaccaaaaccgccatttcttaagctacacctaccaatggtctttatttgtattttcagagccaaagtaatttcctttttctttttttccgggtatcctctgctgctgccgttgtggtctgttctatcttgttaagtaccttgaatcgacgttaccaaatccccaaaaatggctttctgtgagtcatttacataatactaaatatatataatctatttcttttgttctttctctttctctctctaggtttctttggacattagaaagaaacactaattcagtggcttattatgcgtagagtgacttagctcacatcctatactgtgctgtgacaatctctgcagtgaccccaaaaaaaaactgcactcatatttgggccacttcatctgaatcaatatcaacatttggacccaccaagtcaagtactacaactctgtcaaaataataaattattactatacattgtatacaataatacatacatcaatattatgatgttattttatcagagttatctttttttatttcttttgatctttcgaagtaattataaagtaatttaaggttaatggactcgaattattgtaacatatgtatgtattggaaatttaatgggtgatgaatgataataacgttttgatggttgaaaatagagtttgttcgatcatagttacaataaattagcactacttagaaagtcaatgatagtgataaaataagaaatgtttatgcattagttacttctagctagttgtgtatgtagtgtagtgtgccttgtgagatctattaataatgtaaggtttttcttatttgtttattataataaaaatatgtaatttatgtgagaatttataaacaaaatataaattaagtgaatgacaattattggtaaattcatatatat

SEQ ID NO: 17255 - DNA, 5120 bp, Cannabis sativa
ggtcttaacttatattttgctaatgcttcaatattgtataggtgtattttggtgatcttaaaacaatgcaccaactaacctatagggtccattttgctaatgctttaatgatatataggtgccttttggtgatctttgatcaatgcaccaataaccatattaatgaatagatattatattttgtcaatgcttcaatgttgagatattgatcattttatttaaatttgttaaatttttcattacattgtcatattatagggacccaaaccaaaaaaaaaaaatatgaatcattgtcatgacatgtcatgaacttctctttgaaacacgtgaaacaatatatttttattacattgtcatattatggaactaaaaagaaaaatcctatactgacgacacatagcgaatcttcttcttggattcgtatttgtccaggaagttttgatcattgaaaggcattgataagagcagttgggatatggaatcctcctcattttcttcttcaagtgtgcaacaatgacaaacaggacggatgggggaaagatgacttgagaagttgggtgaacttttatttttgggattttgattttgttttgatttaattttaagttttcttttaattaaattttgagttttatctatttttatttgagtaaattgaaagttttaatttttttaggttttaaatccactatggcatacttacgttgacttggatggtgccacgtaggccaatttggtaacagattgaaaattacatcgattttaagtcaaaaaaataaattttaccaacgaaacaagtttagaattgggaacgtgagaactataatggaatggtaatattccataaaatttgtgtatcttatcgatcttaaacttttggaatttatggacttgtttttgttgtttacgttgttccaaatcatcaagaacaattttacacttcatatcttcgtacgtaatacagctcttcatacatatcttacttcgtagttcgtacgtatgtacaagtttatcaaaatatcagtttgattacatatatatcatgaataatattattaactaaaatacgagaattctttaaatcaaagtcgaatgaaatttaaaattgaatttccttgatacaacaaagaaaaaccgttttgatatccacgagtccttaaccccttattatttcacaagagttaattctgacattctttttttttttttttttccatttggaatgttgaaaaaacaaaggaaatactgtacaagaggggttcaaaccgggttcaggaaaatgatgtaattacagaaaatacgaacgaaactatttcctaccgaacctagccaaatgctgctcgtgttttgcagcagctgccttatcagcagcttcacgcttcaatgctctcttagctcgccggccagttttatcttttgcagcctctttttgtttaggctgacgagatgtaccagcgccagggtcctcaaaatttgacctatgaactggcctggcttcttggcgaccacccctaacaaatccattgtctccccatctacggttaccaatgcgaatgctcgatgaactgctaaagtaaacttcatctagatcatcatcacaatcttcttcctcgtatggataataataatcttcaggatcatcataggtaacttcacgattcaccacagtcaaaggtttaaaccaagttgccctcagcaggaggcagacactttcctcaaacatgtaatcatggatgctgtgtctcccaccgaaaggggaaaaagaattagataaaatatatatatacaaccccaaattaaaaggaacatataattttaagcctaaactgaatcaaattttgaaatggctaattctaagagggtattaacagctcggtggcaacattcagttaagcccaagaactagatatattaatgaaaaggctaatcaaccatcattctaactaaacaaatcacaaaccaaaagtgaaacaagaaaacaatatggaaattagtacctgccatcaagtgatcgatgaacattgaggaactcaaatggattcttacactgaggacagcttggatttttaccatatgaggcccatcgaaggatgcaagtcacactacagaaagaaaatgcatagtagaacaaagagtgagtatcatactaattggtagctttccatttcacacacaaaaagacaaagatgaaggtgggtggggtgaaataaatcctaattaacttataatttcacaatgttttgaacctgattaaaaattccattaatagatatttaataagcacctctacactaaagtaaatatgaaatacaataaaacatacagaacattataatgatctgaaacaaaattactattcttggcataaagtacgcctttaaaatgttcactgcagataacaaaagaaaatacattgatggataaaaatattgtattctgtgtaaagaatacatttacattctacatgaatggatataggtgactaggggtatatcagatatgttgtaacaagaagacaccgatactattattttttataactaggagaagaaaattgagattgcatgaaataaaataaaacactaaatatataaaaaagatagtaggatatagcagacttcaaagaagcaaatcagaaacattcaaagaattcaagtgtgagcattttatttgttgaagatttggtttattttcaattccaagagaaaactccattaattaaaaaggttacaagacaacaaaagataagatttcctccataccagactgttataaacataacataaaataaaacaataaaccttttaaactaaaactaaattcttagcctaagaaaccataatgaatctaacaatttgactcatctcctccatctaaacagcagattcaattggcttttggagaagatgggacagatccattcaaactcagtctccttcaacatactgaatgaaataaaacctggccaaaggcccatggcagaattgcaaaagtatattgtaaaatgaatacctttgtgagatagagtgaatggtttatttaaattcacttagaaagcacaaaacacaaaaaatgaaagatcgagcaatccagtgtctattaactttccatgatacaccagccaaccaaacattttaatctgaaatgtttgtgagattttcaactaaacaaggacggtacaaaagttggtactcgagagaccttcaaactctacaaaagtatgaattcaagattcgcaagtgaatataagaagttcaaatggtgaccccaatctcttgtcatatatgaatgtattgaacgaacaaatttctggaatggccaacaaagaagtgtcattcaaattttgctgaaattcagaaatcgagcaagcaactaagaagaagtgctaatactcttggaaagatgacaaaaaaccgaaaagaagaagggaaaaaaaggcaatatccatcctaagaaacaatatggtatgacaaataaaagatgattctcatagaaactccttcatgagttgtgtaacaaagctgcaatgcaatcttggcattataaacagattacgactaattatatccaattaattactggttccaaaagataacattaacttgcaataatactaagcaaacacatactaatccctaataatcaatacaactatatattatagagagaatattaaccgtataattaaacaagactgtaaaatgtgtagcaatacaagttcaagctatgagggttaaaaacaaacaaagacaagaaaaatcaacacaaggcaaaaatgttcaatatcacatgcatttccaagaaagacaaatagggttacacatatttaagagaactatcagacaaaccagtatgcgtgctcgcaaccttttaccagagcaatttcctgaagcactatcttatccaagcatatcgcacaaaccccaccatgaatcccaaacccattttcttgaatctctgccttattcgacatttccccctgaaacccagaaaacccaaatgaaaaaaaagatcgaatttctcaccgacaaaagaggagttgaccttgtcaaataaaacttttcactttcgcagcttcgctgcgttgcgtggttgacaagaacaaccagagaaaaattcagaatttttcgccaaaaatgtaaatcaaaatttcaataataataattaaaaaaaaatggaatcacccccaagaaaaaagaaatcgaaaaaattggatacataccaaaatttgtaagcacggagaagaaggaagaagaaaaatagatctggaaaaaagaaaagggtacctgatcttggagagataaatggtgaagagaacttgggagctgatcatcaccgtccatcttgatgaccgaagtcatgatatatgtacaatttccaagaaggggatgaagaatatggatgtagtaaataatctccactcaaatcatacgctataccaataaaccaaaccaccttagatatataacaataaggaagcagagagagaaacaagaacaacaatagatgcttagagaattattctgattcttatatacgattcaggacacagaattgagagagagagagagagcaaaagaagtaataaataaggaaagagaatttgtttttttcttcttttctttcttggcagagaaagaccctcttctgggggaaaaaatgtaaattgagaaatatcaatttttcttttaaataattttttcagatacttccttctccacactatttttcaaaatatatcaacaaatctcaataaaatatatataaaaaaatataataatcttatacacataaataaaaaaaaaaagttaaaaaataacaataaaatatttttaacttaataaataataatctttaaatttaattaagcattattcattgagaaaaaatatgtataataactatactttgactcacttcataaaagctcaaaattgtaactttataatttaaaaaatttagctattttagctcatgaggtttgacatttttttttgtttgtacattgtatttttttagtattttatttttaaaattatgtttttaaaaataagaacataaaataatttttgtagtcttcaaaatgcattacaagtttgactaatattttctaaaaaaaa

SEQ ID NO: 17256 - DNA, 6640 bp, Cannabis sativa
ttttcgaccctcccaactaataaaaaaaccccaaattagtacgggctccaaacaatttgggagaaaaaacgacatctagccatatacatagttacagctaaaaattattcaacatatcctgttacactagctagccagctataccattagcaaaccttatttttaatattatacgatcgcctacttctccgtggtacggtcaattaaaagactgaaaacgacaccttttattatgtcgttcgaaaccacgtacggacagatccatcactactactactccttattattagtaataataattatttccaaatcaagattattatattttaatttcgagcacgaacaagtggcgaatgaggcattggagaatgaggagacatcatatgatgaggagacataaaaccacttgcggcatcatcatgatatctctttgacttattaaagctaagactcaggttagaattacgccaagcgctccttttcgttgtagtggtagttgttgttgtggttgttgtagtcgtggttgtggtggttgttgtcatgattgactgatcatcttcaagatcctcaactacctcctttttaccgacgaaagagtgaatcctttgaagagcaatgtctacggttgcgtcttccatgttcgcgaagcaaaccctgaaccatcctggttcggggcaatggaaggaagatccaggggagacgttgagcttgatgtcgtagacgatccagcgccatagcgccatctcggcctcgaaagatggctcgttgagaagatgtctcaagtccatccagaagaatagtcccgcattcccctttagacatgatatgcctactttctttaacccttcggtgaagtgagcgtgcctcttggccagcctctttgagctttcggccaggaatttcgacacgaaatcttcgtccgacaacatcgcagccagcatgtgctgagtctgcgacgacaccaatccgaaactggacatctttcttgcacagcttacgacagcgtcgttgtaggagtaaacaatccctactcggaaccccggaagacccatgtccttagagagtgagtaaacgacatgaattaggtctttgttcactttgtcgtttcccatctcttgaatgacctccgaaacgctgacgtattcgggtgagttgaaaactgtggctgcatagatctcatcgcagactaagtgaatgttgttgtcgtttacaaatgtgaccaggcttttgagtgtagctctgtcgattgtcgttccaagtgggtttgatgggttggttatgagtagtcccttcacattaacgccgtcgttttgggctttctcgtatgctgcttcgagggtttgtttggttattttgaaattgttggagctctcgcaagggactggaattattttcactccggttcgccatcccaaatcacggacaaaactgtaattttgattgcaaatatggtcacgatctcattagaacgtggaaattatgaaattatatatatatggaaaataattaacatgtatatctaattatgaatatatagaaatttattaattaatatgcttattagcgaaggaagtttcattttgtcgtcacaatcattacgtacgctgactatatttttatttgaagagtgataaattaaatctttattttatcaactagttaattatgatttcagtggtgacgttttaagaaagtaatgtgtctttaataaaagttggtggaccccgaaacagaatgaacaaagttaataaaaaatgagttttgggatttgtccaaacataataaatacatacaaatattctgtctaatggcaacttcacgaatggttttgaacttttgactatttgttgggatttgctgaccaatttttaaggtgggttggtcatcgtaaataaccgaaagtcatacatatataataactcattagtactcctaaataaaaaattataatacattaatacacatattgaagtccatatatgtacatgttttaatatattttaatatttgatttagttttcttgactaatattcctacacgtgcatactttgtcaaactcagacagaagattgctaaaacttataactagtataatcagaatgtcagaaatttaggtttttaccaaattccaaaaacaaagatttttcctttaggtctaagcttctttttttttcttttattattattaataataaaaaaattccttcctttttagtagttaaatttaaatacatatttagaagagcacagataatatactaattaatatatgataaagaaacagagtggtccgtacgctgggtaataaggcgaaggaacgagaaaagcgtcgcccgggtcggcaagacagaaaatgacgagttcattagctccggtggctcctccgcccatcactattctgtccgggtcgaatgtaacccgactacctctcacctttgacatgaacttagcaattgcctgaattcataataatatatagagagagagtcatgatgaatatatataaaatgccatgatttatcgtcacaaaaaataataaaacagttcaacattcattatcaatctttatttccccaggttttaaatatatatatatatagatatatacctttctgaactctgagaaaccatgataatcttgaaagatagctacgtgcttgaaatcgtgaaccccttcagctgtgcatatagaggcttttggattgttcctaatccacgcttgaatcaagtcgaagcaaagctgagagagagatcatttacattttccacgttacaaattaaataaaattagttgcaggaatgaagagttagttaatatatatatatatatatatatacataaataaatacctgattttctgcgagacccatttggataacacctccgggatttttggcaggatggaaagggtctttgtcgtaagccttccaaccatcgaaatatggtgtattctcaccatgtccatcgttggtcgcaatttttgacagacttacttgacgcttctcacttcctaaactcatcatatttttttactgtttgtgtgggtggtacgtagctattgaattatatgaaagtatatgtagcgttgttttaatttggggtggattgagtatgagaatatatgtttatataaaaaaggaaagatatattattttagagtttcgatggatgaatgaagtgtttggagagagtacggtatttatagaacatgcagatatgttatgtgagtaatgggatcagccttgtttaatgtgaatcaaagtaagaaaagtcattaaaattctgatattctaaagtcatttgtttgccacatagtataataagacgacgcgcctttcatcaagtcaatttttctttttctattttttttttccttattaaaaaataacatattaactataaatgagtagtatatatattttgatttgttaggtcagtgttgacgcgtgatagatatatgtaacactaacatgatagataatgatactctaaaaaagctaaataataggataactaagagatatatatatataatttcttagtcgtgtattcaaaaatacaaatatatatatatatacgtgttttattatatgtggccatcatgtactctcttcttcatggccgtagaagatttagtatatggaatagtgttcttgatcttgagtaattcactgttaataataattatatgtcactaaatttaattaattaaatgaaactaatagttgtaaattagttttaattaattacatgtcacgttatctttatgaagaggttaattaattatattatatttgataggtcaaaataggatagttgttatcttgagatataacaatgctttttttttagacaaaaacactcaaatagttatatattatacttggtaaaatttatatataacaaattaatctaattgttattgaaaaaaaaaaacagttaataagaatctccaataaaattgtccagatctttgacacatgtatattttggtcaacatttcaaattaattttatgaacataattatttaaaataaacaatgaccatgtggcattatttaatttttttcaaaaaaattactttattaccgattaaatttttgaaagaatataaaaaattataaaatttaatcaaaaagtggtatgtgagaccatagtagataatttctcgagttccttactgttagagtaattttttaaaaaaattgtgttaaaattttatacggatgtgaaagagaaaataaaagttaatattttagaataatatatgtaatttaacaaaatatgggtgttgtctgcaattgaagataataaaccggaactaactcttatttttcatgatttgattgataaaaaaaaaagtatatcaaaaatatataaatacaccccgttataaaatatatatatatatcccactttatttttaaactattaattactttttataaatacatcccatcctattactaaaatggggtcttagtttaaatatatactacaccccaacatttttgaattatgatcatatatatgttagaaattggtgttttgattaatgtattaaaattaatctaagtgtgacaatttaactaactattattcttagacaccattaatcatatagacaatttttttccttaaaatatttaaattaattgatgtgtgacaattagattgatttaatatactatgagataccatttattcaacatttttaaacatctataaaaatgctcatatatttcatttcatcaacatcaacattttaattgcatattaaactctcattcatagtaaatttaaaatgtgtattttttcgcaagactttgtaatgatttagaaatgaagaaaactgccttggccggttgggttccaaccaataattaaggtttttctgattaattatttttttgtcgagataaaaataatgaaaaggtacttttaatgtcaataaattcttgtaaatatttacttcaaattttttagtcatttaacaaaagagaaagtaataataaaaggagaagaagttcctaaacaaaaaataaaaaaatggaagaagaaaaagaaaaagaagacaaaggaatttcttaagtcaagatactagtttgttgttcaatatataaatagtttgttgttctcgaatacagataatcttctataatatagctcaataactctacgaactccttgataaatttcaatatcattaattctgaagtttgagtttttgacagtacgtgctcatgaagaatcaattcatttataatttgggtgtatttataaataaaaatatgattaaaactgtatattttagtcttttcacataatgataaatatgtaattaattgttttttaaaaaatagggtgtctttattaaagttaggagtgtaatatttttttttttttgagtgaggaaaaatagatcatattattattttgttataaagtaaagttctgatccatattttccaatcttgaaaattatctgcttaattatttatttatttactctattggggggttaggtattgggattgtattgttcgaatcagaattaagtttgttctcctagctatacttgggtgcaaataaaaaacgaagtttccagcaaactgatataagcgaagaataccgatacttttggtaatttaacgaagtctttgttcaatatatatttatataaatacatacatatatatacatagtaatttgggtttgtcattattccgttgttgagaaagtagggaccaaattaaacactcaaacaattctatcatatatatatatgttcaacaaattaattagttaccaaacgtgattctcgcatatatatatatatatggcctttcattacatttattgctcttgcttaaactggtaaactgaaaagaagctagaggagaaaaaaaaccttgcacataaatatgtatattatatatgagtttatttctttcgttttcatacaaacaaaatttattaagaaaaggagaaaatgttggaggagtacatcaccgtcaatacatgaaaatgttaaaaacattctgcaaaataaggcaggtgtgatccaagtcttttacatgaaacacgtggcttataagtacataccacgtacaccactctccatcccactcttcgccctttattttatattattttattgtaatttatcatgtcagcttcacaaaattatacatatgtatctttgtgagctaaatttacgtacttatacatatgtatctttttattgtaatttagagttacgtattacaacaaggagaactattaagttgttaaatattgagtcttgcacattttaaattaataaataatgtaaaaactattattaaacacttataatttaccataatatttaataaagcgtgtaatagcaatatttcactattacaatattgatgaaaaacttaaatctaaccaattaaataattgtatcaaaattcaaaagttaaactcaagtggttgacttattatatttaatattattaatccatcaagacagcgtactttaaaatttagtaagtcataagaataagaaatatttttagattcttatttagataaaattaaggtattttttaaaattaataaaaaaaatatgtatttttaaaaataaaaaaaaa

SEQ ID NO: 17257 - DNA, 3669 bp, Cannabis sativa
aagaagaacagagacatacaatacttatggttgatgcggtagtactgaataatacaagttcagttggcttaggggctattatcctttcagaagatagaagggtgagggtagcagtttgcaagtctctcaaaggtagacaattctttatctttaaggaaatttatcttaggggctattatcctttcggaagatagaaggaagttcagttggattacttcaagggaccttgaattcaaaatctaaggggacttagattgtgatcttgattgagttatcaagatctaaggtaaatttgttgtaagaatcatttttgtattgatttacaaactaaaatttgtaacttgattgtgattcttatatgatatcatttatcctggttccgaaaactcaagcattacttatctagaatctatttctatattatagcttttaataatccttgcaaaatgattagtaaaacaactaaaatttactctttcaaccacatttaaagttggtgttaaaaaagttttcaaaaaaaaacaaaaaatcaaaaacaaataataataataataaaataaaataaaataaaaacatgtaatccacaaaaagagtgggcttctcttctcgaatggcttcttttccatctctagattctctccatttctgatgggtaaggtgaagagtcatggctgcttttagcacttcaacgatgaatggagctatttccttatcttcttctccaccctttcactatctcactatcctctcttcttcttctccatcgtcatcttcatcatcatatgctccgatacgacgtcgtgtgtatcgtactggctctcctctcaagcggctcacctcccgcatcgtctaccttactcgccgcagacagcttcaccaagtaggtcctcttatacttgctaattttttatcttaaaccatgcattttcatacgtagctatgtcttcactctgtcttttattgggttgttggtggtgttgttgttgtggtgatgatgatagatactggaagaggtagatatagcaaaacgacaatatgggaagctgaacaccatagccatgaacgcagtgttggaggcatgcgtgtattgtggggatgtccaaacagctcttaagatattcgacgaaatgtccaagccagggggttgtggggttgacactattacctatggcactcttttgaaggtatctaaatttagagagctgatataatgtatgatttacaaatgagcatctatattcgccttaattcaagccagcaagcaatattagtattactaatccttctgtagggatacaactagtgttgctaacttgtttatatcatagtttggagaaaatcttgatcaggagaattggacattttgtttaacaaaaggtcatttggtgtttgttatgcttttaattgaagggattaggtgaggcacgaagagttgatgatgcatttcagttgcttgaatcaattgaacgaggtgttgctgtggggaggccaaagttatcagcacctcttatatttggtttgctaaacgctctagttaaagcaggtcggtgtgttactaattctgttaaaagaaattgaacaaaaataattatatttctttgtacatgtctggatggtgttatagttaaggtgaaaatttgagatgcatggatatgaatttttcctgagctaataagatttcttggaagaccttcaagactttttggtgcaaatgaaaaagatgtgaaatttgtatttcttagcattgcattgcagtacagtaagtaatgttcctcctgactggcaattagtaggatctcttgttgaattggacttacttgtggtttgagttgaatgattacacttggcttcttgaagtatgtactatgtaactgtaagttctgccatagaaagcgatacactgttggtacaatatgttcaaaattagcataatagaatctagcgtttcttcctcgtatcgtttcattggaactccactataccatatcatctcaatggaaatattgttcgtggacttttagtttgtcctttcataaatgatctttggaaatgaccttgggatgcaatgttactgtagtatttttatttttaattttttgaaaaatagtgcatgaaatcataagtagagttaataagatttctttcatcattgcattatgatttctttcatcaatgtaagattttttgatccttgtatatgaacttctccaatatatgcttctccctaatatgcctccacttacattgtttagtgcaggagatttacgtcgttctaatgctcttctttctcgatatggctttttcctccgtgaaggagggagtttttctgttacagcgtataacttactaatgaaggttctgcactggcattattgttttttaaagtgagctagattttggtgttgaaagcaaaaatctttacatatttgagaagacaactgaaggattctgcttttctcatttcagggatacataaaagcaggttctcctgaaagcaccatatccatgcatagagaaattctacgtctaggattaatccctgatagacacacctataatactttaatttctgcatgcgtcaagaccaacaagttggatacagcaatgcatttcttagaggaaatgaaggtcccaagcatgtatatcaaaggctagtttagagcctgaagttatatctaattgtcttcataaagtaattgcattgatgaagaaactagatttttgtttttcttaatctcttcaggagaaagcagagacatttagtgaaggtgatcttttcccagatgtggtcacctacactacattactcaaggtatcatcttcaaaatggactaacattaataatattagagattctttccccttcccatttatacctgcaaatagaactgaatctcatctgaggccctgatatttttgtttttgtctttgctttttacagggttttgggctttcaaaggatctccctacgattcagaagattgtattggaaatgaaaacatacggtgattgttttatagatcgaacaggatacacagccatagttgatgcattgctaaattgtggctcatataagggtatgtcacaattcgtgattgatttggaagctacaaactttaagcttagcagccagcaggctagctttgtttgtagtgaggtttctttatttaaccaccttacttctatagagtgcatttaaacctttggattttttttaaaaaaaaattatgaaatttcttttatttcttttataattttatcactgattttccttcgacaataaacatgctgctttgttctatttactttacatagctagaaatataacaaagcagcatgtttatgaacaatactggttttcacattctgttttcaaaaagactactaaaatgatgtgccaaaatagtaaatgacgataacttatgtgtaatatagtatctgagtttgatttagacctacatgaattttctttgtaatggcaccttaatagatagataaactgtatccattatgctgcaaatgctagacttattaaatttctttttcttaccattttcctgctgctttggaaggatactaaagtttatttttatagcttcaatatcagaaagtcttttttatatgtatataaaaatattcttttttagctttagtatcagaaagttcatc

SEQ ID NO: 17258 - DNA, 9149 bp, Cannabis sativa
  modified_base (1513)..(1514): a, c, t, g, unknown or other
aaatggtatttacccttataaatatagtggcatgtgagatctcaaaaaaaatggacgaaaaaatcatacaaaaaaggttttgaaaaactaccagaaatctaagaagattgactcgtggactatgcagaactttcacttcaaagccacgtaaaaaatcccttgtgttcatatctcttacttcattgctttcattttttctgtgtgaaattatcactattacgctcaaattttaacgaaaaatctgcgttaacactacccaaaaaataatattagttaagaacgacattttcttactaaatattccagtagtagaaatatttagtcttattcgtttataattattacaagaaatgtcacttttctcagcacatatttgtgtaggcaaaagtttggtattgtgctggtaaaatggaatttacttctcatgtgttggcaaaaggggttggcaaatcaacattagtgttaaaacttttgtcagcacaaaatgaaaaccattggttaaaataattttttccaacgagtaaatgcgctggtaaggttagattttagccactgtaaatgtacgaacctttgccagcgcaatttgcaaaatgtgtgcagtagcgaactgtgctggtaaaaatgacatttcttgtagcgatttggtactaaaatatttagctactaaaatttggtagcaaagtgctactttttaccactaattaaatttggtaggtaatgacttagtagcttaatgatatatttttgttgtagattggtacgttaactattaaatttagacatagaatattgtatattagaatttaacactgggtggtggaaatttgacggtgaagtgatggctcctaaacatttttaagggacaaaaaagcgaataattggagttatcatgaattgatgatcagtaatatacaggttcaaaaaaattatcatggggtccaaaatcattaagtaatcatgtctatggttctttacattattactttcttaataaagaaatatatagttatttatttatttatttattgataaatatagtttttgaattgttgcaatggacatagatgcattcaaatgacatggcctaatgctaaggtatagttgtactgatttgttttctttttaaacttctttattccacaagcttagaatttaaaataaggagggatataattccttttaaagcacgaggagtaaaagtatacttaaaaaaaaaaaaaatactttttatggaatttaaattattgacctctattttatatgtagtctagtttaactattacactaaatttaatattatggtctataaatatttttttttttataaatatatggcctaactagctaaattatatatacaattttatattctttcttaattttttttttttcaaaaaagccactgacgcatctcccctacattgttgatctgccggtgttctttgaggacaagtcatatatataaggtactcttttgttcatcaataatattatttttactattattattatnnttattattattattattatgaccttagctatatatatacattatttttgacgtgtgagaatctctctgcgtactgccttccttttccagtaaaagcaatgttcggaaagtaagttttacaaaatcaacaatggagaatcattagatcatcatcttcattttgatgtaataattttgtcctcctaataaggtaccttacctatataagtagtacctatatagctatcctatttgcacatgcaaataaataaaaaaaaacttttacagtatgtaaacaataacattttgatgaacgcattcccttgcctaggctatatgctatattattattaaatataatttaatagaatcgagactatcgaagcaaagcaatgtatccatgcatgatcatatggggtagggtggggtacgtaactttacaaaaagcaagacacgtcacttggctcattcgtgaaaaaatgaggttcaagtataacttgtcaagctaatgaaaattcttctcattgtatataatcagttacttaacttctaagtacgtacacggtacatttataggtaggttgaatttatttatgctaattaagaccttttgttatgtctcaaacttcctagctaagactacgcaaataaaatattaaacttgacacaaaaagtggataaatgttatatttagaacaatgccatatatttcccttaaaaagcagtgtggtctaatggtggaatagtaccttagtacccgggttcgattctcggctggtcaatttaaccatgcttttctagctttattattttgaaagacaaaaattcatgaaatatataactgggcaaataacacaggtataaataaggaaggtcctttttttttggggatgattaaagacttttatttaagaaaacccgcactagtagccacaagacgggaccccttctcttaacaaactaaagattttgacttttgcctctctagcccaacatgctagtttatcagcaaacacattctttgtccgaggaacaaaagacacaacaacttcgttaaaagactcactgaggtacagacaatacgagaataaaggaaaaacattccaatcatatatacggtaaagaacaacccgcgaaggcaagagcaattgacttcgagtcagtttcaattcgaacttttggtacttctttctccaaagccgtctgcaaagccagagatataccacaaagtttcgcttcaagtacgtcgtcaacagaagagaaccccatagaaacccaagagtcctctaagacctgatcatgcttgtgaaaaatagcaaagcctgctgttttgccaacaacagaagcatctacattacaacaccagtagtactcctcagaatgattatcaagcacctgcatctttgtatcaacttcatccaaatcgaaccacaaccggttactcaaaaattttgcagctctcgaaatacaatccttataccccagattcttatcacactgtctttctttgaaaatcaaatcattgcgccacttcaacaaactttcaaaggtacaggctgtgaagattagaagttgaacatcctccaaattacacgactagatgccaaattctgtgagattgttcaagtttaagaagtcaatgcgaatccccattctaaaccaaaccccacgtctgaaagagcatcgacaaaataaatggaagggcgattcagttccatatggcaaaagccgcataattgttagtcacaatggataaaactaagcttgcttttggtaggttggatgtcagaaaagagcttccagcaaaataatttcagacgaggatgaattctcgtcttccacagtctttcccacattaccttttggctccataaaatgatgttgttgactgatctaataggcacttttgaccgagaacttacccaactttgcagccttccaaaaaaggatattcgatccctctagtaaaggtttgatcttcaaaatatcagcagctatctcctcatccaaacactccaagatcaatctttcgttccaagcctgagttccatccaaaaacaaaattttaaccttccaaaaggtatgattgcatttgaaattgaagctagctttgatttcatctgagtcctaccaaggaatctagggtctatcccaaatttcacacgctgcatcagcaatcaaaatacccactccatccaaacacacatttcttgcttcgagtaagcttcgccaacaccttgagtcatttccatgtttttcagccagccatgcattactaatatgacagtatttagcctaaaattttttacccaaaccttttcttcctccttcaagaccatccagaacaacttagacagaaaggccaaattcatgtctttgaaccttcggatgccaagttcgccacatcttttacgttggcagatttcattccaactcttcaaattaagcacaatagtttcttttttccacatttccaacccaccaaaatctcactaacaaacattcaagatcatcacaaagagtactgggaacttgaacagtatacgtgaagtagttagggatactttgtaggaccgaactaaccagagtagttctactagcttgggacggatactttgccttccaaccctccaacctgcatagaaatttctccttcaaaaaaatgataatcttcccttttgttagtcgtgaaggagaaggatttgcccaaatacttctccgtaggttttatacaattaatcatccccttaatctcttcccagcatattcgaatagtattaggggaaaacaccacacccacctatctgattactcaccaattgacccgaccaatgctcatatttctgtaggcatttgattagctctcagcattagtgggtatggcttggcaaaagaatatcgagtcatcagcgtagaagagatgagttataggtctggcattccttgaaacacgcacacctactaaatcaccttctttttcatcatgaagaacaagttaaatagtacatgagtgcaaggaataaaaagaaaaggcgatagtggatctccttgccgaagtccgcgcttgggattgaagggatccaagggagaagcattgaatcaaatcaattaactaatcgttgtgacacattgcgtaatcagctagcagacatgattaatgaagccattcgctttcagaaatctcaaaggaaatcccattccaaatgatcatacaccttgttcatgtccatcttaatcgccataaccccaacttttcctttcttgtttttcaaagaatgcatcacgtcttgagccagaagagagcattcaacaatccaacatcctaggataaagaccgattgaaaaggagagactagctgagccaaaacccattttaacaggtccattatcaagcaagaaatgatcttgtaccaaaaattacacagacttataggcctgaaatgttcatagcgagttgtattcaagactttaggaataacgcatataaaagtgtggtttagatgcttgttgaggaccacagagggaaaaagttccttaaccattttgcaaacttgatctccaacaatgtgccaatattttctaaagaaaatgcctaaaaaaccgtcaagtcctaatgactttagagggtggagtttaaagaccacatctcttatcttgacattgtcagggattgtgcatatgttttcattctcaacctccgaaactttttcaacaaaaagagtctccaactcatatcaatgcatggctaagaggaggaatatagggattgaaaatgctcctggaagtagcccccaatgtcctctctctatctcaaccatataccagaagtatcaatcacactcccaataaaattacgtcttcttcgtataatagtcgaagcatgaaagaactttgaattgccatcaccaaaccgaagcaaattttcacgagacttttgtttccaaattatatacattcttccttctaaatcaaaaatttccaacatgatttcagcttctaaatccaccatagaattggagatcggctcattttgaaagcccctattgccttcaaagaatttttaattttctatcacaaagcctaaaaaaaaaaacttgattccatttcttcactgcctttagaaattaagttctccaatttgcatctgcaataaccctattcagccttttctgaactctgctacattcatttctagaatttttccaagtactaacccctcctccgcacccaagatccactccacctgagttaaacaaaagattcgaaagtaattttccttcgcgccttgtaaagctttgcctcgctccttcttggaatcgtcaagaatgacgttaagatctcccattaaagcccatggctcatgacactcagcacctttgtccgtgagccattgccaaaaatttctcttcagagcataatatggagtgccatagacacaaaataaacaccattggcatcgtcccatcccctcgttcaccataacacgaaaaacccgcttcaaaagtttccataacttgacaactaacaccccttcaccaagctacacaaaagcacccagcaatgccagacgtggggatacaccaagcatttgcaaaccccaaacgattagtaacactactcatagtatccacatcaactttagtttccaaaagaaaaaggaaatctgcatcacaatcacgaattaaaccccgaagagttctctctgccgcaaaccttcacagcccatggcagttccacaagaggctcctcataaagatggtaggggcatgcttttggccgcctcctcaccatttccaaaatgatgatcatactccaccataacttcaacatagtttgccagaatttcattaaaattacctgagatcttcgaagtctcagctgcttgtatctctcctcttcatcaactttgagttttcaacccagatgaacgtttggtcgagcatttcttttctttcccatagacttccttccattgccgaaacttgatccatcagtattatccctagctccaatggaaaaatgattatcttcattgttactcgaatctccctcaggcgcatacttctttttctgggcaagtcggtaaattaaagttcaaaacagcagggtaaggttggaaccacgtgtgggcctttctcttcctgctgttacccaacaagtgcatagtcatttttgataggtctggttggttagagataattgattgttgggtcttataaaggtttagaaaattaggcacgtacaatttaagaaatatttactaggcttctgaatcatggtttggctaacataaaggggtgggctcagggaacaagtgtggcttttaggacaaacacaaccaatcatggggaatatctagactttgagcaatagtaggcccaatatttgggattaactcatttctataattatgatttaaaaaattaggacggggtaattccaagttcttaagcccaaaagtaaaatcctttcaagtatcctccacgttcaaatttccttcctttgacacgttagcaacatcattaccaacattcccaaccgtctcatttccacgactactactcgtaccgtctctgacaatcgagtaccaagtagtggcctttaaacattgtaccttctctggaaaacgacaattgtgcttcactggggtaatgtcctgaaccgccccattgatcttttccttcccttttttgactgtaatatttgtttttgacatctttgtggccagtctccttctacaagtctccttgcaacctatgatgatgaggtccaactccgacatatcttcagagtcgaccatttgttttgatattcccttttcattcatagtgaagcaattgctccttcctatatcgcttttaatccacaagccatacatttgaactgcctttaccgcctttcaaatcaccattaccgtctgaacacggtagattttatctcagtgagataatttcccatagttaaagtagagatgtggcaatttctcgtatttaaactgaatccatgattctggttttccattttccatcagaaagaagcccggagggatcgggtgcgacaaccacacttctatccatgctctgaggtatcctcttctcactagctcctctttgctcttagcatcagctttcacaaaagaacccaccttctttgtcacgataggagtgttataattagtcaagcatctggtaggcaatccatggaactgcacccaaaaaataactacctcgaacttttccctccgcttgccatggtttaaggttcaatagcaccccattcaccagccaaggccttttatccaagacataagagtagtcttgttcttcctcaaagaagaaccctagaactccatcttaacatttcttcatcctctaggggcccagcctctgccacactcccaagagaatcttcttcaccattgatgcaagcatatcctttcagcctataactttccccacgcacgccttgttagatacaatatcttccaaagtaatgtcctcaaatagttctagcatctccatttcaagttcgctgtcacgttgaagcactttgttcatttcatcatctacaacttccacatgtatatcccttcccatcctgacacaaacaaccaaccagagaacacaattgaaatggagtagagaaaaccaggagaaagcactcttgcaggatcaagatacacacgaaaacccaatgggaaaagggtataaagctcagtatacaggaaaaaaatctcagtctacaaggagactagactctacacggagcaaatttttttgttacatattaaaggagaaacttaaggaaggtcttcttaagtgtcattacagccatgaatccacgatgtattatctttggcaggctacaaacaatgtgatttgtaaccaactatttagtttacttttaaagttttagtccgtaatatttgtaataggttagactttttgagtagtatgaaattgagtaggaaagataaagagtagttggaaacgttatataaaactttgtaattcttttcgatacattggttgtactagttttgtgtagacatataccggttctaatttgatgaggaatagaaaattcccttgctggtgcacaataacgaaatgatctcatgatatagcagaatctttgcctttgacaattaggacaactgtccattgtggtcctgccatattgttattgttattcgtattttacacaagacatgacacgtggcacttttatggaaaaaggctcaattgaacttccacaagttagtcttttaaagacggatggacattgaaagatctccccgaacctagggccaacaatgagagaagacgtgtggaacattacttacggtggcctatgcttcttgaagagcgggataagagctccccacttgtattcggaagcgcctaacgaggaggaccactttgggaagttcctgaatacgttctagtgacactagacccagacactaacccactcatgggtgaacgcggatgtcaaccttttccaccatatgacatgtcatcaacgacaattacatttttcctgacagaatctgatcttgttccccacgatagagcatggtattgcgcacatcgccaccatcttgttacaagcagaacaatacagacttctacccaaaaaaggaaccagctttaaa

SEQ ID NO: 17259 - DNA, 3347 bp, Cannabis sativa
aatgaaaatctaatccactgtgtaaattagtaaccctcataaataagtctcgtatatccagttaattgtaaggctataaacctaagaaccaattatctaattatcaaaccaccaaaattttccattgtacatcaccatcgatgactagataggaaataattctatgtagcgaatcatctgatacaaatattcaaagtacaaatccaccagaaagcagcatcacttttttagaatactaccataaagcttcatagcatagcatatcaatcacctgtgtatcaatgctcgaagaagaagttttgtgctaacatctttgacatttgtaatcgtggaagggggagtaaagcaaagccattgagtaaccatagctttttgaagactctgcaggcgatgctgctctgcaacatctgataactggttatttgtaccagctttgatttcccgagatcttgatagaaccctgtttaaatttataggcacaaataaaatgagcataaagattgcatagctgtgttataaaatataaatagaatcattaaaatccaaccttgaagtaaagtatgcttaactttgtgaaagaaaaaaaaaggaagtcaagtatgcttaagaagagatttcaaatacctctcaattatttcttcaaagctgccttttgaatcatccccagtagaaaatggcaagtgttgcattgcggatataaagatcttgtacttgacctgcacactttgagagacaaaaaagaataatataataacaagtcaaccactgtaaaaaatttacaaagaaatccttgtatgaagaaaaaacaaggggaaggtcaaagttacaaagcaatgtttcagtgtgcatctgtcaattatgctcatgtcgtaaatatttcatttacaagttcaaagagtgtcaatgtaagtcattcaatattcgattagcttttaattagatgctacatttttccatcaagaataataatgcaaatcagaaagttttaaataaaatatccagttccttcccttcccaaaagaaatataattaaaattctcttgtatgaaagaatatattcatataataagttccaaatgtctcatgcattttaagttggatctccactccatcattacaatctcaaagagaaaagttccattccagcagatgacatgtaaaacaaataatcttgacagtatctgttacctgctgttccaccttagctccatcatgtgcacaaacaagtcaatgcatcgatgacgtgcaagttgagaagcatatatgcccaccaaatcctctcggtgctttgaaaatagaaacatggcatacctaaaagagaatgacagtttatattattgagcacaatgaaaacttctgcatccatactagactttcaccaaaagccagaagaatcaccctatttctccattaagctcaatgtgttatatacaaaagacaggtctattctacatcaatgacagaagagatatgtatgttcgttctctgacagataaataatatccaaatgtgatcatataactccaactcgagaagctctattaaaaaaataaaagtagatactgcagtgtataggatgtgcaaagaatttggttgcgaaggcgtggcatgggttgcacttatattaagcagaacaattggacttagagtatgcagagcaacaaagaatcttcagagctaaatccgcgcttttaaacaaatttatgacaagagaaataagatcaagagagcagagaagccttatataataaatagaatgatccaaatctaacacaataatcattctttaaaaaaaacaaaacaaaaaagaaatctgacaaataaattaaactttttgctcctttgaggaccaagagaaaaaaaatcaaaaaatcgagtgcaaatataaaagctgtgggcattatgcagcaccttcactgaataagagttcaaaaccttattcagctggacacatcctagtaaagcagagcataggcagctacatttccagtgaaaaagttatttatttattgaaatttagttttttgcagtcgtactaatcaatttctgaagaagaaagcacaaggagcaatggggcatgacccagcactacttacatgtgtaggatgaggtcaccaacatttacaattttgtctttagaagtatccttcatttcatcatcaagtaaatatctaagaacaagaaccaagtgtgcaccaaatcgaatcatttcaggatctccatgaggcctaacataaaaataaatgccaaccagttagaaatacaatccacgtgttattctcagaggcataaataagagaaagttaaatatattcccaaaacaaatagcaatttgtaaaccacaaatgtaatggaagaaaggcactaaaagccacgaatttctacaaatcttatatagtcatggtgactttgcattcaatctggacatcttttcagttgtaaaatttaacaaggtttctgagcaagaacaaataaaggcaagttgaagtccaagcagtacctgaagacactctgatcgtcctcagaaggtgatatccatgaccatataagatctaacagacttggtatatctcctgacatcagaatcatctgtcaaacaaggttaaacgtgaaaagagaggtcagtcaaaagaagagatcaaactaagatgataaaaatgttgccaatggcctattatttatatttatatctatgcatgtatataaattttcctttggttaagtagtgtatcaaataatactttaatttgcagcatatcttcagagaaaaatattgttcaacacgcaactgcaaaattgtattgaacaaaacacatttcttaaacacaccatgatttaaagcataagaacagcaaaaaagctaaaaaaaatattgttacctcaatttgacgttgttgctccttgcatgctctggtcacactttcatgtaccatgtccctacaatcatattaattgattcttaattagtaaggaacataatgagagagaaaaatgggtcaaaaataagttgatagtgtaccctgaatgaagcttctggagaagatcagagagctgtcgtggttgctgattcacaacttgccgtggccaattttctggtccatttgaaggctgaaagtcttggtcactatgtccaggacttccactaatcacatctccagggtttctaaattgatccagcccttctggttgcagatgagccaattccatatccacctgaacttctagccacgactttgccattgcccagcatgctgactacacaaaatattacgtatcaaactttcagagggtttggtggcttcaaaattaattaacctgtgagtagatagaaatatatatatatatat

SEQ ID NO: 17260 - DNA, 7920 bp, Cannabis sativa
tcaacaccagatgatatttatatccaaaatcaatggggttaaggatagattacttccactagccagcataaagatcgatggcattctccaatcttttgagttggtttctgcttgcatatatacatagaaatgctaatataacaattcagcacattaagcctaaaaatgctaaggagacagacactactgcacctaattaggatgcaaaattatcttctacagcacgcattaaaaatgagaacaattagcaccattataaggctggtggtgattagccttaattcactaactaaagtagataaaattattacaaaaatagcaagaaactgccattacaacacaaaaaataaaggacaccaaagaagaaactatgaaacaaccatgttaattatatttacataattgaaacaacagtctgaaaatgaagattattgactaatcgcaataaccaaattcagaaacatgagatgaggtgataacaataagtaaagattactttttctcaaaagagcatcaaaatttcagtttggaaatgcacaaaaaggacaattatagcacaaaactcatattatggacaattagcaccattataggttggtgatgccttaacaataatccactaactaaagttctgatttatctaagaaatcattagaagcataaatataagaatgtatgcttcctcatgatgagaagcacttttctttgaccatttgatctaacatcattggtttagattacaaagatagaaaatatgataacaataaaatatgtaggaagagcagaggaattggtcataaacttttctagttcaaatagatatagaacaaaagcgtagtcatctcacttggggaatttgatcaacatttgaagcaaaaaggaatcatatatttgataagaaaagaattaaaaaaaataaataagaagaatattttccataacggaaaaaaaaaaatcaaattgtgaaatcactaaattcactctgaaccacatttttggtttgacttgatcaaccattagatgtgttcttgattcaaagtaggagatctaaatcaccaaaatgccaagaatcaacacaaacaatatataagtggttggaattagagcattgtaactctagcccattcgattcgactaaggaacagtgtacaaaggctttgtacttatcataataatgtgctttattacaatggcaatttggttagtaaacaacaacaataagaataaggaacacttaagaaaggaaagccattgtcaaacaaatgtcattattcaaaaggattacaaaaatcattcaatcaacaaaattcaacaacacatcttacaaagccacagacacattaacagaaaatgccgaatcaatcataattcaacaagacatcatacaaagccagagaaaaaagcaatggaaacaccagctcgtccttgacagatccgatccagtgttcataatctggagcaaaaggattcgaacctttgcatgccggtaccaaaaaccgatgccttaccacttggctatactccataattaaaaggaaaataaaatatgaattttatttgccatggagccaaaatagaacaaaaacattggttcacgccagaaaaatccacacaaccacacgaatacaactcttaggctaactagaatgaactacaaatgtactagaattgagcacaaataaaggaacaaaagaatagaataacagaacaatatttgtagcaattgatgatagttaagttgtaagagaactaagagagagataaactctcttaaatgaaccgaaggagcaacaaaactttcatacatatatatccaatcaattacaaaactaaaaaggaatcaaatatatgtagttaattccttaaactacttactaggttatactttaaaggagagaaactccttctaatgaaccaaaagaaccaaacaaaacatcttcatccaatcaagacagagataaaatgaaatcaacaaatgaacatgaataagaatttacagaaagaataaaattaaattaagaaaatgaagcataatcaaatattaaataaagggaaaaagaagaagaaccaagaaatataatcaacatacatacttcaagttttaaaaaaaccaaactcaatattaaagactacacagaaggatgatcaaaattcgtgaaaacgcacatattaattcacaaatgaaagatgaccaaaattcaaaaggatgtctttaacccaaccaccactgaagtaaaaatataatggctactcaaaaaatagccatgaaaatgaaacaaatgaaaataaactaacaattgctaatttattgaaacaaacacatgaccagacaataataactaaaataaaaatagaagaagagcaattacggttccaccattacaggaacaaccatgaaacacattagcaaaaaatttcattattaaccataatttaacacaagacatatatatgttgtcacaaacatcgaatttagatgcacactagatcaacacaattctataaaacaagatatttatagactggtaatgatatggcctcaataataactaactagactacataaattacaagagaccaaaattacaaaaatggtttcatgaaacctatgaaaccatcatttcattccatacaattaattacaaggataaaaaataaatatccactaactaactgaattgctttattattacttacacatgaatgaactacactacacacatggatacttttagctttaacacaatcaaaattcgtgaaaatgtgcatattagttaacaaacggatgtcgtcaaatcaccattgaagttaaaataacggctactccgaaaaatagccatgaaacaaccgtaaaacacaataacaagaaataccagattcattcaagaaaatatcttacaaagccaatgaagaagagaagagattatgaaaccgaaccaactaacaaaactacaacaacactcagaaaatggttaacagattcatccatgcagccacacaactaattaatacaactcccacttagctacaagatactaaaactgagcaaacttattattcattaatcacaaaaacacttaactttgtccaatgaattaaggatgaaattggcataaaacttatctaacaaaaggaaatcataacagtcagagagtaatcaatccatgcagtcacatatatcattactgttactacatagaatgaactttagatgataacaaagcgaaattggcaattttattagaaagcctcacttatggatggtagacgaaaaccatagcaacaatcaagaaacataatgagaaacgaagaattaaataatcttacaaaactatttccatcaagacataaaaccatgtggataattagcaccattatataggaggctaatgatgagtcagtgcataagaataaaagaaaatgaagacattgtgaagaaaacatgataattctaagagatgacttaaaacaagcattgtagtagaaagaaaaagatatcttataaagtcataaaataagcaatgaaagacgaattaaatttcccatggagccacagtcaaaaaaatgaacactaaaatacaactcttagctaactataaaaatactaaaacaataaattgagcacagttaaatatttaaacagaagtagcaacaaacttccatccaatggactaaaagaatcacacatatcgaatttaaatgcacacaaagatgattttagattatttaacaccatcacaaattaaaatgtaacatcaacaatgaacaatcatataagagtaaaagactaatattaaatcataaaagagatcaaactacaaaagtgacaagataccacaccaccattgcaattgagaaattgaccacccacccaaaagagcacacatgaaaaatcattagagactgacagagcgaggataagatcatcaccccctttcaccatctggactcctggtgaaatatacccaatcacaaagtctgaaagctctcctctcagctgagctcatttcagcaagaaaccgcgaacgaaaccaaccctgcataaaacacagcacacacggtatttaaaggatagcaggcaatttgtttcaaagcataatttacttcagaccagactatacttcagatcttcaatttcactccatccataatgcaaaaaaaaatgtcctgaaaccaccattgcaaacataaaacacattaacatgaaataccagatttattcaagaagatatcttacaattcctacttaactacaaaactcagcaaaattagtgactaattacaaaaacaaactcaaaaacttaacttttctattaaacaaaacaagtaaaagatgagaatgaaaaaattgaaagatgatagacatggacatagacataaattccatccaatacacattattcaaacataaacacataacatagctgccaaaagaacaatcacacattaacaaaaaaaaaaattagatgtcttaaaaacccatagaagaatcaatgaaacaacaaacataacttcttagaaaataaatattaaaaaaataggacatgggaccacaataacaaaaaaaaaaaaaggcaatcaagaaaatggaacaaaattggttcaaaccaaattttgaaaatgattttactatatgtgtaaaatgattattttaagaaaaaagagcatttggctaaaggaatgaaaaatttatttggaaaaaatagagttatattactaattgtataaaaagattattatgagaaaatagaggatttggctaaaagaatgagaattttatttgactgggagaaaatagagttaggagaaaatgatttaactaatggaatataaaattatttttgaaaaataaagttactggctaaaggaatatgaatttatattgaaactatatagctaggagaaaatgatttaactaaaagaattaaaaattagttagcaaaaatagataatttggctaaaaggaatgaaaattttattttgaaaaagtagagtaaggagaatttttgaggttatggtagagggaagccgcggtaacatgctaaacactaagcctatgtctatatgtttctccataattttttcagcaaacacaccagcctagggataaggcttgaaaaggtttcatatctaaagctagactccatccgaacagttagatattatacagagtatagcttttccagactcgtttagaccaacctcccgcttctgagtgccccgaagtgagagcattgaacgcaaacttacaagagaaaactcccccagaatcctctataagattaaatactggtttcagttctagaatgcaaaacaattccaacaattttgtcatttccctaccaagaaaattcttattccacccagaattggagctagagaagccttcattcatcaccatctacttcatgcttttatttttagccagagaaattctagccaagtctggaaacaaatccttgagtgagaagtcccctacccattcgtcttctcaaaatctctcaccattttcgattttgaactgaaccaattttagaaaatcctcatatagggtagcaaggcttttccaaggggcccctatatgacggtctctcctaatctggtgtcccaataattatcagcttgtccatacatgctttttatcactttatgccataatgattcagtttccagtgggaatctccacaaccatttcataaaaaatgcttattgcttttttccaaataacttattcctagtcacccttagatacgagatttacatactatatcccaagctaccaagtgtcttgatctagacaaatcaactccttcccaaaacaagtccttcattagcttttctaaagtgagaataactgcgttatgtgctttaaactaggacagaatatgtgtgggaagcgaagacatcagtgattgtataagagtcaatatgccttctctaaataggtatgcactcgtccatccatcaaggcgtacttgcaattttttccaacacatgttcctagaaagatgtcctccttcggttttcctccttggggtttcctaaacacttccattaattctttcttcacaactacctcccaatttggttggtaatagccattgtacatctatctggaccttctcccagaaagatgtcctccttggggttcccttcttgggttttcctaaacacttccatctggaccaagggctttctcccagaaagatgtcctccatgggttttcctaaacacttccattaattctttcttcacaactaccacccgtggacttgttgccttcccacaaataatccctcaacatcttttccaatgctttgatcaaaacttttggcgctttgaatagtgataaaaaatagatcgggagtgaagatagaacagattgaataagcgtcaatttgcctcctttggataagtaacatttttacccatctaacctcttagcgcacttatctaaaattggttcccaaaaactctagtttcttggtgatccgcccaaaggcatcccaagatatttcatcggccagcttcctacctcacaccctatcatagaagcgtattgtgacaccctcctctcattcatgcaaatccccttggcttttactcaaattcactttcaacccagaaatatcaaaaaagacctccactaacctcaccatttttaataacgagtcctcatcataaacaaatattagggtatcatctgcaaattggaggtggctaacttgtattttttcttttcccaccagaagcccagaaaagttacctgattcagctgctttctccatcattctcccaaggacatctactaccaaggtaaacaggaaaggagataatgggtctccttgtctaaggccccaagaaccgtgaaatttttccctcggccttccattaatgaatattgagaaggatgtcgaagagacgcaccctttaatccatttcctacaagtaactccaaagcctttgttacgcataactgaatctaaaaagtcccactcaactcgatcgtaggctttcttaaagtcaagtttaaataccattccactcttgcctctgcttctgtagtcttctactgactcatttgctatgagaatggagtccagtatttgtctcccttcgacaaaagctgattgagtttccatgatagtccctccagcactcctcttagcaatgatcttgtaaacagttgttatgaggctaatcggtctatagtctctcactttgcaactattaagcttttttcgaatcaagcatataaatgtctcgtttatacttcctcgaatagttccttatctttcaaaagctttgaatacttccatcaaatcttccataatgatgccccattgagaatggagcagagccatgccccggagccttgttaccttcacaactgaataatgtatccttaatttcatcttcttcaaaaggtctttctagatgccttgctgaattctctgtgattgctcttgccaattgataccccttctattctcatgacccttctcctctcaaaagtgtacaagtttgagaagaaggcgatgatctctttcactatgtcttcctcgttttcaatgatcgatccatcttctctttcgatccttgagattgtgttcttagcttttctcgcattcaacaagttttggaagaatcttgagtttgtgttgccttccttagcccatttacacttaggttttagccacacacttctttcttcttcaatagtgagtctttgccactcattcttaacattcttcctttcctccgctagagaagaattccactcattggatgcttccaactggtccagaaccagcagtctcctctccaaaacattcttgaccaactgattgttgccataagttaccttgctccattctttgatgttttcttttactttctttagtttactcatgaactttg

SEQ ID NO: 17261 - DNA, 5587 bp, Cannabis sativa
tttttttttttttttgtgaaagaacctcaagttcattaaaccaggaaattaaaaggagtagggattcacaggaagaaatccctagctcccaatacattagaaaggagaacttgagaagttgcaatatcattcacaaacagaatggcttgctaaattcaagttaattaagtaatttcttgcatcacatatatattaatttataaagatgtctatatcaaatataatattacaactgatctatatatattatcttccccagtgaatgcataatatattctctctattatatatatatatatacacgcacacgatcgtaagtttcaatattgtgtcaaatattatatttacagctatatatgtcatgatcatacatattattattttttcttctttttttttttttttttggtatggagctatcatatgatcatatataattacaaatatatatgtttaattttgtaaactgaaaaacatcatgatcacattcacatagcatatgtagagatcctatatatgtatggtatttctagaacgagtgttctttcaaaataatatataaagatatccatatatatgccattaatacataacatatatatatagtaaaatttatgcatgatacatgtctatatatatatataagttataacatatacgtaattgtataaatatcatgaatattacgttgtaaaaataacaaagtattacaaattgttaatttgcatattcaaataaatatcaatatataaattaaattaaatgatcaatatccttacataaaagaataaataaataaataaataagtgatcatgcaatatatgtaaatatataaattaaaacttctgaaaaatgatgatgtgatcaaatcttaggtagaaggaatataaaaagggctccacacaaactggaaatttacaccaaaaagttatattatttagcacattaattttgccagttctagctctttacaattttaatgtatggagtatcaatgatgtataatatttaatacttaataaagaattgtaaatgcatattgatgatatatattaggatagctgtataaatgatcagcttaattaagcatatatgctcacacacacataagtagaaattaatagtattatattataataagagaaaatggtcctgtagttttattcatcatcatcatcatgatcgatatacacagaatcacaattctggaaaccaacgattaaaattaaattaaaaaacaaaagtgtccacacaagttattgaaaagtacaaatattaattatatattaattcagcaaatatacttatattgagtagtacttctacttatatatactactactatactagcttaattattgtttattaattcaaactgcaggcctccccagattttccacccaaaaacagaaaaatccccattattacccaaaatatgcaatatcatcatgagctcatatatatatatatatatgaacatcttaattattaattcacgataatatataattataaagaacttaggcaaaaactaatgttattatagagatattaattattattaattataattaggcctaaacctttgtctgcaagactggcaagtgatctccatgcacgtagaagaagaagaagaattaatattcatcatatccaagatctgatggtgatgacgattattatgagatgaagaagaagaggaattagaaaacgacgtcgttgcggtagtaatagaagtagtattattagtagtagccttttccttcataatctcagctttctcaacctcttctctagctctctcccacatgtgcctggcacgtgcgaattccgactgagccagctccatctctctcctagtcagctcccttactctctcagcataagctttctccatagccgccagccttatctgctcagcggcttgccacttcagcgcctcaacacattttttctgatcatcatcattattattatcatcgtcatcgtcgtcgtccactaatatcgttagatcctgaccgtccacgcattcgcagataggcccagctaataccgtacgaaaatgatcatcctcttcttcttcttcttctgtcgtcgtagtgggccttagactgatcgagagttgtaaattgaggcccggcccattattattattaaacggacggccacgattgttattctgtcgacgaagatcgtgatgaagatgatgatgattttttgatcggaggttattattattataccttatgattgaattagaaccgtgatccaacggtcgagatggcagaagttgcaactctttttggtcgtcttcttccattgatgatgaatttatgcaaagaaagaggtttttttttttttttttgagtttaggttttgtgctgtgggaggtggcagagaaacgttctgcggtttgtgttggtgtatatatatatttatatatacacacacataaaaacgacactgaatatgtactcatacatgatttattaagtgaatttacgattttacccccatgaaatggagattagctttagatatacatatatcaaatttatttcttgtccaaccaaattaatagatattttgtaacaacgtcatttcaatcaagattggaaatttaagctcaatgattaattagttgggtttttgtatttgcttggtgcatttgtaagtaatgttaggaatagttaaaagatatatattataaaataaaattattgtatgtatgtttacattatgaaaattaagctccttgtataaaattttggtaattctagtacaaggtagtaccatgagtttaagattaaaaaaaattaacgaaaatgatgccatagaggggattttttgtaatataaattctgatcctacaatatctaataaatgatatagctacaatttttattaaaataactaccgttaaatatcaattttaaacttaagtatttttacaccttttaacttcttttttttataaaaaaaaaaaaaaaaaattgaaaaaacaaacaaaaaaaatcaaattactaatttttacaaaatacataattaaaaatattatttggtaaataaaaattaaacttggttgtttttattttaataccagaacagggttttggcagtttacaatataaatttcggtaaaatttgaataagaaagagaaaagggacccacgtacccatgaagaggcgaaagggcagaggcagtagtccacaatcatagtgagtggccatcccacgtgccaacctgaccagagcgtgggctgcccctataaacaacaatctcaggtccaccataaaagaaaacctataaaaatccatatcccataataataataataaataaaaataaaaataaaaataaaaaagctcacaaactcacaatgcacgtgctaatgtaattattacatacccaccatagctccttctttctcttcatcctaatcttcatattacaaaaataaagtaataataatagcaaaaaaggaaaaagagtacactcataataacccaataacggcatccgttatagttttgtccccatcttatactctattaatagtaatacttatacaaacgggctttatttcttatgctcatgactcatcatattaatataaccaacaaaactaggtactttcattccacactcaaattgccctttcaatatattaacttcataattacaaattcacattcaaatctaatttaattaatttaactagtaaatatgaaaacattgtgtaacttcatgggtaggaatggagcccgtgactaagactcgaatggccaaaaatgaagaaaaataatttaggatggccaaaacattagtattaaaagtgaaagtttcgatattaatatagagattataaatataatattttttatatttgatataagaatatatcaagttagttaagattctgttagaaagttcttaagttggtttggatttgtatgaacagtttagaattagttagtgagttaattgttgctcactctattgtattctgctactataagtagcttgattcccttgtaattgtttagtatgaataataagattaatcttcttcctcatcacaattcttctgttttctctctactttgttactctatttttgctctattgagctaatatggtatcagagtcgatggtgtgggctcctttcttcttcttcttcttcttcgattgcttttctgtttcatcatggttcgtggcaagggagctcatcctcgtggagagtgaaactgagaatgttgtggacacggatacgttcttagtccttggagaaaattctcgatccacaaatgccaatgatctttcgaatccttactatgtgtctaatggagataattcaggagctgttcttgttccgaagattctcactggaagtgagaaatacaacacctggagaagacccatgttaattgctcttgttgctcgaaataaagtgaagtttgtttatggaagattgcctcaacccgatgatgatcatgaagattatgacagctggtgtagatacaacaacactgtcatatcatggattctacatgcgatttctgatgaaataactaatagcattatgtaccttgataatgctgctgaaatctggtctgagcttcacgagagctttaatgaaaggaatgcacctcagatctttgaagctaataagactatgcaaagtcttattcaaggatcgaatagtgttaccacttattttactcgactgaaagctccgtgggatcagatcagagagtatattgttcttgtggtgctatgaaagtgattcatgaatatcaagaagaagatcgacttcttctcgttggattaaatggttcgtacagtatggtgagatctcaaattctgatgcgagatccacttccaaatgtgaataaagcctatgctactgtgattcaagaaaaaaggcagcgaggactaactagtggccctagtaatccttttgagattgaaaaatctactgcatagacaatttactgttgctgttcagccattcaaatctaaattgaattgtactcattgtggcatgaatgggcatactatcgaaagatgctacagactcattggttacccacctggtcacaagctatatggaaaatttccaaatcgaaatgctgcacccaaatctgctgctgctaatgctatgggaactgatgaggaaaagcttgaagatgcaccaggagataaagatcttgtttctagcttgactaatgttcaatgccaaaagcttatgacctagcttgctcaaaaagtggcaaacaacagttcaatcaatacacctgatgagcagcccatagtatctcatttttctgataagaactcctttgttcacagtgaaaattggatcatagatacggggacacacattatgtgtgtcacgacatctcattattcaaaatcacctatcatgactctagtcttaaaactgttttactgcctaatggtttacatacacatgtttcttgtcttggaagtgttgagttaaactgtaaagtccttttttggcaagttaggtgacaaaataatttttcctttttatggtaagattgctatgcattcattttcga

SEQ ID NO: 17262 - DNA, 15195 bp, Cannabis sativa
  modified_base (7895)..(7909): a, c, t, g, unknown or other
gttttggttttgtgattggttttaattttgatttgtgtttcttgaacattgttactgctataacaacttgttttgagggtgaggattcaccacagataaggaatagaattgcatcttttttttgagagtataaaagtttaattattgtaagtcaactggtgaaaaattgtaatgaaacttttatacaactgttatatatgttgcgagccaactaacataaaaattcagaaaaaaattactccgtatgtaatagaaaagaaatttattattatcgactttgctctgttcaagtcatgtattgacaattccgaaccctatatttattatacaaaatcattgttgtagctcaactattatttaactgaaatacaactaagtttttgtaaatgggcatctttaagaaacattttctctgttttttttaaccatctaacaacaatgaatttttcattaatagtaatatttgaagaaacaactattaggtagatgtaaaccaactgaaattttaacaaattcaatatattcatataactaactaagttatatatctttctttaaagagatttatcttgatctgccaatatgaatctcctgcaattatgataaataccattgtaatgttatcactttctaatcaaagatatgtcaagtttcataaggtaagcaaaaccgtaatgaaactgtagcgcaactcttcagaaacttaacaaaccagaacaattttttatgtatgtgtctgtagatatatgtgaattttctatactaatcgtgatttgatatgatcaaattcacattgtaaaatttggaaaacaacgtcaatgcaatgagtgaaacatttgtttcagtatttttgcattttttcagatcatacctgatttggattgattaggaattccagatctatttataatagatctacattttataaatctgaaaatcgatattaggaggattagttttctgcgattttaatcgtaattcagggttgagttttagtttcgaacttgtttttctgcccaattttgcataaatccaaaattgtatgtgtttggatttcttacagccttcttctcatgtgaagtcgtcgaaatttatggtgattctccgtctagcttagtttcttttcaattggcctagtggtttagttactcaaatgtgtcgttgttgaagaaggtggtttgtgtgactaaatggttagagcaaaaggtattcttataaattaatttttcgtgtgacccagcacatatgtagaaaattaatacataacttataggttatttttggttggaggtaatgaaataaaattgaacagaaaagaatcaatttttatttcattcttatttgttaatttgcttgtattataaagtattagaatatcatttctaatggaataattttttcatcattttagtaaaattactattttattttaaaataaaaggaaaggcgattccaatgcaagatgagaaaaaatgtagtgtctttatgaattttaaatgttattacattccattcatattcctatattctcattctatataaattctttttaatttaaaatatatttacaaaattaaaattaaaaaaaaaatgatgaaaaaaatagtctattcatggacttatctaatttccaacactagttggattagataaataatctcagtatgtatatgagattaattggattagctagttatctagattttcagtatgcatgtccaagacttataaattatcgtgtctaatccaattcttgcatgagcgcctaactagccctaagtataaaataataaaggtatcttaagcattatcccaaaccatgtgagactacgattgagcaaggtcaagatattactacaatattgaggagcatcaattttatacaatggtatatatatagtaaaacatttttttcaaaataatgagagacattaattggtaggataatattattttagaggcactttggataagttagttaggttagttttattaagttagacagtttgttattacagttgatttttctgttgtaagttagttgttcccaactaatattttcgtcaatcttcagagttatataagttcggttccctattgtgaaactcagttgagaaccaaaaatacaattgttctgattttcctctgttcttctctcctttctcatatggtatcagacgaactccggccctcagcttccatggccagaccctcgactcgttctcaggatggtgctcctccatcgacgatcgacaatcaagcagcgaaggtcaattctgaccctgttcctgctctaaactcctcagctttcccttctcgcaatccaccagctcggcttcaatctcagcccatagatccaactccccaggaccaatccaccattgttgacgacaacacaactcaaacactccattcccaatcagttgctggcgatcattccagcccctttttcctcagcaccggtgatcaccccagtctcgtgctcgtgtccaccgtcctcaacgacagcaactatcaactatggaaaagaggcattacgatggccttgactgccaagaacaagatcgcgttcattaacggatctctccctcggctagaacctggtaattctactcttaatccttggttaaggtgcaacgacatggtaatgccttggttgattaattttgtttcatctgagattgcgcaaagtataatgtactttgatttagctattgaaatgtggaacgatcttgttgagcgtttcaatgagggcaatggccctcgaattttccaattgcagacccaactcactcggcttcagcagggtgattattctgtttctacatatttcaccaagatgaaatccctatgggatgagttgaaagaatttcaaccaataaccacttgcacttgtggtgcaatgaaaattttcttggattactacaaccagaatcaagtgcttcaattcttgactggtttgaatgaatcctatgcctcagttcgtgctcagatttttctcaatgaaccgatacctaatctgtcccgagtgtttgccatgattgttcaagaagaacgtcaaagatcccttggatcctctgatgcaattccccttgctgctgctgcctcaagttcaaccaatccccctagagccaagaaaccccgaccatcttgttctaattgtggcaaaccgggccattcagttgataaatgctattttctacatggattctctcctgggtgtggtgataaaaagaaaccaggcaagggaaaatccaaggcaaacactgcctccactaacaattcgaaagctgatactgatggccataatatgaatgctgatctttcatcccaatgccagcatttaatctcactgcttagccaacaactaagccacaccagtcatgctgaaacccctgccatgactcctgcagcttcgattcttgcaggtaaaaaatctctttcacttgcaacatcttggataattgataatggtgctacacaccacatgtgttccaatattgcttgcttttcttcattcactaattatttttttcctaagtttgtcacattaccaaatggacaagacatacctgtccaaaatgttggcactgtcaagattaattccaacatttttctggataatgtgttgtatataccacagttcagactcaatctcttttccatttcagattttatgcttaatacttctaacaacatcttgtttcatcacaactcttgtgaaatttaggatcctactctaaatgtggtgattgggacacctaaaagatgtgaaaaattgtactttgcttcaacaagacaaagcatctgttgcagctactactatatttcctttttctttcaataaaaccaatgtaaaccaatggcacaatcgccttggacatctttcgatgtgtatttcaagttttttcaataaagaacacaacatttcacatcaaaattctactaaacattgtcatgtatgccatttggctaagcaaaagcgtttaccttttatttccaatcacaatttctcaaagaatgtgtatgacttggttcacatggacatttggggaccattccacatactaagtgtggaaggttacaaatacttcctcactatagtagatgacaaatctagatttacttggctttatatgctcaagaacaaattagatgtccaaaacattatccctacctcttttaacatgatttgcatccgattctccacttctatcaaagaaatcagatctgacaatgctaaagaattaaatttacaatctttttttgcttccaagggcatactcaattaccattcttgtgtggaccacaagagaactcagtagttgaaagaaaacatccccacatactaaacatagcacgtgcactaggatttcaatccaatctacccttggtttattggtcatacctagtccaaaccgccacctatctcatgaatagaactccctcaaaaatgcttaaaggcatgacctcataccagctcttgcatggtacaacccccaactatgaccatcttagaagttttgggtgtttagcctatggctccacccttccttctaaaagacataagttcacaccaagaagtagagcctttgttttcattggctatcctcaaggcatgaaagcctatacacttcttgatattgaaactaagcaaatttacatttcaagggatgttgtcttttatgaaacaatatttccattgctttcaacaacatccacttctgcaattaatcgactactacctgatactgtcattcccactgtcagatcagtacaacaacaaatccatgcttcccaaggtgtgctactcccaactgcaccaccaggatcagttgtacaccagcataatgctgctgtcacaacaaccaaacacatcagtccaattcccactgattttggcacaccagaaattgcactatcagaacaaatgcattctggccttactaatccttcaaaaatagctcccacgcaggtagcctcaaaacaacaacagatatctggtactaatctcacaccagattctgctgcactaggcatcacaccagttggttccataccagcagaaccgatttctggcaccccaactactgagccagcaaatgttcaaccttccaccacagtcacaagaactggtaggcccttgataaaaccaaaacacttgacagattacatctgtcatgcctcctctactgctcatccaattgagcaatatctttcttacattaaactacatcccactttatgagcagctgttcttgcaacatactcccaaattgaacctcaaacttatgctgaggcctctcaatttaaacattggcttttggccatggacaaagaaaccgaagcccttgaaagaaataacacttgggttgtcactaagttacccctggccataaagccattggttgcaaatgggtgtacaaagttaaatataatgagagtggggttgttgaacggttcaaggctcgcctagtagcaaaaggctacactcaaaggcatggcattgattactctcaaacatatgcccctgtggccaaatttaacactcttaaaaaaaatagctcttgaagccatgtacaactggtatgtacaccaattagacataaacaatgcatttcttcatggggatctccatgaagaagtatacattaaaattcccccaggttataaagctccccctaacacggtgtgcaagttaaacaaaagcatttatggcctaaaacaagcttccaggcaatggtttaacaagctaagtcaaactctcatttcagatagtttttctcagtcactttctgacaactcattattcatcaaaaagaccaaaaccatcttccttgccattctgatatatgtagatgacataatcattgctagcaacaatgacaatgccatctctcactttaaaacatatctccatgacaaattcaaactcaaagaccttggaaccattcagtttttccttggtcttgaagttggtagaacaaaaaaaggcatcttggtctcccaaagaccctttaccatcaaattactcaaggacatggtatacataggtgctaagccagcctctactcccatggaaacaaacttaaaactaagcaaagacaaagggaaccttcttcaagacaccacgattttttgaagcctcattggcaagttaatatacttaataattacgagacctgacatctcatatgttgtcaacaatcttagtcaattcttaacttgtcctcgaattccacatcttcaagctacacatcgcatcttacgatatttaaaaacaacacctggacaaggactattttttccatcaaacacaacaccaactatctctgcttatgcttaaactagtctatcaccatcaaatgttcagatttccttcttttctgatgctgattgggggacttgtcaagacacaaggagatcgatttctggttattgcctatttcttggcagctctcttgtgtcatggaaatcaaaaaaacaacaaaccgtctctcgatcttctgttgaagccgaatatcgagccatggcaaatgccacctctgaactcacttggatccttactctcctcaaagactttggcatcaaccactcttctccagcactgctctattatgacaacaccgcagcaattcacattagtgaaaccccgatctatcatgaacgcactaagcacgtggagattgactgccacttcatccgagataaggtccaacaaggctccatcaagctacttcatgtttcttctcaaaacaaccttgctgatatttttaccaaagctctattgcctactcatttttcgaatattgtatccaagatgggcttaataaacatattcactccatcttgaggggggcttttagaggcacttgggataagttagttaggttagttttattaagttaaacagtttattattacatttgatttttctgttgtaagttagttgttcccaactaacattttcttgaatcttcagagctatataagctcggttccctgttgtaaaactcagttgagaaccaataatacaattgttctgatttttctctgttcttctctcctttctcatatattatacaatagtatatagtaattattttagtagttttgatttattacatagaatatatataaaacattaattcttaaaattatcatattctgtgtatttcattttagaataacgtacgtaacatgtataatctatgctcatttaaggtttgcttgtgtagtctattagaggtactcaaactaaggtaaattattacttgtaactttcttagacataacacttgtaattcttgttttaacttctaccttcaaatatggtatgctaccacactacgtccactactgcatattcttgtttttttatccacttaaaaatcaccacctttggatgtacaatcacggggttaaggtcgtgcttgacgcgagagaggaatcacggcgttgggtcgagcttcacgcgacagagagagtgtctgagagcgagagagggatcagggaacacaagttcctgagatttcatggctggtggaggtcagccatggcctccgtttaggcctttgacgaacgagggtggctccacccagaaaaccaagagagaccggcgagaaggggagagatagatatctgattttttggttatgtttgatggttgcaagaatggaggttgtcattgggcgaagagggggagaaagagatgagttagggttttcaaattagtgtggtgtggtagatctgagatgaacaaatagaaaaagaaagaaaagaagaaaaaaaaaagaaagaaaaggaaatagaaagaaaggaaaaaaaattatttttttatttataattatttttttaattttaaattaattttatttttttaaaataattttttnnnnnnnnnnnnnnnattgtgccacgtgtacactgtgttcagtccaacatggtacttaacacctaaaatggacggaagtgttaaattggtaacagaatacgaatgttggtggttttaccgtccaaatttaagttttgggggttaagtgaaaccaaaatgaaagttttggagattttaccgccatttacccataaaacattaattcttaaaattatcatattctgtgtatttcatttcagaataacgtgtaacatgtacaatctatgctcatttaaggtttgcttgtgtagtctattagaggcactcaaaccaaggtaaattagtacttgtaactttcttagacataacagttgtaattcttgttttaacttctaccttcaaatatggtaccacactacgtccactactgcatattcctgttttttaatccacttcaaaatcaccacctttggatgtcttctgtagacagagtttaattactcatggtgcactcaaacaacaaattaatgttctcttgtttctctatggcttccacacaaaacatacagttcatctattaatcttgacatatgtaatagtcattgcattgcagcaatccaaattgtataaatctatgtttagggattgaaagtctattccatacctttttatggaagatcagagagtcttcttggatcctatatggctgagtcataacataaactgttggactatatatactagggtttttaaatgctccttcaccctatgcctccatgtaccagaaaataaaacaattcttttaaatgttaaatattgaataccataccatcctagtaaaaagtgtgttttccacctcaatttttgtgtacataaacagaaataaaaagtaaagctttattttattttaacttttacttcatctagaactacttcaattgtcattttaagatgtaaaaagtggagcttttacttcattataatttaatttagcttttattgtctggaattattaaagatccatatccttctaatgatatatataattaagctaattataagaagatgatcctattcttaatatggtgccttaatcgagtagaataaattagagaaagtagtaagaagtcttattttcttaataattataggattatatatagttgacttgtcaaaatattaatattgtataatgcaatatagtcaatttattattattatcaataatggttaactatccacttctttaggacgatagagatttttgaatgggacaggaccaccttgacggccggtggtctttatatacatatgaaaacgccaaatatcattcttgtctctagtcggtggtctaatataaaatctacaaaaaattattactaactcatatgactaatcagatgcatataattatcatattgagaattgttaaaaagttttagtgtaattaattgatacgttgtaattaagtatcgaattttatataatttaatataataatttttaaaaatattactaattaattattaaatatcacttctaaaaaaatactagacactattgtaaccaacaataataatttatcatatatataatatgtattaattcttaataagtacctagctagctttctgaaaaaaaaaaaaaaaggtaccctaactagctagtaagctagtacacaatataagtaagtactaattagtagagcattgttatttgatgcctaatatttttttgtgtgagttgtaactttataattaattaatatttttttataatatttattaaagtgaaataaataagatttgatattaaattatactaataataataaagtattactattggactgcgattggttaattaacgatatactccctaaaaattattatattaattatatggaactcgatacttaattagaccaatagcgatactaccatgtaggagagtgctagacactactggttccttttagtatttctcatagtaatattatagggatttttacaaaaatacagaatttcggacaaaagtttacaattttactgtcacacagaatttttacgaaaatactgtgtttttataaaacaaccgtaaaacaattaaaacaacagtaaaacaactaaaaaacaaccgtaaaaacttaacactgtatataatatttttaaaagaaactccgcctcacggtaaaaaaataaaaaaaaaaatcaatatatagtgtaaaaactcttatattatacttcacaaagatgttaaagcatcataaatctcctttaacatatctctacttataactacgaataaaattaaattatcattataagttttgtattttttaaaacaaaattatcattttataatggggggtaatatgtacacgtatataattcataaaattaaccttcacttgtttcatcaaaaaaattaaccttaatgccatatatatcctttattgaaacaaaagtaaaaacaaaatgatccaaaaggctgtggtatcattatatatagataaatttaatgattagttcttacgatattatctatatatatttatatatattatttcggaaaatatatgagtattaattcttattatagtatatgcatcgatccttctcactttatctttagctcacttaataaatcaataccatacatttattatcatcgcaataaaattatatttgtgtaaaacgagatagtcatgtagttttagaattattaatgtacggtcactatcatctccaacgactacctagacataatataaatatatgagtactaactaaaatcatgtacgtaattcatgaggaatttgcgacattactaaataaaattatgtatgaatatgattatgagaatattttcataaaataaaagcattttaatttcatatcaaggttcgatctttatgtttaaatataaaggttttgatagagaaattgtcaatgatatatttttatctaatggttaaaaatgatttttgggttaagtttccataaggtttttatttatttgcaaattttaaaaataatttatgattatatcgttattatattagtcgaataaacctaaaaaaaatatcattgtaatttactcttcaatgtaagtattttaaaatatgggaagtatatatttttttgttattttcagaaaagaaactatttaattactaatatattgattagttattgttttataaatttttttaaatcttagttatattttattttagaattttattaattgaattatattatattatacgataactaactagctttcaaaataacaaaaaggttgttatataaatttctacacatggtgatgtggcatccatctaggtgacacgtggaacagattccataacatggataggcaatactacttataatgagttgtgtaggaagatttgatacttgaagtcataaataaaagtcgggacatccgagcagagtatgtaaaaacacccaactagcttccatcaaataggcggctcgcatacatcgaccaggggatgcgagttagacaattttagagacatatccaatatatcctcaagcttgcaagttacgacaatatccttgaattcatgagatagtttcgtgttaattgagaagaaagaaaacctacctagtttcctatatattctgcttattgtaattatagaaagtaaatatatttctcattatattccttattaattttgaataccaatttgatgtaattaatccctataaatagtggaatcgtctcactattcagggatgcgaattttattcagagaaaacacacaagagaaatctaaatttaagagtaaaatactcagagatcacaggaagagcttttcagaaagatcaagtttttcttgttcatctattcacaagtccatacaactaaaggagagtaagctattacaatcgtcaaggggtcgaacctctataattctggtattttctttattctatattattcacacttgttattttagttattcttaaatcgctttaatttgactcactaaagtttctaaaagcgagatcaatattttggtgctttcattgagagcaacaaaattcaagtctttgttgtaagtctttttcaggacataagatggttgtgcaaagacagatgagaaatcaaaataatggatccaatggctacagatccaaacgtgtaggctcatgcaaaccccaaagatctagctaggacagaccctactctgactagtcctcagccaccaataggccctcaaacagtaggtcaagaaatgactaccccactggctgggttcacttcaggcatacaagaaactggaaccacttgtactctgactgtgcaaactacccccggtgctagaatcccatctgctaaaaattctcaaaggccaatcggtgatgacaccgaactacagaacttgcgagctatactagggcagatacaatgccacaataacactcttcattacgattagcaagatactagagcaactataatttttttatattaaaaaaagatgccaattcaaagaatggagggatcgagagatagaaagcatgagagcccaacaagaagtgattgacaatcgatccaggcaggttgttgtactgatcaggagagcctaccaactcaccagccaacagccagtatctgatacttacattccccctaggccatagctgggccagaagaacatccagctgaacacactaagcaaacccaagttaatggaccatcaaatacgaggtcactgagtcaaactgtgggtcacatggtagacgagcaagttttgccaacccattacgtaggagggaatggtcaacttaatatctgtccttagacaaaaatactgggccaaccccttgctcacagtagctagacacaaaggcctccaaacaaatcagtctttgactaattaggcaccgtgcacaatcttaggaatgatttgaatcacagaagaggattagacggacaagacatccctcccattgtttagccaaataatattattatgtgcccgacccagttctaagagatcatcatgtgatacaagtcggtcaataagcatgttaagttgatccattagtgcaaacacagataaatcaacttaagagtcttgttcaaggcctgactggcccaaatcacaaatctagaacttgaccaaactagaggatcaccattctcaccaaaaattaatgctctcaacctactgcccaagtttaaaatgctaacatgaaaaatgtacacgggtaaagaagatcctttgtctcacattaaatattttgaaaagaaaatggacttacaagcggtgagaggtgatgtacgacatagaatcttcccagctaccttggcagaggccgcccagtagtggtacttcaagttagctccaaggaagtttaattcgtggaattctttcatgttggagtttcacacagagttctcctcttctcgccagctcccatctcacttagaagacctagtcaaagtgaaacaaataccaatggaaccctcaatgacaaagttcttgaaacgagcagatggatttataaaactcgaagaattagtttgacgtgtggacagagttgggcagaaaaagaatcaacaacacaccattgcagccattacatccgtccaagttctgccgttttcatgtggattacagtcacgacactaacaaatgcaataatgtaaagtgggaaatagagttcctcatcagaaaaataactcgcacttacagaaatatgtcaagaccaatcaaaaataaagagtcgcccaaccaaataacacacaaaaccaattgatgcctccactagtggatggacatcttcaagttatcattggaggcccccacattactggagactcaggcaaagctagagaaaaatatgctcggaccctacaatatgaacacaaagatgcaattttgaccgtagaagaaagaaagcttaagcaaccatgcaatggagaaccagtgatatccttcagcgaggaagattccaaccatgttatctatccgcacaatgaccctttggttgttgatgtttagattgcaaacaaaatggtggcttagaaaatggttgataatggagcttcctcaaatatttttttcaaaacaacatatgaatagatggagcttcacctcaaagatttggttccctacacttagctagtgtacagattctatggtcaaagcgttgctccactcagacagatctgcctatcacttacagtgggacaagctccaacaagcacaatggttatggctcaaattttcgtgatcgttgtgccttctacctttaatgccatgctagaccgactagccttatatgacctgaaggccatcacttcagtagttcacctatgtgtaaaatttccaacgacaaatagagtgggctatttaaaaggaaatcgtaaaaatgggtaagaatgttataatattgctctatctaaggccaaaaatgaagaaagctctggccaaagttcagagaatggtaaaagcatcacccaataggaatttacccaaggcggggatgaagatatggatccctgccttggggaacctaacataaatgttggactagtggaaaaactagaaggagttgaaattgatcccaccatgctgaccaggaagctcaaaatcggcaaaggtctattgcttgaaataaaattagcattgataaaatttgtaagagcaaacctcaatattttggcctggttgcatgaagacatggtcgataaaatccaactataatgtctcatgccctgaacattgatccaaacttttatcccgtctagcagaaacgaagaataacagaaaaagaacgtgcacaaacactaaaagaagaggtagaaaggattcgcataaatagattcataattgaagccttccaacccagcttgggtagcttaccccgtactagtacccaagatgaacaaaaaatggtgagtatgcattaatttcactaacctcaacaagacatgccctaaagactattttccactttcaggaatcgatcaactcgtggatgcaatatagtcggtcatgaaatcctaagctttatggatacctatttggagtataattagataaaaatgcatccacctgaccaagagcacactagtttttgaaaagatgttagtctatactgcaacaaagttatgccatttggcctaaagaatgctcaggctacctaccagaggttagttaacaagatggtcaaggaccagatcgggcgtaacatggaagtttatgttggaattatttaatcaggatctagatttactaacaagtatgtcattaacatcctaaatatgaactt

SEQ ID NO: 17263 - DNA, 4131 bp, Cannabis sativa
aaaaggtgataatagtttttcttagtgtagtatatattaatttatttttcgctaataattttttattgatgactgaatgcagtatactttacttggaccttaaaatattccagtgctaaaatagaaaaccatagaaaatgataatcttaaaagaggattctaatgatacagactacagtatattcatttgaaaaccttatgacacattatttagcatgttgttcaaacgaaaatgaaattcaacactttttgtgatctgtctagactagaggcagtctctctcagcttattaagctttgaccattatagccgtttggttcgctttccccattttcagcatggatttctgtttcattttcttcatgatcatcttcaaaactgtctgcagcatttaggaaacttggctgattggttgaacatagcagccttgcccacattctgtcagttattacaaccttattctgtttctcattaatcctctgtatagaaaaaaaaaacaattatatcattttcactacactaactatatgtatgtatatttgcatagttaaacttacatgaaaaggtatgtaagcatgtcttccattaacagggccaactgtgaaaccagtataccctgccattgcaccatgtacagcactctgagcaaggagtgtgcaggaaacgttatcagatgcgttgcttggaactgctcggatcatgtaagtgggatctgcagcatcacatcactttgttaagcttcatataagaaagaatgaaaataccccctttcttttaacttacctatatatttgaggtttatattaatattttgttgtgttgagaagtgatcctgcattacaaaacaataaattaaattaagatagaaagctaggggaaacatgcattttaagagtttatcaacaactgagctttgttggttgcttttgtctatgttattgtaccttgattttctgtgttaaccacagaccaacatctttaagtagtttatttccagaagcatcttgctggttaatgttacgagtattctcagaaagattttcttgtcctgctccttcagccaccactattaccatgtgtccattctcttgaagtcttcttttgatgtattcgaataggcctccaggtccttcgaggtagaacggggactctggtatcaagcaacaatcaacatctctgcttgcaagagtagcatgcattgctatgaatcctgtttcacttaaaaattcatcagatgacaacattcatgtagagattagtactgtggtgtggtgtggcgaacgtaaaatttaactgaccgctatggcgtcccatcaacttgacaaggccaatgcaattctcgaagctttcagcttcaacatgagctgcgttgatagctcgttgagcttcctcaacggcagtgtcaaaaccgaaggacttatctataacctgaatcaggataatgtgaatattgagtgtgacacatttgtgaattgaaaaataagattgaccatgttatgaaaaggtaccggaatgtcattgtctatagtttttggaattccagccactgcaactttaaggccacgcctcctgatttcctacagaatatcatttcttggtcaatttcactgaatagtgtaaagatttgtttaggtgatcttcaaactgaaacttacctcaaaaatcactgaaacccccttttgagttccatctcctccaattatgtaaacctgaggtccatcaggttgagttttttaatgagtttatagagttgtatttgtacaaggctctttaagtagaaaaggaagaacaaaaagaaaaacaagcctgattgatgcctcgatcttgaatgctgtcaactatttttgatttgtcatgacctccacgtgatgttccaagaatggtgccaccacgtttatgaatgtcattgacaatttttggggttaaagggattgtgtttcttgaatagaagcctttgtatcctccctacattatgaaaacaatatatgtatcattttcactatttgtagtagaactacggataatgtcttatattgtaatcctttacctcaatcccaagaactgtgttaactccatacatgtggtgtaaaccacatactatctccctgatcactgtgtttagaccagggcatagacccccacatgtgactatacaagcgtgcacttcatctgattgaaaatacacctaaccaacaaaacaagttgatcatgcatcacttcgttttcttcctagatcaacttactacagaagatgagaaaaactaaaaccttttgacgaggcccagctcgccgaaagtgtgtcccccttggaccgttcttctggacaacaacctttatatacaaaggaaaactcaataaaattataacaaactctattaaagttctttgaaaaaacaacttttgagtcaacaaaaaagtgaaaaacaaacggatgagaatattattcaccttgtgggccactgtatcatccacatcaacaaagtattgcctgttcaaaacatcaaatttaacggtcagttcagttgggttccaaaattaatactttaaatttcattaaaacaaaacagaacaactcacttaacggctgagtacgaaggattatcttgtaatggatttggatgagtctgcaaaaaagaaaaacataagaaagataattaaggaaacacgacagaggttgctttattacgaggaacaatagaagtgaaagagttacaaacagggagatgatttaggtaatcggataggtggggaatatcttcaagaacgtagccggcttcaccggtttcgattttaggatcagagttgattaaaagtcccatttctggagtggaattggagtgagagtgggagttgttgttgaagcttgaatttgaaaaggttcgaatataatgtttgtgattagtggtgtgatctgggtaagagttggttggatcaaagcaccgaaaccttggtgttgatagagaattagagctagatattctgtccattaatggatgatgacactacaactctacaacaaaactctctctcagtttaagtagtcaagctttggaagtatcgagtccacactaaaattctgctggaaccaccgcctatttgtatatatatccacttgctaagagtttactttctaaaaatatatgaattaaaccaaattaaattatatgaacccatcttaaatacttattaatgatgctttttttttgagttgacatatttgaataaacatattgtatggataccaattttaaaatcacatgattgttcatatatttggaaaggagaagaaaaaagatgtggttatgatcgagggaggatgacatcgaaaggcatgcttgtgaaaatgtgactcatggtccatgctatgctattacatctgtatctctaatttaatgcatgataagccttgataaatactaccatgaccgccactttttatttataatataaattagtttcttctaataccaatgattatccttttaaatgacgttcttgaagctaccttggcatgtttaataagggaaagagttcagcattaaaaaattattatgacgttcaactcaaagagtttggtcatgtttttctatttattaataaggaaaggaaaaaccgatcgtagatccttaagaacatcctttaaagattctcctatcaacattttatttatttatttcataaaacagaagatccttgaagattctattgagaaacaatttttgagtctctttattatttactattttaaacaactatacaaacttattataacactaaaagctgcttaatgcttattaattatgaaacatttccttttaaaacaaatgaataaattttggaacttttcaaatgagttaaaacaatgtgtacacgtgttagcaaaacaatttttttttttaattatatagataccacagagaaaccctgtaacaatataaatattaatttagtatataaataaaaagccttataaagtaattcattttaacgatttttcatacaagttttatggtatttgtgtgagtggtttttttaattaaggtctttttatttatttttggattggataatctacttttcatagattttttttaaataacacttttcatagatgaatacacttgaaaacat

SEQ ID NO: 17264 - DNA, 6041 bp, Cannabis sativa
ggcctcccttatttgcacttttgctgacaattatgttcaacaatacattaattcctctttgcagcaaacctcattagagtcaagctcttctgctcagtcttgttcaagcagtatggagcaaaataatgggaacacttgtcctactgtcacagtcaaatgatttcctccgcctgctggtttttttaaattaaatgtggatgtcgcatatgatgctgctggggcagttattggtcttggggcagtgatccgagattattttggcaatgttgttggggccttctccaaacctttgcacgggtgctattcggtgaaggaaatggaagctatggggattattcacagtttgcattgggctaggaataacggtttgcacatacactttatagagacaaattctcttattgttgcaaatgctatcaacaaaggatcttctactacccatgtgtctcttttttatgatcttattgatgatatttctcttttattgtccttctttcttggagtttcagtttcgcatgtaaagcgtgatgctaataaagcagcgcatgaattagcgaaatatgctcttcgattggataataattgttcttggttgggggaaattccttctccaatccactctgttattgttatggattctattcaataataataataatagtattctctctccaaaaaaaaaaaaaaaccatttgtttttttttcaatagtttatgattttaaaaagagagcaaaaaggtctagtttcgtgcgtgcttctttctttttgcacacatgtaactgaatatttaaattttatttttgacattataaattttttaagaacatgtggaatgtttactataattataattagggtgttcatccaatccaatctacactgttttattcatagtgcatcctattcgcactacatgtagattttatattttgaatccaatctagtccgcataatagctcaaattcaatgtaatacaatccgcaaaagtacgaattggataagttatttcagatttattactttttaatattaaattatttaatatttactaaaaatatatatattttttcaaataaattagtattgttttatgtctctaacaataaataaaataatataaaataaaaaataaaaaattcataaaaagaaaaaaattatatgtagaaatattttaattttgtttgaattgtatgtagcaaaaaataaattatatataagaatcgaatatatatttgatctattaagttttgaaatatttttattatacatattatatttttaaattactatttttttttacattaaaatatcgattgtatacataatttataaaaaattaatataaatatgtgtggattggtttatattagttatttttacatgttaatcaacatccaatctacacaagtacgaattttagatttttcaattcgatctgcactttgcagattggattggatcaaatcgtgtagattcgattggatttgatattttataaacacccctaacttcaatgtacgcagttatatatgaatttttttgttatgaattacgatatgtatgaatgttatgttttccgtattttaagtccgataatagtggaatgcgacagttggcctatagagtcacttacagaagatagtatattttggttttagcggggcaatatttttttaaacatttgaaatatcgggagtgtttggggttttggtttaggactattttacccctaattgttggttactttattcctatgcaaggggtagatttgtcatttcacccaactttgtcttttgttaaattagtgggtttttaattaaactcaagttttattagatagatatatgctaaaattaggattgatgatccttttatttacttagaaaaattaaattttgggttatcactctctctttgggtcgatcatacaagtaaggaaaactagattttctgatcccttttctaaggaattaggggatcatttgagctaggtttttcatattattgatggtaattcttcttcttctttccttgtgattttagatagttaagttaagtttccatggttcagttgcacaatattatacgaagttacgttaacacgcctatttagtaagatgttacataatttgtgaaccaagcaatataaaataatttttaaatttttattaattaataaaaatattatattgaaattaagttttatttatggcataaaactcaaacaattttataattgatgatatatggtattgtattttgaaacatttctaggctttagaaatcactatgaatgttgggatcatgaatacctgattatactttagcattggtctttaacatagaggatgaaagtgtgtgttggctcatgtattacaagtacagattaataaattgttaattaattatgttttcttcttgagtcttcaactaaaaaatgatttatggtgctagtaaaagaaaggccaaaagttagcaagaataagttggagaactttgacagatgatctacatattcagccaacttcacctaggtgattgggcctcttggaagactgttatcaaaagtcttaattttgtcgtataggtcaacttttgagtttatgttgataaattaacttttaaactttatttttgggatcccaagtcttttaaattttataaataagtcttttccattaatttttttttttttggaaattaccttatatgttatttttctttatttatttttttttttcaaatttacggtttggatttctaaagtggttgcagccctagttataaatatgttgcagcgctagttgccatagaaatttttatgtaaaatttcttaaaaatataaaaaaaaactgttttgtataaaaataaaaaaactccctaattttttttaattattacgggtgttagttcttataaaaataattttaaaagtaaaaaattccttgcttatcaaagttattaaaaacttaaaaaagtaatatttctatctaagaagtttactacaataaaccattttgacatttctataaaaatatctgcataaaaaaatatctcaagatacaaagaaaaaaaaaaaaaacaatagaaggagatgatgagtttacatcatactagttataactataactaatttataaacttagtagtctgtgaaacgatagtgataaggtactcaatctcatcggcgacctccttcatcgatggtcgattctgtcgttgatcgttcaaacaagccgccgccaacaaccccaatgccttcattgtctccaactcaatctttgaacttccttctttcagcatcggatccactgcttccatcaatctctcttcctttatcatcttcttcacatacacagccagattcacatcctcctcatctctattgaaatcgattgctttcatggccgtcaaaatctctagcaacaccaccccaaaactatacacatcgctcttatcagttagttggaagtttcgatggtattctggatctaaataacccaatgtcccttgagcacaagtgaaaatattattatcctctatttcactattattattgttagttttgctttgttgttcttcaaccaatctggagagtccaaaatcggagatctttgcatcatgcttctcgtctagcaagatattgcttgatttgacatcacggtggtagattggaggcatggcggccgagtggaggtaagctaggccttctgcagtttgatgagcgatttggaggcgaaggatccacttgatcggagaaaactttttggagctatgacaatggaggtggtcaaaaagagtaccattggggataaattcagagatcaagagaggaagatcaagatctacacaacaaccgaggagacgcaccaatctacggtggtttacttgacagaggatccttacctcatttaggatctgctcagttcctttggtatttccgaacttggcgcgtttgatggcggtgatggttccgtcgtcaaagattcctttgaagacctcaccgaagccaccggagccgacgagattggacttgcaaaagttgttagtggctttgatgatctcttttccggtgaagattctggcagatttgccacttgttttggattggagactgagttctcgctctttgactagagtttttattgcttctttcttcgaattcgattggtttagttttttgtacaacaaaattcccatcactattatggttggtactactccacaaactgctcccgccaaaactgtgttgaggaaaaaaaaaaaatcaattaagagtactcctaatagtttctatggtgtttaaaataaattattataatttttgtttttccattttacctcaaatttctactttagacctttagaccttaagtttctattttacatgcatcaacttcactttagctaagtaatttcctcttcgattggataaatatattttttggttgggataaattttctccccaatctactctgttaatattaatgactctcaattttaataataacaattttttctaaaaaaaaaaaagaaaaaacttcactttaatttttcatctacatcaaataaatattataaggtaattttatgatatatgtattattatacctaaaagatatatgtatatataaaaaataaaattaaaattttactctttttttttcttaaatttatggatccaattatatttaatacatactgaatctttagataaatatgatctgatctaaaaatgttatatttaaaatattagataaatttaaaataaagcaataaatatatataaaatacattaaatcgatacaaccaatgcaatttaacatccaataaatattgaatcgattggataattaaaattaattagattagataataaatctaatatatataaacttaaaaatattgaatgtatccaacaaacatccctaacaataataataattaaaagaaaagtacttaccagcaatcttcttagactttttcttcttcataattttgcacccctttccatgtcgatcaatactgcacttcgcagctatatgaattaatagaaaaggagttataattagtgtggtggcattattgtattattaaagagaaatcatataggaataatagtatttttcctctaattataaatctggtggaattttatattttttaatttgttattatgttatgaaaattatcatcaagctatataaaactcttaataaatgtccaattattatattctactttttttttataaaaagaaaattatttatgtaattatataggccacatacatagttgctccaatccatttatttatttatggagctagctaaaatattttaattcatacataaatgttttgtcaattctaactacgccaaattagctagtgtacattaaagccatatcaacacaaattgttgagaaaaatagaatgtaaccaaaaaaagatgtttgcaagttttccaaaaaaaaaaaaaaagataaagaaaaagatgtttgcaacaatttctaagactacaagaaattcagcattaaattttatttattcatcattttctcttattatattataattagattgatggtacattgtcgttacatacaatggacaacttacttatatgtttagttttttttcttcttttaatttgataatgaattttaatttttaacttatattagataaagacggaatttaattaaataaataatattattatgtttgatatagaattttaaataaaaaaacatatacatatataataaaaacaaagttttttcattatacttttttttttcttaaaattacaattacatgagattttacataaaaatatgaaagtaaaaagagtactaagtaacactgtaacagtaatctattttagaaatccattactctattgagagtataaatcttatatttttttttgaaagaatataaatcttatataaatattatttcttcatgcatatgtgatcattcattagaaatctatgagagtataaatcttatatataaatattatttcttcatgc

SEQ ID NO: 17265 - DNA, 5267 bp, Cannabis sativa
tctctctctctctctctcctaaacttcatcgccatagctatccgaagagatcagcatgcgagcttgaatgtccagagaaaggtaagtgtactattacaaatctcttaatcaataatattacacctctttattcttataatacattaattatgtatgtattaataattacttttttccataaatatgtatgatatttttgtctgtatttattaatcatatagtcgtcatcaatattatggatcatttaatgatgtagttgttgtgttttattataaactagggagagatttgatgaaataggaaagaagataaagagagaatattcagcatcatcatcatcatcaacatcaacagatgcagggggaggccataatcatcatcatcaacaacaacagcaacaaatgggaagaagacacatgttgggtcctccaggaaccctaaacaccattactccatgcgccgcctgtaagctcttgagacgaagatgtgcccaagagtgtcctttctctccttacttctctccccatgaaccccacaagtttgcttccgtccacaaagtctttggagccagcaacgtctcaaagatgcttatggtacgtacgtaatatttataaatcaatattaatttaaactaattaaccaagttatcagtttatgttataattaataattaaatatcaaatgatttctatatataggaggtgccggagaatcaaagagcagatgcagcaaatagccttgtttatgaagctaacgtgagactaagagatccggtatacggatgcatgggtgcaatttcggctttgcaacaacaagttcaatctttacaagctgagcttaatgcggtcagggctgagatacttagaaacaaatatagagatcatcaacctaataataataataacaatcataataataataataataatataactcctaattctactacttcttcttcttctcttcatcatcatcttcaacaacatcttgctttgctatcttcttcttcttctaataataattctcatggggcggctgtttcggttgctgctctaccgccggtgggagccataccacaaccaccaccacaacaaccgcctccactgtctcaaatatccacagtacaatctcttcctattgctactactactacttcctcctcctcttctatgtacacgcaaattactacggctgatcaggattataacactatttcaagtgaaaatgttcccttttttggttaattaattattattcacgatatatacctatttatttatttatatatatccccccattttctatattaattatattatgaataaccactgaaataaaaacaaggaacatataattcggtcggattcattgggcttaattatatgtatatattcagtccacatgcattgtgtacatatatatataatatttgttggttaatatatgtctattaactaatccttaaatttttttttctggcttacgagaggtccagtactctttgccgatgtctacttgataacatattgttatttattgtacaatatgaatgatttcttaaaaaataccatattcttagttcattttccattaattcagatgtaatacatacacggtagtttaagcattaaagcatgaagagtgcaacacaagcgtattttcacgtggtatactgatcatataatatatattaaacacttaatatatatatacataaattgcataattcaggttttttttttctttttcgcttccatattattctttaagtccagcttgccatatatatatatatatatatatatatattctcatctcattcgttcatactatagtttccactactggtcacatgcactattataggagatatgcatgcaatgtgcatggttgacatatatgcatatgcatgtgtacatgcagcagtataaatatatatttttttatatatgaaaattgcttttaagtgttagtgatagcttaatagtggttaaatatattttattaaagttattacattcaatagagatatgttcacgttaaatggtactacacaccattaataccatatagtatttttcttctaatatcatcaagctctgatcttaatatatatattatgtgtttgtaactagtataattacccatttgtttccttttttctacttttcatggcttgacttttcaaatacattactagttaagaatgtgtacatcatcaatccgtatttcaagttgtattaaatatatatacatattctctcaatatatatatatcaccttacttatatatatatcacttaaccttaaggtcttaaggtgtacaataccatagcgatgtgtgccttataattaattagcaattttttatattatttattaatttaagatgtgtaatatcagataataattgcactaataattatatgatatctttctagtgcttgagactttaatgtgttttttagtatttctctacacataattcatgaccgtaacttaatttgagtacttctattcttcatgactgctagatgtttaggacgacatgaacacttctacagaatttttcaatatgagcacattcatcacgattagaattttttggactaccgatttatatctttttttatatgatcacactctgttagcgtgttttcaaatctgcagaaaatgttagaaaaaaaataattaatttaaaggcctcgtgaattaaatcaggattaaattctgacaagtcatgatgataatcagatcataaatttaatatcacttcttgaatatttgttgataattgtaaagatgagaagtacacagctagcagaagattataaatgattaattaagaagtgctttatttatttacttatcattgctaggaaatggcctgcgtgggaactagtttttggagtttttatatatgtataagagaataataaaaacaaaccctacaaggacctaactatgttgccactattttaagtaacaacattttgtgaagtagatggatcgtgtgtattaatatgtatttgttgtgtagtagtagtctttgccagccatatatatatatatatatatatatatataagttgtttactgaatatatgtttggtttctttggcgtgtacatttcagtctgagagaggtggattggggaggaaaagaaataactccataagatgtatctttttcttttatctatatataggggtaccactactagtcactataatagatatagattttaatcactctgtaagtataattcttaattcttgctttggataggccataggtggacacgtgcaagcatgcaaggagtagtttgaattctaattttagattataaaatgtttgaatttaattaatacttaaaaattaaaatacctataaataataagttaaaataatcaccactcaataattgttaattaatttatgatttttttgaaagcaatttatgatcttaatttatatataatttataatcacagtgcttttcacaagcatatgctttcagatttttctttcgttaggtccttatatcggactactttcatttattttttgtttcttgatataatctgttaatattaaatatattaataatacataactttcttttttaaatgttaaattaaatatatagttgaacaaattattaaatgccagcaaaaaagattcgacccaggtgctagcctttataaatataacatatgtatatatatttatatatatatttatacaaaatatgggtctttttcattaaactttcccgagcccagatatatagatagatgtgatggaattcggtcttctgtcatggttgcttaagataatggattcatgtttgtctttgtatatacagcatctttcaatatattacacttattcaaatatttccaaacttacggaaaagaaaagatatacatgtataaatttaatttcttaatcacactgatcgagtttgattaaatatatattgataaactaaaagcttaaagaataatattaaactgcacatagatttatatatcacaactaatattataggttggagtggtatttataggccgtgtttgtgttttttcaagacttagttatacaattaaattttaaacacatttattaaccgtttcaaaaattaaaattaaaatcccacttatttataaatgagttaacctgacctaacccacttaatacatttatataaaaagccatgtttaaattaatatatttatctcttatttaattaacataatatagttttcatataataaatatatatgtgtaattgtcatacatcaattttagattaagaataattgcttaaagatattattgatgcttaatattttctttggtatcatactgtaattggtataattaagcatcgaatctcatataacttagcaaatagttttcaaagaatattactaactatgagaaaagagatcagaaagaaacagagaaaaatcaaaatttttagtattattgatactcaactgattttacaattggaggagagagcttatatagctcggtttggatcaagaatctattggttaaaactaaccaatttgtaatagaaagagtacagctgtaacaaccatatctaactaacaaaactaccctaactaactaatctaaagttgattctatgttggagaagtgagtaggcagtagagctttggtgaatatgcaaacaaggttgttttgtcaagatacatgaaggagcttgatcgagccttgttggaccttctctctgatgaagtggcagtcaatctccacgtgctttgtgcgttcatggtattctcactaatgtgaatggcctggtgttgtcataatagagcagtggtgtaggcatgtcaaaacgatccatttagttggagcgggttggagctccgacctgacagatcacctctaatccaaaacagactcggaccgagacccagaccgagacccgagacccgtacccaaactaggacccgaacccagacccaggacccggacccggtcttggacccgggacccgagaccaaacacttggacttggaccggaacccgaaacctggacccgggacctggacccggacccaaacctggacttgggacacgagacctggacccggaccccaactgggacccagactcggactcggaaccgggttctggaccaaaacccagacccgaacccgagacctggacccggaccaaggacctcggaccgggaccgggaccaggacaaagacccggagacggacccg

SEQ ID NO: 17266 - DNA, 4733 bp, Cannabis sativa
tttattaaaattttatttagccacactctatagcgtcgattgtttattattaagttgaaaaaaatcgtctctaaaggcttgttttgtagtagtagattgaaactttcgtctgatgcgattaaccacccagcaatgtttgtctaatgcaaccttcggtcaacaacaaccacccagcaaccaccaagcaaccttcgattctgtaagtgatagtgtaagaggtattatgatgattaaaagcacataaaatatataaatgttgtccacaccttataaaagtatttttgtaattaaagtatcaatttgtatttttcatatagtaattcctaataaaattaaaaaatttatatgaaagtttttttttcaatccaataatacaatagttagattgaaattttttaaatgtgtgaaattttgagaatacaatttgttacatctaatttttttttaaaaaaaaatcttaattaacaaaaaaaaaaatagaaacgtcctttccttttctagtttccctcctaatcgtataatgaagagtgaagagtcatttaaaaatcaataaaatattgtaatattgaatattgaaatgaaaaaaatatatatatgtatatatatgttttaaaaaacacgacacgagagatcaaattagtagcttagctgggtgtgtgaggactttgactgtgtggaactgggagagattttagtgtgagggaaattccgcctcgccatgacttctccaacccattctcagtctcaagatcaaaccttgcattcaaaaaaccctgatccacctcaaaacgatgactctcaggttgactcaatttctcaatttcaatcatctaaaaccctaaccctagaatccccgactccctctctctcaatcatctaaaatcataataaccctagaatccccgaatccccccaacccagatcaccatcagacccaccaagacccaggcaatcgccaaaaccctcttgatctcgatcaaaacgacgacgaggtcgacgactcagaagaccttccggctccatctcctcgaaccagcgagagcaatctcatgccctcaccggcggctactgccttagctacacccagcattacctctgtctatcgtcgtggtgcgaagcggaagaagattggtaataagagaagggttcaggagaggaagtccttgcagaagcttgaagttctcaaacaaaagctcaggcccattccctttgtacccgttaaaagtctggacttttcgagtcacgagaagcttttaaagcggcttggcttgtgggatttcgttcacatggagtttgatcggtttatacgaggcgatttgcttgctcaattgattgctaatttcaatcttcctcagcgatgtagctatgtatgtggggctcgagttttggtcaaccgggccgatttggcgcgtgctttgaagcttccggtgaagaaagtagcagtatctgatgaaaccgacgaggctccgatagcgacggaggaatcaattgcgtttcttgaggagttcgtttccaattggcttcttttacatgacgagctatggatgatgccgaatgagatcctgaattggacaaaagctattaaagatgggagcttcgagaaagttgactgggctggaatgatatggttcatgatcgagaaggagttgatgcaggcgccaacgcttactgattgttattacgcctctcacttgcagcgcctgataaaatcacagcgtggagatttacttttgagtgaagtgcctaaggttgagattgatattgatttgaaggaggatacggatgatttcaaagaggaagaggaggatcacacaggtaatgtcaaaatatccggggaaggtgagggggatcacaaagaggatgtcaaaatgtctggggaaggcgatttgtgtggtcaaggattggaggaggctggtcaagcattagaggaaagcagtcatgaattacaggaacatggccacgaagtgatggaacacagccagtcattggaagacagcattcaggtattagaagaaagtcgccatgaattagaagaacacaacattgaattgagtcttgggcaggataatatggttgagaaacctgatgcccaaaaggaacaagttgcagatgtaagcacaatggattttgagggatgtaaagaagaggagcatggtcaatggtttatggatcagaagaacaatgtgagtgagtttttgagacaatgtaatcatagtgaacttaaggaggagttggatgttgaggatgaagggaaacatgaagaatatgatttagaaataggacaagagcaagaacatcaagatgttgttgaaccagaagaggacgatgatgaggaggaagagatggaggagcaaggagggcaggatggatgttttcacttttcgccgaaaagcatgggaatggatggtttggcttcaggaggtcttgctcaatcaattgatgcagctgatataagtcttggttcagggatgccactccgtgaccctttagcaggggattttcttcctcctagaaatgatactccaatgacatctcattttggaaatggtagtaagagggagcttggaatgataaatgatggctctcatcacccgctcaatgctaataagcgcttgaggatggatggttcttgggataatggtaagtcatcgtctgatacagatagtgattttgatcaaatgattcagacattggtgaagctaaagagtacttctgctgaaaaggagcacgcccttcaggaggctaatgtgaatcagcagattttaatggatgagttgcagaagcgggaaaacatgattcagcatatgaataaggtcagttatgaggaggaacataagagacgaatggaggtttatcgtcttgaacgagagctgtatctaatgagcagtctggtggatggttataagaaggctcttaaggaaacacatagggcatttgctgaatacagagaacgctgtccacagcttgatgaaccgctttataaggatgttgctgggtctggtggtcttgttttaagcaccattgaactggagaagcagcgtctcaaacgtgaagaagaagagagaaggattaagctcgaaattgagatgagggttaataactttggagattggtggtcttgcgagttcacaggtaatttggagagtgttgatgcattggccaacaagttgttgaatttggagaatgaaacaaaactcctgaaggagtcttttgcaagccgcagggtgtcagaaacaatagaacctgcttccaatgacttggaacttgctcaaaaagtctcggaacctcctcaagaagtctcaggacttgctccagaatctgctcaaaaggactcagaagctgctccagaatatgctcaaaaggactcagaacttgcagcagaatctgctcaaaaggactcagagcttgctcgagaatctgctgaaaaggacttggaacttgctcctgaatctgtggaaagggacttagagcctgcccaagaagctgttgaaatggacatagaactagctctagagaacacgaaacttgctcaaaaggactcagagcttgctccaatggacgcggagcctgctgaaattgatgcagaacttgccccggaacctgctcaaaatgactcagcacctgctcaaaatgattcagaacttgctccggaacctcctcaagcagagtcgtaagctgcattctgaatctgtcgttttggtataatagtgtatagaaatgcacatctgttgatggtattattttgtcaagttatctaacttcgtccatgtttaggtgccctttggcactttatattctgatgtagtcgtacatggcaataggctttcttattttacaagtaaaaggaaagaggaagtaggaatctttaactggtgcttctttgatgctcggatttctttctttttattttcattgatatattatgatgaaacggttgcataattcacctccttatttgtatagcatgtaactacagtctcatagtgtttgttttgctaatttccagatctttgatgcacaagcgtttgacactttgacatttgcatttccaccttatgagttatgagtcatgagaagtggttatcttgtatttcgtttgtcatgatatagcaaacaatctctgaaaatcaactctttgacatacattgacttgagtatgttattatattattgctcttcttgttacttttttatatgggtcctggtgaaatgtctcctttttgccatactatcatgaatcttagttgacacatttaacagataacggaattgcaaaagcactcaagagaatcgcctggctaccttttattatataattttagcttttagctcattttatttaaatagcttttatgctagttcatagtttgagttggtgtgtttttcattcagttgaagtcctttgctggtaataactgataattcttgttatagtttgagttggtgtgtttttctttcttctacactggctgtaatctaattctttattgctgcttgagcttatttgtttcttcaatctatgtaattcgatgcattaatacacgtgttacaaaatattatttggtgtataaaatgagtgtacctagaaaacaaaatttataagaaagtctcatgatagacaactgaaggtgacgacctgtgttaacaagaatcttgaattgttcttcttggtaatgcttttattttaaaccattaccttcctcacagtaataccttacactgaatgatgatgt

SEQ ID NO: 17267 - DNA, 4826 bp, Cannabis sativa
aaaaaaaaaaaaaaactgaaaatgtgaacgtatgctgctctgtatcattgtaacttttatcaaccatgtcttcgttgcagctgtttatggtttctcctcaactaaacagtttgacttttgattactaacaaaacttggtaatataattgctgataaacactttttggttattcaaaatgatttacacgaaattcaatttaggtttcagagatcaatattgttattgatgtattatatttaccgtaactgtatgaacactgaacacagggtgagttttggtgaagcatttagaaaagagtaataataacaatatgaaattctagttaggacttatccgaaaattccttgtcatattcaactagaagtgtcaaaattaatctctatggaccaagaggagacaccaaaattaatgcctatggacccaaagatattaatattatatatatttctctttcagatacacgcagatttctggaagcagcaaattgttacatttacacactaaacagagtttatgaagcagcagatacaattaatgaaaataaaagcaaaaacaaacgtatataatatggtatatctccagtgaaatacttcaagctgtgaaaattctcaaagtacacaaaatacacaatctaacatactgaagaaacatatttagcgttctctcacaagcacccaacttgaaatccaagtaggggttagcttccatggagaatgccgtcttgtcctgccaatattttgtgcttagcagcttcggttcttgcacttctccatggcccttggagctgtagccaaagaacaacaacaacttcgttataaagaaaaaataaaccaatttataagataatgtgtaaaatagaaaaaaaagcatgagatattgaagtaagcattttaggataaataccaagtccaatagcctcggaacctttcattatcctcaatcgtctacatgtatcagtgaacatcctgttaaaaacaaaagcaatggaaaatttagataaaaataattaatggttgactctttacagcaagtgtaatatatgaagaggcttaaactcttcttattaagtccaaaaatatcataatctaataaatagcctactctataaggcagatattctgagtcttagtacaaaacatataattccaagaagggtcacgaattatacaaaatcacaaaaaggggaagaaacacttactcccaagggacatcaccaaccagcatccagtccccatccttgtcttcgtaagtaaccacatattcagaatcagaaccatggagaagatccatcaaacggctctcagttaatccatttcgctctggaagaccaggagaactgcactgacctgtatcagtcattagaagttaaagtaaatgactggaaatatacatagaacaaactcaagactataaatagctaatacagttgctttaaaatatttatatatagacagatagaaatacagagagaaaaagagaggggttaccaattgtaaaggagctgaacatcttctcaagagctaaggagagttccagatagttagtacatgttttaaggtcaactttccgtaggtatggagcaccgtccatactgaccttaacataaagacatcccaatccagatttctcctcagtatcttcgttagtttttgacaagttagaagccatggtgttctttcgaaatgatcgaattggtggccatcctaccacttgtgccctgttacaaaaatatggttttatgctcaaagagtcagaacttgattcgtaaaattcaacacaaagagacaagaccaacttggtaaagaattcaaactcagtcagtattattactttctaaacaaaacaatacaagtacatcaaagggtacaccataaaaatcaatattatttaagcaagaaaatcaaccccaatatataaatggagtgaactaatctaacagcacagcaatacaagtcacctctcatacatgaaaatagctaggagaagcaacataatatgaacacaattaaacttccacttattttctttcggtattagcttaaattatcagcactcaaacctgtcaaagactaaagagaaacgattaagaaatgaataggatggatgaaattacttggcagcaggagcactggtgtggtcagaaacctgtggctttttctcctgtgctgactttggaacaacatctttcatggttggtgtagaagagcatgactgctgattctccaaaccaccacgaggtttccctccatgcccacctccggtagaaggaaaaacagctccttttcccaaatcagcatcagatccattagagacagaaaaaacccatttgtcagaggagccgtcaatggcgtcagagaaacctctcttaacaccagtctcaaagttctttgacacgtttggagaatacccattatgcttttcctccaaatctttaccaaaaagggagaccccgaatcccggttttctttcaggagactgggaaccaggcaagccgagtcttagctcagtctctttgaggttacaagcagagctcttctcatccgaaagagtagaagaagaagatgatgaaagcttgtcagagcttttttccatggtagaaggctctgttaagcctatgtaatcatgttcaagtggcgtaggcatcaaaatgacctcaaatggaatgccctcaaaaaaaaatgaataaagcttcaaagttcaaagcagctgaggaatcgaaaagaagaagaagaacaacaaaagtagcttaatcagaactgaaaaacagagatacccagatagagagaggaagactaggatagtaggcactatgattagctctatgctctaatttagaactgtgctttttttgttcttgttttcaatatatataatattttggttgatacaaaagagaaccttctttggccaatctataacttacacccttttcttagttttaccattaaataaaaataacaataactcattaattttcgttaggtttgctactacaataataacccttttctttggtcttctgaacaatgatgttaactagttatctgtatataaatataaaagaaaaatacatcgtactgcgaatgtgttgatttatttattttcaatgtaaaagaaagtagaagaaaaaaaaaaagaaaagatatagcaccgacaagtcacagagtattccccggcaaccttttagatactgttcccatatctctattactttagtgccccaaaactaaactattacatccttttccccacgcccttttcttacctttcaaatattttgaaagaaaaaaaaaatacaccaagaaagtgactacacgagaaggaacaacaactcttttattttaaggaaaatggtaagggtgatattaaagtgttgtatattaatatgggaccttatacattttttttatagagtgatgtgaatcacaaaaagataaatatatccaactaattgtctagttaaaaggtacacaaaatcaaaatataaaaccacttatataaaaatcaagctacccaaaaattttaggaaaaaaacaactatagaccatccgaaaaatgtgccattatctattaaaaatataccattataaataaaaaatttatttaacttacaaaataaatagataaagtataaaattaattaacacactaaacaaacaagatgataaaaaaaatttatataagaaaaaaatactcaataattttttttacaagaaataaaatttaacaagaaaaatttatcttttaaaaacttcttgaataaaatattgtcacgagattaataagtttctcttccaaggaagaaaatattaaataatgaaacgcctacaaccacaaaaatattaatgcaaaaattagcacactaacattaataatgataaaattaaaaatatttagcaataaaataaggtaactcaaatagtaagttaaacttatctttaatgattctatgactttcaattaaaaaattcacctctgtcaaaatataataagtacattcaattaacacataattatttatgagagcttaaaaataatactatattatattacaaaaaaaaataactcaaattatactttttttaaaaaaaaaaaaattatttgagaaattctatgtgattctttgataagagattatagactcaaatatgtcgaaaaaatatagcattatcaaccaaaagttttaaagtcgacataaattgacacattgcaacaacgatacaattaaatcaaccaaaacaatgtggcaatcccgcaaaaataggtacttagacattaaattaataaaatagccatgtacgtcttcaatggcaacgaagacgatcatgacaacactcctaacaatggcctcgtcctgcctcctttggaggagatgcactaaaaaggtttcgctcgccgcgaatggcgccaacgaaggattgacgaaccctaatgacaacgaataactctctctatgtaacaatcgacgattacagacgctattctcacaactttggaggaaaattttgtttcaccactcctcgcctcatcatcaaatctcttcccttgtccctaagtttcaaagttaggtatgggttttatttggatcaatcaaaaattatcttccccccatctattatcaactctgaatttggatgtgtgacactaacacacattggtacggtgttagaagcgacattagaatacttttgctttgttttggagtacttttataattatttattgcagtgatttaaaatatgtatatttaatagggtaaatagtggcataagtactcaaaggtttatgtttgtaagcggcataaactaatgtataagtacccaat

SEQ ID NO: 17268 - DNA, 10048 bp, Cannabis sativa
attcaacactttaatttcctaattataattaacaaaaaagctagtgacattatttaattcaataacaaaatattttttccagcaaaaaaaagaacactaaaaatataaaaccatcagcaccaaagagaagtattaattttaattattgaattcaagcaaagtcaatcctaaatcaatggtttcattatgaagaaggccacttggaaaatgctagttaaactaagaaactacacatgcaatcaattacaaacttttcaatcaataaagaagagacttaaaaagataataaagcaattgaagtaattaactaattaggtgattaattaacattaattattaataattagaatgaaacagagggtgcatggcattggtacagaaacctctggccttccatttcaagtagttgtaactcaaacgctgccggaagcggtcattccttttagcttggttttagttccgctgtctttgtccatttttgaccaatttaatttattatattaacgcgtgaatatacatattatttttatatatataagcacatacgaacctcattttcttgtagccatcaactgaaactgttctctgctttttcgtctactgctctgttctcggtcagaaaacagagtaggaagacagaaaaagaaatcatattattgaaacacaacccattatatatagagagagagattgcattgagagataatcagtgggaaatattcatcatcaagtaaagtttcttgctttgtagttttttctactctgtaagtttggagtgtaagtctaaactagttttttaatttctactacttgtttgttgttgttcattgtgatcatcataaaaaaaagccagtacgtgggtctatctttttgatcatcaaactcatcactgacgaccactactccacctctttcacacatttatctataacgtaatccataagccaaaaaccaaacccaaaaacatatatttcaatagaacaaagtcgtgtccttttcgcaaactcattacacacacatatacatatatatataaatatatatatacaagtgtagtgaacttggagctgtaaaccaaaaaaatggagcaactttcatcaacgacaatcattcctgatgcgtttcaaagcgctagaaacgatctcacaggccaaatatctttggtttgggagcaagcgaaggcgcctttgatcgttcccacgttgaggcttttggttttcgtttgtttggccatgtctgtgatgcttttcattgagaaggtttatatgggtgttgttattacgtttgttaagctatttagacgaagacctgagaaacggtacaaatgggagcccattagagatgatgttgagcttgggaattctgcttatcccatggttcttgttcaaataccaatgtacaatgaaagagaggtactttttcttcttctatgattaaccactaaatttgtataaataaaaaattatatatttataataataataatcaagttttgccaattttgaacaggtttatcaactttctattggagctgcatgtggtctttcatggccttctgataggatcatagttcaagttcttgatgattcaactgaccaaaccattaaggttaaaatctttcatcccaacttaaagtatataataatatccctttatgatgtttgaaatttgaaccatcttccttaaaagaaggttgatgtgtcactctctaggttttggtacaaagaagtttctttcacttaccttctatagaaatttagttttttcaatccgggtcaaaaatcaaaatctagtagtcaaattattaacaacccaattatatatttatatattaaaaacttaaccgtccccaaataaggacttttccttaaaagagtcatttgaatagaaggttcaattttcggactcatgcaaagttgtcactttttttcttttttggtctatgtttaaaaatttctgatgtggatttttatgtataataatttataaacaaacagagtttggtggagttagaatgccaaagatgggcaagcaaaggaataaacataaaatatgaaataagggacaatagaaatgggtacaaagcaggagcactgaaagaaggaatgaaacatagctatgtgaaacagtgtgactatgtagccatatttgatgctgacttccaacctgagcctgactatctctggcgcactgtacccttcttgctccacaaccctgaagttgctcttgtccaagctcgatggaaatttggtaaatttttcttataattaaagaataaatatcattaattaaatactttattgctttattacttgtgtcggtgccattctctttttccatattttgttcaagaactttgtcaaaactaagtgctttttttttgcttataatactggttctagaaagtatcttcatagatgcttttcaatgaaaataataataaaatgtgaattgtttcactctttgtcacctattgtaatgattatattcaatttcacatggtttatgagttgtgaccactggttggctctatgtaaataaggcgtgcatatagaacaatcaatatgctaaatcgttaggtgaaaaacgttgtcataaattcataatactctactatatcaccctttctttttcttttgtcacatacagaactcattctagaatagaacctgaaatagaatattccaataacacaaacaagttaggaaagttgtagtttattactatatattatagttttcttttgttctttgcctcgtttctttaggaagccagtttagtgataatctgtaaataaaacaataaatcacgtggaacattttttaattaagagttaaaaaaaaaaaaaaacaatatatgattcctctattttttttaccaaaaagtacttctgtcaattagagtttaagctcctagtttttatgatggtgaaatcattgatgtctaaaggcaaactaacagagatattgactcttaattcgattaataattaaaaaaaaaaaaactaaattgtgttttagtaactaatagtggtagtactgaacctctcttagctagtgaacttggctgcattaacatcataactagtagtatcagtaatttaagagcattgtaatgaattttggtgaaatataacgtgtgatggtctggtcttctgggctgcagtgaattcggacgaatgcttaatgacaaggatgcaagagatgtcactagattaccatttcactgtggaacaagaagtggggtctgctgcatatgccttctttggtttcaatggtaaacaaaaatctatataggatttgttaacattggtgtcataaatttttatgtattgagccaaaaactcattgcacaagataatgtttgtttgtgcaggaactgctggtgtatggagactctcagcactcaatgaagccggtggatggaaggatcggacgacagttgaggacatggatttggctgtccgagctagtcttcgaggctggaaatttgtctatctttcagatctcaaggtaaatggcatgtaaaatgttttgatgctatagtgatgtaccttctcttgtgtcatttcaaagcaatgaaactaactaaagtgatattactaattctgtattacaattcaggtgaaaagtgaactaccaagtacctttaaagcttacaggtatcaacagcacagatggtcttgtggccctgctaatcttttcaagaagatggccatggagatcataagaactaaggtactttttttcttcccttatctttttagtttctatgcataacatgaatgaagaactctccaatatttttgcttcttattattactaatgccataatttgaaatacaaaacattgcagaaagttaccccattgaagaagtttcatgtgctatacagctttttctttgttcgaaaaattgtagctcatcttgtcacattcgtattttactgcatcgttttgcctgcaactgttttagcccctgaagttgttgtccccaagtggggtgcagtgtacattccttccatcattactctcctcaatgcagttggaactccaaggtatccacacttataaaactttcacacttgagtatgtgaaaatctcacttgtttcattactaatcctatcttgatcttcatacagatcattccaccttttgatattctggatcctctttgagaatgtcatgtctttgcaccggactaaggccactttcatcggtttgttggaggccgggagagtaaacgaatggattgtaacagacaaattgggagatgcccttaagaccaaagcatctgtgaaggcctttaagaaacctcgatttaagattggagaaaggtaagcaactttgatgatgcatcagaatttcgagttatagtacttaacataaaaaatggcttacatgttttcatgttgttgtgattgttttaagcagaattcatgtccttgagctcagtgttggagcctacctcttctttattggctgctatgatctttctgttggcaagaatggctacttcattttcctattcctccaagctttcgcctttttcgttgctggagttggatatgttggtacatttgtccccagtgcttaggtgggaagctcattttggtggttggagagttgttatcagcagcattacactactagtcaacaattcattcgtttcatgtataaaaaagaaaaaggaaaaaaaaattgtgatagtacagtacccttttggggagattttcttttcatattaatttgtacttgtgttcatatattgttcaaacaagaggtggccattcttttgtgttacataatggtttttatatatcatcattcatttaaaattatttcttgtggataagtttagaagaaatgcagacaattcaaatgctacacaattgggaatgatgcattatgcaattttagaagaaacaagcagctacaaagcttgtgtagaactgttattctcacctacattatatatgtaaagataaagcttagttattattattattttgaattgaatatcatacatttactatacaaaattcatatctgcaagaggggataatagtctgatctaacagtttaaaccaaaaaaaatctgaactctttacaaattgaattgtcagagtaatcattctaaaactataactaatttaaccaattactataatcgtaagcaccacaataggtgatatactattattagtgtaattcaatatcgaattttaaatattttaatttaaaaaatattataaaaaactactaattaaagatcgagtcttccatattagaacaattcaacatggagtcttacaatagctatgttcttattttttggggtctaattttagtttataagaataattgggtccttttataatttttcttttaaaaaatgtgccctttcctttatagaacttttgaaattaggactttaaatcatattccctctcgtggttcctctcactccccgactgtctccctctacttccgtcgccgcgccgtctccgttcgccgctcgttaacttaagtgtcaacccgattactgcttgttcatctggccactttgatccaggtttatgttgtttccttgtatcttatttttcttttgttttggacaaaaatgtttatgttgattgcttttatccttcttcactgctcaattttgttaatgctttgtacatgtccataaactattgagaattttaatcatatgcaagttttggataagctagaagagcttgattggtaggattcatttgtaccaagatgggatgccacattaatgggatacaaataaggaacaaataattctgttaattatttttttattgctgtgaatttttttaaagtgcataaacatatctaaataatccttactaagctgacctctgttgtgcttgtatgctgttcgatgaaatgtttagctagatagcgggagatggaatagcagtttgttctcacaaaaactccatttatataagaaagcttttcgggaatagcggtttgtttgtatagctaaagttttagtttgcttacctagcttgatttccagtttttatttttccttttgatttgggtcttaaattttgtgtttattttattttatcttatttaataggtttggaagataaatggtcattgcttctcatctgactgtttctaaggctttgtaagattttccttttttcaggcttcatatattctatttcatattttttgtgttttaaacgtacatatatataaaatgccattagatatggtagtaaattctaggaaaatggaggatttcaggaaatagcacataaatttagaaggcaaaataccaattaggcctgtttaatgcgaaaacatgatcagcctatgtgttttgtcaaataaatgacaattgaacttgtgttttgtaaaatagatcaaattggtaccttgagatcaatttggtcaaacaatttttttaatatgactaaccctgcagttgtcgttcatcctaaatctgaagtcactgttgaaaaattgagcttagggcatcaatttgctgaaaaagtgtctcaccaaaattgagctcaggatatcaatttgatctattttgccaaacagagagaataaaccgtcattttacaaaacataggatcaattgcatatttgcgctagacaatggagccaattgggatgatttatttttaacaaaaatgagcccttaatttataggtaatgtttatgcctctttcttaaatgcccaattacaatcgtcgtctttactttttgctcttgatgtatcctataatataacccttctattgtgtaggaattttgttacaatatcaaattagcagcataagggtctcagcatagttgcatctacagttagtatctcttccaataaagagttttattagatgtgcatgtattgagtgtcgtgtaaacagagctccaactcaactggcaaaagtggttttttctttaaatcattatttaggtaaatcaaataggtgtggaagttgtgtcacacaactgccacacttgtgtgtgtgtgtgttttcttatacccaataaaaagtgtcgtgatttttcactcttggttagctccacaaattgagtgcttttgttgtgtaggaatttcggtacagtagctgtaacaaggtcctttaatatacaattgaagtgttcttcaaagggctttactaggtccatacaaatggcaaatatccctgtctctaagtcaagtgacagcagcagctcaagaggagcattgattgttctagaaggcttggatcgctgtggaaaaacaacacagtctagtaatctacacaagtatttggaaggattggggcattcagctgaattatggcgattcccagacagaactacaagtgttgggcaaatgatatcatcttatctttccaatgaatctcaactcgatgatcgtgctatacatcttcttttcagtgctaaccgttgggagaagaggttagctttcttattctaaattctatattcagtggagttcattattgctttatgattaagaacaatactcatatgctgaatttttttttcttcgtgttatttcagcacttttgtattatttattggttcttgaaacaaaaaattgctgagttcatatcagtaactggtctaacatggtgatggatgatatcttgatttaacagaagtcatgacgctgctcttattttttagattattcagggggtaaagacagtccagatggatggctagtgatgaaataataaactatttgttttttgcaacataccccgtcatatatttaatcccgcccaaatatgtttgcaaatgagatagttgtctcttcaacacagccgcatctcttttcggaaactaatcaaattatagttcttcctttttctgcttgattttttttttcttcatcattgctgttgtgattaaggttggacatttagtttaaatcatgttgtatgatagaagaaacatggaattttgaaatatctctgtttccttgcagatctttgatggaaagtaaactgaaatctggaaccactatcattgttgatcggtattcttattctggagtggctttctcttctgccaaaggtctagattttgagtggtgtaaggtaaagatattcttggtagtatttataatctgttgttcgtatttaatttctaacaatccagaacatctttgcaggctccagaaaaggggttattggctccagatcttgtagtatatcttgatataccaccggaggtaatttaagctctgtaaattttgtgctagtatgtaaattcatgagtataccagttttggatgctgccaatattgagattataacatttttacgctgaatgatacaaggttttggaccatttatggtccagatacatagatctccctgattttagatccatcttattttaagattaaacccccaggaagatatcacctttaattgcagtttctcacatggtgaaaagacatccatatcttgtctttttggtctaaactttgtgctgcaacaacattacattatgattctcagaaagccacagaaagaggaggttatggaggagagaggtatgagcagctggagtttcagaagaaagttaggcaaagctaccaggctctccatgatgcttcttggaaggtattttgtgtttcattccgcgacatgaattttaaaactgtctatctgcttggatgtattaatggcatgattcaacttttacgtcatctttagttggagtgcctctacttattcttttaatatggattgaagtgtgacaatagagagatgggctgctgcttatattgtttaccaccactagagccgatgcaactttaattgctagtatagacctttaatctctatgtttgggtgtgtggcgtatctactcactgttttaaaggtcattgactgttgaaaaagaataaaaaatccaatactagatatgcaagcaacacaatcttactgcattttgtgtgtgtttgtttttctccggatcacatgctcttctcattcattcaagatttataatattcttctctcttttgttttcgaaagaagaatctgtttaattcaaactcttacaatggaactgcctagcactaactgctagtacttagtactggagataagattgttaccattttttgagtctaaaaatccaattgagcttttgctataaagttcaaaggctaaataaattgtatttttatatgttctctgggtgattattaataagtttgtttgatggtgtaaatgcagatagtagatgcatgtggatcagttaaagatattgagaagcagctgcaggagatagttttagagagtattggattatgccagaaagagaaacccctaacatgtctctggtcatcctaactttgtttcctgtcctttaatgagatatatgttaaggctgagttctaccattttaagggctgacatataagagttgaccaacactctactttgattatatatttattctgagtaaaaaaaaaaacctttctgggatggtctttcagagaaacttttgttaagagtggagtggaagaaaaacttgtaagaatattaatataagttttagaagagcctaccattattattattactcttttgtgcattatgataacacgtattgaaatttttaccaatactaatcggggaagcatttgcatcacattagcaaacaaaaagaaacatttacatcactttataggacaaaccccattccagtagggattatagtcttagtctataactcttaatttatgttaaattagtataattataatcatgctttttatttttcaatgcaattttattctatgttacaagaaaaatgaatagtacattgcagtgtaaataattaaatttaattttcattgcggaaaattattcaaaaatcaaataagtatttgcaaatcttttgatttcgtaatgattctatatatattgtcttcttttatttttatcctcttttttaaagtttatcatttttacctctttttctaaatattgcactaattttgcccctgtcacttca

SEQ ID NO: 17269 - DNA, 6231 bp, Cannabis sativa
  modified_base (2670)..(2684): a, c, t, g, unknown or other
attttccctcttattcaagatagtcataaggaggcaattcatccttgaagaccaataatacctacacaatagcaaaaaagaaaatatgaatacacaaaggatcataagaattaacacttggattacaattcaattgacactactactatcaacttaccacaagcaattctgccaccagcatttccagtgctcttgcttagctcatgtcctcctaagtattcaagccaatgttatgttgtattgagttagatcacaagttgttatcaaggtttaaacaattaaaaagggttgagtatttgagaggaagcaatagggggggtgattattaccctttcccaagtcatcgggatcagcgtgaacgacgacagcacggccaatgatggagtttgaaccacaaagaggaatctatgaacagaaatgaatatgaacttttagaaaaagttatggttatgatatgaagcattagagaattaaacccttgaaagaaaaaaggaacagcaaacaaaacatacttgcttgtcaactattgtgaaagtagcagttcctgaaacaaagaagaatgagagaatgagctattatcattcatcagtaggtcgtataaggatcgtattgtattaaataacaaataatacaatatttggatataacattgtattgtattagttattacgaccatatattttaatataatgtgtttcgtattatttaatgcataagaaatgatctgtactagtttgtattataatatttacaaaaggtctgaagttagggactcagaccatgaccctggacccgaacccgaacccagaagccagagtttgggaccgggttggggtcgagtttaggataaagatagtataattttacacaacctatttatacaaattgatatcaaacataatattgtattaaataatacaatacaacacgatgtactaaacaagccctaagaacataactttcccacaagatataatgtacccgaacgcccaattgccacatgctatctatgaagtgcacaagcagttcaaaaccatgatataaacactaaatacttgcttgcttaccatcatcaccaacaatgatgtttccaagatcaccagcatggcgatgctcatcttcaggggcaccgtgttctttaccagctggattgaagtgtggacctacaagaaactcaaaattaagatcgataaacaagacacaaagtatggaagcatagttaaattctttctactataaaggagcaaagattgcagaagctgtactgtaccagttgacatgcaaccgtttgtggtatccccaagagcatggacatggaaaccatgaaggccaggcttaagacccgaaacatttccggtcacagtggttggccctgtaaaagaattgcataagaaatcactctaaatactacattggctatagacatttaacataatcaaatcaagtaaacaattgtagttagttaccatctccttcttggacaaagaggatagttcctttgacaccctcgctagagttaagaacagcaactcccttcaccatttttctatgtgatctaagcaaaatagccaattagaaaaacccagaatggaaaatcaatccagccattttcttttcttccttttaaatactgtcaatttcatatttttggatagtgtcaaacaataccatttgatcttacagcaatggatcttaggaactttcacaagtataattaaacaaagtaaatgaagccaaaccttaaaacactcaaatacccactaaagtgtacatctttaaaaatacagaaaatgaattcctatactcaatattttcttgaactgttgctctacaaactattcaaatagacaatcaaacccagaaaagaaaatatgaaattacagccatcaaaattttcaacccagcataagcaagaacagatatgaatctacgaataattatttatcttcaaaatcagctcaaagaaaataacaaaatataatctttgagtttgggttcatcactagactgtatacgaaaacaaagataatactactttaaacaaatcaaaaagaaatcttagctgagtaatcagatcaaaaatacccaaaagacaaaaaataattacaaaatcaatcagatcaaaaacaaaacaaaaagatcatgaaaataatactactttaaacaaaacaaaaagaaatctgagctaagtaatcagatcaaaaacacccccaattttttttttttttaacaaaatcaaccagtagtagaaagatgaagctcacctcagaacaccccctaaggaagaaaaagaatgaaagtaaggttctgatgcagatgggttatgaaaaaaactgtgtgagtcaagagagtaaaattgaacaagtctaatggggaatgttctagggtttacttctccaccacctaccaccaacccacattgctaagggcattattgtcattattgattgtgtagtcattgttttttctttttctttttttttttcataaatatcaaattaaaaaataaattacaaaaatcccatattctgtaaaaaaaaaaaaaagacggagactgtagtgtaggtgaggtgagggttgaggttatagccggttcagacgcacgatccgcaactattgggactcacacaactgccattgtcgtcctcatactctctctctctctctctnnnnnnnnnnnnnnntatatatatatatatatacttcacttccattacacgtatctacaaatgcggttcttttcccaatctttgttattacttccaggtaactctctcttatacttttcctttcttatattcatttcgtctattcttcttcttcttcttccttttcattatattggtctcttcttcttcttcttcttcctcgtgagttcatcatttagtttcactggtgtaagtttttgttatgatttaatgtcttattatggtttgtttgttgtgaatctgtgataaatattgtagcttgatgaaatttctatgaccagagaatgaaatctactacctttagttagtttcatacaaattgactgttttttttctttaagttttagtgtaaatttttgaactttgtagtggaaattttctgggaataattagattttttaattcttatgagtttctcagtacaatttgttgattggtttcatttatttatcacaatctttcattgttctctctaatatcttttttaggtatgtctttactctttagtggttattatgcaaaaattggatctttatccaatgtaagaaaaaacccatcacgaatttagttcctgaagaatcaaatgcctaaaatatctgatcttggaattcatttcactgtttggggatagattagtttgtctttgtcattagttataggttttcagagtttcttcctattcctaatgctgcattttctttttttctttgtagttgaaagttgaaacttgaaagcaaattgtccttgtgatgataatagctcccatgaatctatcaatatttcatggttctagatgtagagtcaatactttagctcatttgtggagtggaagcctccatagttggacttggaggaacatcactacctcaaagcttcatgatcccaaagtcccggggattggaggaggaaatactaagaaatggacaagaaggcctataacaacaaaaacagaaggaagtattaatacccctcaaaccagtaaacttagcagcattaggcatgaagttttagatgaatccatttcagcaacaagtagttctttgagtattggtaaaactgagattagtcaattccaaaagcttcaatattgtgaagttcagcaagaagagagttatgagagtttggccaatctattgacaattatttgttttgacattgaaacaactggatttagcagagacagtgattgtgtcattgagattgcacttcaagttcttcgtggcggtaagaatagtactttccagacattggtaaacccgaataagtttgtgccaaatactaaagttcatggcattacctcaagcatggtcaacagacgtgatgttccaaggtatcattatattctgtttcaactgttaatttagaacatggaatagataatcagtgtcttaattctgcattgttgagtagttttataggaccccatgtgagctagttcattaaaaaggggtttaggaaactgctgctgttaagttggaacaagaatttatcttcattgtgttgcatttcttagtttttatttaataaatgatagctaataaatattctgtttacatggaggatgaaggacttgataccaatcttacttcagtatgtcagtagccatcaaatgcctggaggcaaggtattgttggtggcacacaatgctcgaacctttgatgtaccgtttctgattagcgaattcaatcgctgctcgatagaagttccttcagattggttattccttgacacccttcctttggcacgcgaactaatgaaaattgaaggtgtgttctgttctgtgtttgttttgttatgtgtccaacatttgtggttgagtactaaatattttaaagcttttgaattatgaaaatattgtcaacaggatcaaagaaggcatcacagaaagatttgatggaacactttcaaatcaaaagggaaggtgatgctcatagagctgagtcagatgtgaaaggtttgacattaattcttcgaaggcttaccttcgacttgaagctttcaacattggaccttcttgaaaggtctttcagtgcctcggacttgatcaatcaaaagaagaagaagaaacccagctagtcaggcttgtgcagccatttgctgtagaactaacttgtgttgttgttgttgttattgttgaatttattcaaactcagaatgagagataggtgatacccttttacacacctagtaatttacttcaattgtctaaggtgttggaatccactggctgagtgggagcctttggcttttgttagagcattaagaaagccattaattgtaattgtttacatttattaataaaaaagttactaaagtgtgacttacataatttaaggtaaatattattttggacttcatactttacaatacacgacttatatgccgtgccattgtaggaacagcattgatctctttttttaattatttatatttataaaattaatattttatttatgaaattataaatttaatttaagaaatttctacaatatatttttttttaagtgtactggtttatttctatctattttggtattggaaaaaaaaatttagtttaatgttttttttatggtcgtgtgcattataattatttaagacatcttgcaaaattttgagaaattcaaaaaaaaattaacacgctaaaaacaaggttcaaattgtctattgcatgcgtgaatatcattgtaattgtttacatttattaataaaaaagttactaaattgtgacttacataatttaaggtaaatatcattttggacttcatactttacgatacacgacttatatgccgtgccattgtaggaacggcattgatctctttttttaattatttatgttattatttgtatttataaaattaatattttatttatgaaattataaatttaatttaagaaatttctaaaatgcatttttttaagtgtattggtttatttctatctattttggtattcgagagatttttttagtttaatttttttctatggttgtgtgcattacaattatttaagacattttgtaaaattttaagaaattcagaaaaatttaacacgctagaaacaaggttcaaattgtgtattgcttgcgtgaatcttttgttaaacatagaaaaattaaagataagaaagctcacattgagcttcgaaatgtattaatcgaacacttgtaggacgaatatggtaactcacaaaatttatataatttaattaatctttttaagtttgttttttaggtttaaattaatttaatgtaacttcttttgtcatcaatgtgatgttttttctctagtaatataatatttatgttattgtaatataatattttaatttattgaatttactgattttacagtattattatctttaaactaattatgaagttaggagaagtatttaggccgctcaagagcttctaagggccggtgcaagaagggctattgcaagtggttcttcggttagtatcttacttgatccttggcttccaaatgattctaatccatatgtcttgacaagtaatcctggt

SEQ ID NO: 17270 - DNA, 7813 bp, Cannabis sativa
tttttttttttttttatcaaaactagatttaagttcaaaataattttaaaataaatctcaacacaagttttccgttcaaagcgagaaaggggtttgagtaataacatactttttcactgaggaatttagaagaaaattgagtaatttgtgggcacaatataaaaattacaaaatctaaaggtcctgaaaagtaaaaaaaaaagaaagttacaattagaggcaaaagacaagaatctattaatggaacattcttctccgccacaaatcaaaaatgacttaagattctcagctctaaaagcttcaacaatggccacacttgttctacacattttctccttcatataaatagaaaacaaaaattgctcatttctttctgtttctattaatggaactcttcactcacttacaactctcttcttccttcttctcatggcgaacctctttacgcttacttccccgcattttccctcactttccttctccccaaacactcttcgcttttcccaatccccctttctactccgagctcaatcccggagccagattcatggagagaagagaggcgttgctgtcctctggttcaagcacgaccttcgaatcgacgatcacccggccctcgtcgccgcctccgaccaccgcgatttagttcctctctacgtcttcgaccaccgcattctttcccgtactctctctcttcatctctcttaagatttaattttgttttaatagttactcgttttcgatatatgattgattttgagcacaattgtttttaattttttggtaggattttctgatgaaatgttggaaatggttcttttggctctggaggatttgagaaattctttgagaagcaaaggttctaatctagtgattaggttggggactgctgaaaatgtgttgcggaaacttgtgaaagaggttactatttcattgctaaatagaatttgcatcaattcaaacttttcagtagaatttagttttaagtttttttggctgagtattgaagcaggtaaatgccactcatgtatatgccgaggaggaggttgaacacgacctcaggaagctgatgaccattgccaaggagaccttgcaggcattgcctcctccagaggagagccctaagtttgttctttggcgaactcccttttatgatatagaggtaggtgatgatgattatggtctattgctttgctctctctctacctctctttcgagtgagtgactggttttcccttgttatggtgtgtagagcttaatggatcttccagcttcatatgatgatttcatcaaacgtaaattccctgtatcttcaccacttccacaaccagaactatctcccacaaacatggaattagattggggtaagttcagttgaccaatctattcatgcatatacttcaagtggaattattctttatatttagactgcacataaaagtttgcattgtagagagtgatgaacttgccatggattaggttctgttcccaccttaaatgagttgatggagtttatagatgaaaattcatgtaaattaagaaagagttggacttcaatcaaggataagtcagctgagagtataatgatgaaggaatcgatgaacactggtgaaagcaacagaattagtgcccagagattccagcagaaaagagtagttaattctgtttttgtcacacaaggaggaagtgccgtagggggtgggacaaacactgtagtaaatgcattggctgcttacttgagatatttggagggaacagctcgagatgattggcaggagtaagtaatgattgcttttctcattgtactctcgaggtttaggatcaagtcaaggggatgtgtaacaatatttgcaaatgttcttatcgtgctgaagccatttttagcaactttaattagaatattctcatttaaaaataaattaatgattctttctagtatcatggtagtgaacctgctgcatgcactaaggatgagaagcaagatttggcatatgttttactaattgcttgtatgaattatcatgtccccaatttcataaacagcaaaataaacatgatttatctggaaatgacataaaaatgatatatctttccaaatttggatttgagactgattagtgataattccaattcttgcagggttcatgaaagggtgcgctatactgaatctcgagaaggagcttctttcattgaactctttggacctgccctttcccttggtattgtatctagaaggagagtgcattatgaagctatcaagtatgagaaagaacgaaatgctggattcctttcccccttcggatattcaacagtctctgctactgcagcaattaatgctgtttgctcaatggaggtgatgattcttacatctaaatttggcagtaatggagaaaaatcagtcatgtttgattatggtagtttgttggtgaactgtcttcatggtgatttttggatgtctgagcatgtattaaattatatgaactgtttttggtggcagtggtattggctcatgtctattagaagtcaaataagtgatgatagaaattatcgcattcgaatttggagatggaagggccatttgatccaggtaagctgtttgcaaatgcttttagtataatatatcttttacagccttctttcagagttaaatgtacacacattaccataatctaattactgaaattaggtagtaactcaaaattgagagtactttttttttctcagtatactgttgcgggtcatgagggtcctgctgttctccttgttcatggttttggtgcctttttagagcactaccgtgataacatatatgacttagctaaaagggggtatcgagtttgggcaatcacattattaggttttggaaagtcagaaaaacctaatgttgtatacactgagctcatgtgggcagagttgctaagagattttgttgttgaggttgtgggtgaaccagctcatctcgccgggaactcaattggtggtatgcttttattttaaagtatatttgttacttgactacaccatcctttattacttcccctctgttcttccttgactaaggggtatacatgtacacacccatagcaacttgtttgcataaatgttaccattttcttgcccacaggttattttgctgctatccttgcgtggttgtggcccactctggccaaatcggttatcctcatcaacagtgctggaaatgtcattccaggatattcctttgtgccatttagtaaagtgagtctaaaagcaatgcttatctttaaatatggtatctggtgcagctgctgacaactgaaagctgtttcaggatagacaaacttcaggccctgcttggctgggtgctcgactccttgtcttctacttaaggtcaagattaaaaggcatagtgaagaattgctacccaattgtaagtagtattgattgaaattggtttctcatttactactcttttgtattaataatctgtttctactttttcagaaaacagatagagtcgatgatgtgcttattgacgaaatgttgagagcagtatcctttaccttcacttctgtatatttagattgaaatagctctctctgcttaaatagctcgtgtcccgttaaaggattatctctagtatcgccttaacctaaacaatagtcatatgatcctggagtacttgtggtcttggaaagtattttcagctttaatctctcacttcctcttaattatctcttgaaagattttgaggaaagggttttagttatccaggtaagacatctaaacaggatttggatatatccagtcaagtaaccatcataattttaccttgatttatttcttcttattaccagggaatgaaagatccaataactgactcaaaatcgaaattggctatgcttagagagcactgcgacagggtagtaatcaaggaattaaatgcaggtgagaaaaatgtttgcaagttcattttgttttctccttataattcgatgatattgtaaattatatctgatgagcctcgtaattataggccattgtccccaggacgagctgcctgaggaggtgaattccatcatatgtgaatggatagcgagtcgagaaagtaaaattaaagctgctagtgtagctttatagtctgtacaaaggaacaataagtaggtattattgaagagattaatttgtgaagatatttactagcacctcgatggctcgatatgaattttcttatctcaaagctcaggtgttatcagaaatattgtttgataaaagaacacctgcatttagaaactagtaacataaaaaaatatgttaatattatattgtttattttttaagaaatggttttatagtattagaaagggaaaaaaaaaaaaaagccattctcacataagacaaattatgttaatcatagtataatgatataacgtataaaaagcaattactagagaaagaaacttaaaaaaacaaaccaaaaaaaaaaaaacttaaaaaacagagagaaagaaaagaaaatagcttaaatgactgaaatctaaatggggtcaatgacaatatgatgaatttgaatgacggtgttactatcaatttgggaatgttggttagtaatggatgtaatacttttgcaatttgaatgggtatagttcgtactcagtcaaaactggttaattatgagaaaacaaaatttaaatattactactatactcttctttttctgtttttgcgtaactatataaatttaagaccatgccaaaatacaactttacagtttactaagtactttaaaaatagtttccaagaaaatttcgttttacaaagataacaataaataaaatatatgaaaattgttacaaaattttggtagagttaaaataaaataaagctttgaaacaataatgtattaaaattttggtgtgattaaatctatcaaaaaaataatttattgtattggcatacatctctaatccagcttaggagtgcagatttaatttaaatcctttttctttccttcaacaaactaccccaatggcaatgcccagttctttggcaaatctttcaaacctcttcaactcataaaacctcattgccagtgccactactctttctcaaaataatccctactgcagatgacaatattaaattgctcgaataaattatctaatgggtcttctgacatcttgattccaattaggacacgtgattcttaccttcttctattaagattcatttcttcacaaagactagaaatatcaggaactatgccgccattgcaatatcttataacaccatttcctactagcccattcaatatatcagctggttctcttgctcctccatgctgtaaaagcttttctcttagggccactcccgtgcttagtgacaacggatcctccttacacacattctgccatatgcttgcacttaaacacttggcatacaagtagctataataacctacgaatgcaagtttatatttttagaaaagagcatagagctgtggtaagtcatcaaaaataaaatgtcacattggggggtttataggttcgcgccaactaccataagcagtggaatgatttccaaatgctaataaaaaaataatgattgattaggcttacttgcaactacattggttgtactagaagttttaatataaaattagggatcgtaataggggattattagagcaatacataaatatatatatatatataattagggatcagtgacagtagatgacttttatgacgctaacatgtggggatgcttagtactatgagccgaagactgtatatttttcaaacgctagaaggaaatgggttcaattgtgagagtactttatgaattttaagcatacctgcaccataatttaggagatggttgaagcgggactgccaatgtgtgccctctacatgcctccaactagtatattttgttttcaagtctgcaacaatagaacttgggtctcttggtggattatcctgctccccaaagagtgtctgatccattatggcgtaaaaaatctgagaaacagagcaaccaaagaaacactgatcagtatatcctttttttcctaaagaaaagtctaaactatgcctttgggtgggataggagtggagaacctgtcgttgcaattcagttgcagcaaacatctttctggcaccctccattgattcaaccaacttctgtggaattacttcaccagttgaataatgtctagcaaatgtccttaaaactcgataatcccatgcatagtacctaggcatgtcaccagaaacatatcaggttgattaccattacatccacagatcatctaatagactggtaaaatcaataaacaatacagcaaagaataattatggataacatagtatgcattttgaacagggaaacacttccatgaccaatgcctaacatgtttagtgagcatacaaattatgtgatgcacactacaatactacaatcatgttaattggttcgataaagcctaacatgtttagtgtgcatacaaattattcagcataatgactaataataattgcagcacagtagcacactactcactcaaataggttagaaggtgtttctgctaaatcaagagcaaccctggtaccggaaaaatgttggtaatcctacagaagaagaaacagagtgagtgagcatgttcatagggggaataaaatagagaaattttatttcattttgttgatatttgataatcaacaagttgcttaggtcacataagctatttaattcataccgttcttgagagtaatgagtgtagtgcatgtccaaattcgtgaaaaagtgtctctagttcccaatgatttagtctcacatttgatggatcaggagaacctgaaaagttgcaaatgagagctacaatctgttgtatcaccagattcaccacaagcaaaataaaaactataagaataaactcagtaacttaaaaaatcttgaacaatgttttctaggataaatacataagcagttgtatggtactaacaggaagttggtattctgtctcagaaactcgacgaccgcctttaattgcaaaatgagcacagccaggatactttcccttcctcgagtgcaaatcaagatacaaataccccaaatcaccctaaaacatatggatgtttgatgaattcttgtgaatacagtgaataactagagcatgagtaaacatagactaaaattgtgttattcatattctagaaggactaaacccaagtccttgatggcgcatgcgaaatgacatcaagctcaacacatacaactattagttttaaataattttttgatactaacaactgaatcctagaaaaggcaagtgtcactctttcactacctaaatcttcaagccatggaacttttacttccacaagtctctttaatctttcattagaaacagatccgaagcaaattcatgggaattttgccaagctaaaaacacgaaattgtaaaatttgcaaaataacaacattgaatttacactgtgcgaccatcagtgtaaatttagggccacaaactgaccattatattatggttgttttatggtcgcacagtgtgatgttgggtcactcccacgatcaaacatgattattttgctgataattttttttgaaaagttattttactaataaaattttccataaagactatttttacaaaatactcagattaatcaaacaattcttcgtaacagaaattagattcgccaaatcctaaaaaatttatgaacaaagatacagcaaatataaatcaaaagaattcaaagtgctgactccatacagattctatgttttatggaggaacctcatgcatatttctt

SEQ ID NO: 17271 - DNA, 6517 bp, Cannabis sativa
gagagagagagagagagggagtgggtaatagggttcacaaataacaaccagttcaatactcaattgaatattgtttcgagtttttgcaatagcagcaagccttagataagcatctacgtaatctggatactgcaaaagtggaaaacacaagttaaacaaaaactaaccttcataggcaagtactacaaaaacctgcatgaacataccaattagtcacctaaatatcaataaggaaacaaactgatcaatcaatcatttcattgctgacaaacacttctgctatgaaaaaagattgtgacatgaaatgctcaaattttcattgctattaaaatcaagttacaattcttctctacttacagtattaatgtaacatttaaattacttttacacttgtctctccaaatgaacctacaatctttgggaggtagataccctaggaataagggccccaagacaaatcaaattcctgacctcatggagcaaacctgagctgaccacttgacccacccttcatagatgcaatattattactataattattatttattaaatttaaaatttttggtcctggcagttcaaccaggagacctccaactggccctaaggtttttgagtctgtggtggtttgagccttggaataaacgcctaccagcactttccaacactccttaccattagaccatcgcttggggttatagatgcgatattatttatcatacacgttaaaacaactcttctcatagacatgaaaaatgtagagaacatagctaccttgaacaagattagtcggtacaacgtgcttgcagtttcagagttatgtaactgctcaaataatcttgccatattaaatagtgccgtaactttattccaaggtaagtcggcaacacgaccttcattctcaagctgctgaaagaaatgtgtgtccttgaactggagagtggaagcactagcatcaacaggtggggatttttctttaccatccatgaaagcaagccatattccatcacccaatgcctccctgaaagtttgttcagcaagctgatagtggaaggaaataaattaatgtcattgaactgttttagcattaatataaaattcaagaaggtaaaaagcttatcaaacccacacaaaagtaacataaaaagtcctttaaacaaatcatatcaataggaaattgctcaaacctcaaattctcctctttcaaaatgaagaactccaagattattgagcacttcaatgggtgtttcttgacctccctttttcaaaagcatacgagcctgtaaaatatttgggaattttattacccctccacaaatagaagagacctacatcgtacagaagtaaaaatgagatccttacagtttttagggcgtctagagcagctacagggtcagatgaaatcaataattctcccaggtcaagaaatgcctgcagtacagtaagacaagtaaaaaaatgttaaaaaggaaaaagtatatatgcaataaaggagttattgcaacaaaatcttcaagactctcataatacctcaaatcacagatctaaaatcaaccataatttctacaccaaaaaaaaaacaaatttctagtagatacatagatccatgtcacccatcacctgtcatccgtgttaatgttattctaatgttgtcaaccatttcaacagtgtgaaaaaaaaaaaaaagagagtaagaaagcaattgtatggacaaatccaaaccaaacaaaaacatattattcattacttgtacaaacattgtacagttaaagaggaccatccataacctttaggagtcgaacaacatggaaactggacactagggaagcgtctgagtcatacaaacaggttctcagcacaccaaattttagtagaaacatgactaaaagaacttgtgttaaaccaataaagacatgattattcacctgggcatcacgtggatcaattttcgtagcctttctcataaattcatgtgccttttctgtctgtccaagctggaaatatatgtgcccaagtacctattgaaaaataaacaatccattctagtcataagagcaaaactagatattattttttattattgaaatatcattacaaaagagttttctaaaggtattcattttaactcactttcaacgtctcacaattatcagggtagacctctaaaaccttttcaaaatttgacaatgcacttttaaaatctcccaacttcaattgcacctggcccaatcctgtcaccagaagtccattaaattaaagatgaggaaaagtgactggaagaaaatgcattacaagacaaaattctacattgttagtcacattctggtttgattttattaaaagacgagaacattgaaggtctaaatccattgtggccagcccttgtactattttaaatacatctttttgcatacacatctgtatgcatttctaaaatacaacgaagccaacttcacaattaaacatttgtagggcttaggcatgttgaatttttttcccataaagagaagacctaacttaaacatgaaattttcatggccaataggagcaaaagtaccaccaagaaatcagagttgccacgcaaaattcatataaatccttagcttatttatatatgaaaaaaaacaacctttaagaccatgtcaacacatcaacacaaagagtacaccaagaagcagagattatggtactgaccgtaataaggaaatacaaattcatggggtttattgacttccttgacagatgccatgtaatacagtccagccttttcatagtccccctggcatccaggaaaaagaacatcattagtagaatatcgtatttggaaaggaaatgtcagaagaagagtaagagaaagaggaaagatttcttcaaaggcaaaataatagtgacaatacaaacacccagtcatcacatgaagaaactagtgcactgaaacgatttttattaaaaaaagaatgcccaagagtttaggaaattagtcatgatctcccagcaagtacaactacaccatagcaataaaatgttgataaaggtcctttttctgtttttctattatttttaagaggaaaaaaaacaccaacaaccgcaacaactaaccttgctatggtatgatcgcgctaaattatagtaagagtgtgactttgtcggtccatggttgctaacagcaagtgctgtttcagtgagctgctccaccaaaaaatgttgtcccgtgaagaaaaagtgatttgctaagtaatttagtgccattgcacagtaaggatatacatcaaaagctctctgcattttctccattccttttctaattccattagctgttagacagcagtaaaattaaacttcagaacataaagaattgatttgaaaacaaaataatgactaaaagatgcttgtgtaattcagcataagggaaataacatgctatttatttactttaccaaccaaccttcatttgtattcaaatccataattgccaatgctacaagagcctcaacattttctggatctaactgcaagtttaaaagatttatttatagatgacttcatcagatacacataaatgatttaactacatcacttggcaaatggttaaatgtcaacttgcctgcaaaactctcagaaatgcctgccgagctttttcaagctgacccaacttataacgacacagtcctatgccaagtcttacagcagcaggacaattgggatatactagcagggccctctttgcaaaattcagataatactaatcagaggtaatatctttttttctacaaggagatatataaacatttatgtttatgacaaattttgtatacttgtctcatcccaaatacagaccttgtacaaatccaaagaatcagaaaagcgtccacggttgaactgaacacatgcctgcaaagttcaggacgtattagaaataagctagctttgagttcatactattttgctcttttcaaactataaattagtatatttttaatatccccagtctaaaaaaaaaagatcacatacattcaagatttcccaacaagggcattacctgctttctcaagttttgagattttttaaaatgactagttaaaaccttaaaaattaaaatgaatgaggaattgaaaataaagctttgagattaaccaagtttcaatactttcgtgaccataatacatgaaaattaggaactacaaacacttcagagcaagtcaacgcctaatgcaactagcaagaagctcttcaagagagtcatggttataatgtcaggcaacttttttttgtcgggtgagcatcatcaaaaatcttcttgtatcaaaaaataagacttcactaaactgaaaagtaattacataaagaacaagatgttcctgatcattaaactacacacttgcagttgtaatcaaagagaatttaaaaagctaacaattgcatctctgtatgtataataagtactggatatccaaatcactgatattaaggaaaaaaaaaaactatgtcacacagaacaaatttgcatacttgacccaagagagcaggaacattatcacggtctccatccaatacaatcttgaatgcagaaaatgcttgttctacttcacccttggccaataaaagctgacctgcaaaagaagtcaggttatgacctttaagtgcaggcatattcaggcatgggtcgcacacctcagctttcaataatttagaaaaatcgagttttttcaactcatccacctcaaattgagactgcaaagcaactaagtatgtcatacagatttaaagaaaagtatgccaaaactaataatacaagtacaagtcatggtttaatttgggaacaatatacagttaagacgattatgtcaaactggtaatctctcactggaacttctggatcagcaacagcaacagtcgtatcaaaaattagtgtctacatttaaaacctttagatgacggaattctattgaaactgtgaaagtttttgtctttggtctcattaatatgaacaagaatgaaatactgaatagcaaacaatacattgaagtaaaacttttgttgtatatgaagaaataagtttgaacccaccttttccaacccaagtagaaggctcgtgcatgtcaattcttgacgctttattgtagtattgggttgccaaaatgaagtgctcctccttttctctatgcttagtctcaatttttccaaggtaactatagtaagcccctaaagcatttaagattgcaattctctcgtatctaacatcagcatagtactcatcaatttctggaagaaagattaaacgggcataagcattacaacaaccaaaaattaaaagtaaaagacaacaatgaaaattaagtgcacccgagtaatactggagaaatgggaacagaattaacgaacagtaatgagattataagaaaaatagaaagaattctagagccatgtggaataccaggactggacccttcctccaaaatttggcggaactgttcaagttttccttgcttaaagtactccctctgaacaattgaaacgtttagcccataaattgaatattaagtttaatcaacaggtaagcgtcagaatttgaaaatacagaaaattatcaggaaaataataataataataataattaaacgaagaagcaagaagtaaccgcgatgatgagccatagatcaagaggggcttgctcggccttgaggatgtctagaatatcagaagcgtccctcgggagctgatcgagaaccactctcacttcctcctccgagttctgaactggtatgtacactgaagccattatttcccaaattgccaaaccctaatggagtgagtgagcaggagtgagttgaatccgaatcggagtttggatcttcttccttactcccttcctcctattatttttccacaataataatcttcttttctaaacattctaaatggtcaagacttttaggattcttggcgggttttagttaggtttccattctcaatattcaatttcactattttttataaaattaaaatattataaaaaaaaaataaaaaataaaaaaagaattgtggtatagttcctctaaataaaaaaaaattcaaaaatttctcatcattcctaaaaagttgtggactcacaaaagctggtcctggtcctggaaggttttattgtccttctaagaaggattttcaggaaagttagccctccttagatagctagttgttccttctgaaagttagtcccggatagttcttactgactttttcctattcaggaaggtcttttagcgagtgccttgaaccgtgactccagaagttgtcatacttgttccagatgcacttttacttagcctgacgtggagacctcgcccaaaagagagttagttaacctcgattcttgcagccaccgattttagaatcttgatcctaagcctatatatgacaccctcacttatcacttcaatacgacgatcagattgagactgaaaaataaaaagagaaaagattgagaggtagagagagatacagagaagagagagagagagag

SEQ ID NO: 17272 - DNA, 2753 bp, Cannabis sativa
ctgcacagtacgtttaaaatcacactaacacgcctatgctagttagggtgttacacgttcagatatggacttgaaatgagtaaagtctacacgcaacttcggaagtcccgtgcagacttgggaggcaaatgttatcccatttttcgtactacgacgtggtaacacatactggtgacatgtggctcctatttcctacatctagctgaagaggtattccgaacagagctcaatatacatctgcacagatagagtctgcctgaccgagcagggcaagggcagatgatccgaacaatgtattaagacttagcagtttcaagacttacatcgtaaagcacaaaaacaatccctacaatcaagggatcgtatcaaagggatatggcaagctgtccgaatccctcaatctatgtattctaaatatgtaatgtgtgttcttacgaattatagatattgtaagcaaaagggaaaccttccctcctgtatttagccccataaatagttatccatcctcactttaaaaggggtcgaaagaattacttcaaagagatctaagagtaaacactcagagatttcattgtgagagcttcaagaaaggaaacactgtattctttgttcttgagttaatacatgggagtaggctattaccgaactaaaggggccgaacctctttaaaatattgtgctctttattgtttactggttcttattaccttgtcttaattacattttttattacttattgagtgactcattgtcgttggctaaaagtgaggtcaacaatatatttgaagttataaaatgtaaaataaatgtgattatggaataaaatggatcatatttaaaaaaaaaaaaaaaagttcggtttggacggtttgaaccgaccaaactgaggttcaaaacggtcagttttaagataggttttggattggtgggtcagtttttggattacactaatccagaccgaaagccgaatcctaaattttcatatagaaaaaaaaccgaccaaaccaaccgatgctcagccctactcatatgtaagagtatttagggaaaaaaaatgaagataaaagtagtgattagtgaccagtctcaaatcaacctacttctgactgtcctcggcattttaaacttctattttggaaaagagggctcatgttcaacgacctaaagaacaatgctttcagagaatctaccacttttaccacattgaaatagatattgctcctatatattttgctcttgacagctccatgcctttaattctcactgaggagtcaaaaactgtagtagtgcgactgtacgaataattcagagaaagaaagaaagctaacagtaacagtttattgtcttttctagaaagtcgtgaacaaatatttttataattgcagcttgctaattatttgttacattattatttatcgatcgaggatctgaaattgattggagagaaatataaggaaaagtaaggagaaataatcttgtagtggagcagtacgtactagagactataataaagaatcaaaggcatatattaaactagtatatatatatgatgggataaggaagaaggcaagaaatatattctattcgagtgcctaatccatggttggtcctcctaataatgcttcaaaaagaagcacataaaatggggtccatatataatccaaaagtggctgacccatctgaaacgcattttgtagttcaccaaaaaattatgcctcttgttccttgcttgccttggactatgaataggcagctgatgcttaaccctctttattcttaactcttaagcagttttcttaattagtagaatcaataacataaaacagtgggtcaaggtggttagggccttgatgtatatcaagttcaagtcaaggtccatgttgggtttttttgttactatttatgtatctatatatgtgtattgaaatctgtagtttatataacataaaactgatcctataaggttatcataaaagcattctaatgggggttgctattagggtgatcttagttttttcaagataaattttaagaaaataaatattaaaaaatatatatatattttaaaataatgtgttactttcgacaattatagatgttcgtctcttatggagatgctctagtaaaataatagtttggctctaactacatatcatacgtggcataatatatggttagtatatattctatagctaattgtatttggcatgaagaatgttatatagcgtaaaaatccctaccaataaatatttttcaatctcgtacttcattgattagtctactcaatttccaccattgataaattctttcctgaattggagcaatttattgtagtccaattcgaagcttaatataagaaattcagacgtgaagcttttatataagtcagtattgtttttcttatactatatatatagaataagaaggaaatgaaatatacaggtcagctatttataaataattactaaaaggtattggtaaacactctcctgcgtgttaatattgctattggtttaattaagtatcgggtcacatataatttaatataataacttttaggaattatcgctaaccaatcgcaaaacgacacgtcttgtataagcaccactatagcaatatgagaagagaaggaattggattaattaggaggacttatcctcattggtccacgtgtcgtaatatcagtagctcttttttctgagctagatttatttcatgaggactaataattcagttcatctaattcgcacccat

SEQ ID NO: 17273 - DNA, 8270 bp, Cannabis sativa
aacatacttgtgactagatctaagattgtgactagatctaagatcctggtaaaataattccaacaatgagattctccataggaaagtaaattttgagcgagtgtctgaaaggactcagactcaacaacgtggatctataggtcacctgctaaggaaccaagtgacgagtgagcatccaaaagtactcagactcgatcgagatcatagacctataggtccactacatgcagctgataggaccaattgcaactctggtggaagcagttctaacaaggtgggaaaccaatctcctctacaggattcttttcacaaatctaatgactttaggccacctcgtgaccttgtaaagggaaagggacctatagtcagccttaggggaagaacccaaaagctctatcacaaaagtgaagagtatgatacttggagggtgagggtcagtgaactactctacacttggaaacatttctgtgatgaacgaagtgcttgatgtcgcccaaggtcctaacatccaacattacgaatacttcttgtgggtgcatggagacatgttaaacttgaacaatcatttcaattacctccacacatgtcactctaaggaagactattttaaaggaaatagtcaatatagtactacgagtagaagctcatgaagtaaatgctcgagagatgactctattgtcatacgggataaatccccacagctgctagcaaggtaacacaaccaggaactaaccccaaggctcgaatcgatcaacatctttgatcgattcaaaaggaaaaagaacttgcaaagtaacaccaataagaaacaaccagttgatacgtacatcaccacatgtgatgtctgcagggctgaatttgatactcatgctgacttagtaaaaagcatcgcaactccaaagccaattgagtttgagctataatgggagcgaagttcacctctctccgagcgaatcaaggctttgaagatcctctctaaatttaaaaatccaatgtgacatctgtagactggtaaagaagaccctctctctcacatacacaacttcgaagtataaaatgacctgcaaggcatttaagacaattctcgttgttgaatctttccacccacactatcaaaagcaacacaatagtggtatctcaagctttccttgggatctgccgattcttgggagacacttaagtaagcattctataaccaattctccccatcaaggcacagactaatcaagcccaatgatttaatctgcatcaagtagcaagaagacgaacctctatatgattacatgaaacgattcttagaggaaaccacgcagacaataacactcagtgaagaaactaaggtcatggcaatgataactggactagcaattttgagtccactctggagagacttaaaactcaagtcagtagacactgtacaagattttagatatagttgatagtttcatcaagctcgaagacaccgttaagaaggtcagtagagttgctcaagcgaaagcaactgaatacactatttatcctctccttgaatcacaaatggacactgatcaggaaggtgaagaagaatcaacatcgaatgcttccactaaaatagattcctcttctattgcctaaagtgagctcgagcaaggagacattgatgatgaatcccttgctatttctcaagatgttctcgagcaagaaagcattaatgaagaatctcccctacttcccaagacgactcaagagaggggcagtgacaagggttctccctctatttcaaataatgatcaagaaaaagggagcaacaatgaagatgtgtcttatgagtcccataaaggtattgaccaaaaaagcaacactaaagactcacaatgagaaagggagggaccttatatcatcacgaaagcgttagaacccagaataaataggctagagcctgctatgactaacccttaaatccagtgtcagtatcaaggtattggaacgtggagcatctgagacgatatcatcaataaagcaataaattctctggaagtaggacacgcgtacaacaaagattttcttattgatttgtaagaaaccctcctggagtgggacgctaccccagttgtgctctttttttagttgctaaactcttcttaagtatgggatgcagtacttagcatgggttttgtacaatctttctttttccttttttctcccttggagttttttcttttaaacctctaacaaggttctatgagttgaaatcatcacacaaagttctttaacacaattgatttaatccttgttagagatttggtgggtttttctacactatttttcaatagtgattcatttgcttatgttgatgaaataaacttatgccgtaacaccaagcacacaagaaataacccattacacctcatcaatggtctatctccctgacaacagatagcttcaacatacaaactacaaattttttcaccccgtttactaagagattaacgttgggtggcaagagtagtcagagtcagacaatgtcaagaaatttcaaacataattgtgacaaaggtgaaggttaatgatagagcatcaaaaaatattctaattaaaatagaccctgaaaagaatgggttactccctaagagatgtggagccatgcaagcagcttatgtatggtttcacgagaaccgacatcattccttgtggtgaaatcaaattaccactcacagtcaaaaattcctcctggaaaacatcactatgtctaccttcatagtagacaacaccaagtttgcttaccattggaagttcaacactctatgacctccaagccatatcatttatctaccatctatttgttaagttctcgacagtagctggtatcgtccgtctccttggcaaccaaagagccccatgcgagtgatacaacacattgttagcactcgagaagaaaacctcctctgacgtgctaatagctgaggggagtaaaaagacctcctccactactgagacatctaaggggacaaagaagcctttttcactatgaatacagccaaaaggatgacaaaggtctctatggataagaccaaggaaagaatggagaccgcacctacaatcacgccaaagtgcctccgagatgaggaagacatcacctccatattgcatatattaatttgagagttggtcacatccttaattggccaaagaacagtcaatgttctctacaacacttcgttgacattcaccaagaagacctcctctattgtaaagatgaggagatgatgaagacctcatccgctataaagctgaggagatgatgaagacctcttccgctgtaaagctgaggagataacgaaggcctcctccactgtaaagctgaggagatgagaaagaattccttcactgtaaagctaaggagttgaggaaggcctactatgatgtaaggctaaaaggttgatgaagacctcctccattgtgaagctgaggagatgattaagactaccttcattgtaagaaaaacctatataataataaagaccatcaaggatgcaacctaagaggcaacaaagactacacctatattacttaaacaagtagtgtgacaagagaactggcattgacattttggtgttgacataatttcatagtacctcaaataaaagggaatcactcaagaagacaattaggagacaattgctaagattatcaaaattgatgctcatctggtagtttcatatgaaagggcatagtgttagggtttatgccctaaacagtctgttgagatatttttgtttataaataagagtttaacattttcatatatacttaattgttaaattattaatattttatattgaatactttatatatataaatatcaaaaaaaaaattatgtatacacgatattgtgacttgtattgtacggagaattaagatcacttagcaaggaataaaactgtcagcaactattaaagttttggaatctttaatcaatagttgcgagtgcagttcactgatgcctgttatttggtgcgagtaatctcgattcagattactaatgtagtatgacatttaagtgaaagttttgtatatataatagagattatatatatcatggaatgatatgcaattaagttgtctttgtgaaccatgtcatttactatgaagacctaatttatagagtaatttgcggcaaaaatacctaagttttactctaagtagcagataaatacctaagtcatatttttggcggtaaaaatactttctattagagttctggaactttcgtaggtacctggtcattaagtgccaggtaagtgcccacttgtcatcttctcattggtctaaatcatttaattttaatttttaaataaaaattattaaaatattttaaaaactattgaaaagccatctaaatatataaaaattaaagaaaactaaataaaaaaattaaatatttttttttgaaagaaatataatagttaaaatataaaaatcattaaagtaatatagtgaaattaattaaagcttttttaataaaacaaaaatacagctccatcttcaccaaaccgaaaacccagaatctgcccaaactccattgtcaaacctctacgaacatcgcagccgaagctcaccacattttctgacctccaagaactgtgcttctcattgtctcaccgcgaacctaaatctcgatctcatccctatcaatcttgaataacaaaagggtaggggaaaaatacatctcattttaatcatcctagagtgcggtagtgaggacttctaaggttgggctcacgagggctcgcgagggctcgatgatggtttgtgttggcgaaagacgagagagaggaggtggccggaatctgggtgcttcagatttggttatgcatttttgaaaaatatttttaatgagttttcttattgtttctgtcaaatctaattgctttaatatctaaaatatacttcttatctttcgcagttttatctcgcacttaaactcgtcccctaaatcagatctggtgctacgaagagagaccctaaaacgtctttggagatccaacggcggtcaggatcactcctctaagggcatttcgaaacttcaacaaacgatatgagccgacagtgtaccaacagtcagaacttcaatatgaagtaattttttagattaatttgacagtgtatccagtttctcatttgtgttgcattatgcacatgaactgctggatatggatttgactaatgttagaatttagtttgtgattttttgtttctggttattatttattaatgtgatttctatgagttattgttttttattttctactgcacattgaaaaagaaagaagaaggggtgataaactgataatggtggaagaagaagacgatatacagttattttattttattgaatgattagtaatctatgttttaagagaaacttagttttaatctttattttttttaaaaaaaaaaaatatttaaacatatatatgtttaaaattttatagtatatttttcatttttttatattaattttaaatatttaaataattttttattaaaaagtaaaagttaatacatttggaccaattagaagatgacaagtggatacttacctggctttaacggtcaagtacctacggaagttccagaactctaacagaaggtacttttaccgccaaaaatacaaacttaggtatttatctgctactcggagtaaaacttaagtatttttaccgcaaattactctaatttatatcataaagatgatcaatagtaaatcaacttgaatcctgactaatcataaactcatgttcatgttattaggttcttagagaaggtgattcttaccacttctattttaagaatctaataatatggatggctggaaacatgatctaaaattacggaatcatggctttcttaatggatcaaatgttggctccctttaagtgttgattctagaactaagaagttgcgcacaaatttagattggatctaaattatactttgactagtgaactaatggtactaaaggataaaaaaataattagaagagtaaaatgataatatgaccaaaaataattacgaatcgatataaggagggctaatcactagaattgattatatcaatggatactgtagtaaaactcagtaaataaaattctataattactaagatttcgattctaaatttatagtagagtaatcatggaattaataaacatggttatttagttgatgagattcaataaataatctagtttattgtaacttaaaattataggtccatggtccctttatcgtcaccttgaaataggagtgtacgtcggtcagtttggttagtttatgttatatttcattcaacccaatataaaaattgagttacaaaaattaagtgcagcccatccattaagaaaaatggaattagtaacccgcccaatgaaattggtcgggttaacccgtccaaaccgacaattaatgttttattttttttacattcaattattatattataaataattgagataataagataaatatatatagattaaatttaaagttcaaatcaaccaccataaaaatacatagtattttaaactttatatttttttaaatatgtatgtaaattatatgataatgtaattatatataataaaacatatatacatatatatatatatatataaaaccctcttaatcgggttgatcagattagttcgggttgattggacgggttgatattatttttaacccgcccaatataaagattgggtgggttatatttttgccgggttattcggtttgcattattcatcgggttatgtcggtttgatttgggcggattattcagtttgggcggtttataaaaacttatgtacatccctaccttgaaatattgtcaagggaagagatcaaagttgtatggaagttcgaaaaaaaatctattttaatttgtcaaaatagtaattatttattttgtaataaacaaatatttctttcaaatttattaattaaattaattggggaatagataaagattttctctacaaaagacaccaccaatgtctaggtgacgccattatcactatgtcctaacacaattataggcgcctatcatatagagtttttcccattggatttgtttttaggttaattaatttattaattaattaattcaaaagataaatatttatttaaatttgaatataaaaaatagttatagatatttttagtggttgagatattctctaaagatagttgagagatttccctcaatcagttataggaaataaatatttataatagaatttagttatattatttattcaaataattaaatataatttttgaaaagattttaatttaaataattaattaaataaaatctttattgggtttatttaatataccgtataaacaaaattcaaaacaagaatttttagcgtaactttttggaaagcctaaaaagaattgttctgatttaatcttttctccaaaaatactatagaattgttctttcttatgtgttgagaattcaacaagaactttgtatacattttatcctactagcccacactagtcctattgtctggtggaagatctagaagatcaaggtgtgagtttgacgacaccgttctaaggatactacaaacaaaaagactcgaggataccttgataggcttcaagaggtaaactatcttttcatctattttactttcaaatttaatgtatacttatggtaattatggggatatgatacgataataatcataaacttttattcaattgtgtacctaatttagtaccataaaactaacatttgatatcaaagcagttccattatgtacatatattaaatgttgtgtgggtcttataaatttatatatatttatatatgtgtgtgatatatattgtgaatggattgttatgtattatgaatgggtgtgagatgtgaataattaattttttggtaaaaattgggtgtagattttgttatttatttttctagaaaatattgtaagccattaatggggcatgggaatttttatgtaattttaattttctaaaattattttgcataaaaatttttacattgtaaattctatatgcatgtgagctcagtttctaaacttgaaacccgaatatgcaccttaaattccacatgcatgtgagctcaacttcctaagaacttcgaccatgctccatgtaatatcccaataagcctaatggtaaataattagggtttatatttatattatgggttaatcaggtaataagtgagattatgatcctactaattt

SEQ ID NO: 17274 - DNA, 2452 bp, Cannabis sativa
atatcacccaagcataattatgagccttcgacatttataaaaacactttttaagactttaacagctatatgtatccctaaatcacacctctctgtttctacaaattatttgcttttctttaatgttgttaatacacaaacaaataattataagaaagctaacaaaataaatttttcaaatcatattttatccacctttgattataccattatttaaaagaactagatatcaatatcaattgagttcaagcctcaaggagcaaaaataaagggggagttattgttaacagtaagtttgcaacggatcttaggttgtcacctgcaacataaggttaacaggtccttcagtagctgtatatgggaattctccagttccacattcaaacagagcaagaccaaggctccaaatatcagctgggtaagaatagttgtcatttctaatccgctctggcgacatgtacgtaacggtcccaacaaaagtggcacactgcaaaaaaacaatataaacacataatatgatcaatgatttagagaaaaccagcattcccaaataaacctctatctcaaaataattcaccaaaaaatgtcaatattaacaaaatcacttaccattgccactgaattctctaaaccagcactaattccaaaatcagttatttttggctctcctttaagattcacaagcaaattcgcaggctttatatctctgtgaactagatgcctaactccatgtaagtagctcaatccctataaaaggaaaatgagcatatatttcttttaaaggacaaacaaaccaataccaatacattgaaaaactttataggaagattcttttacatacatgtagaagtttttgaaacatagaggaaagaacgggttcgggtattttctttctcagctttaggatatcagccaaagaccctccatccatatattccaaagctatgctaatttgaccagagtctggcgtataaaacgcaccatgaaattccacaagaccttcataacaaggtgcctcacacagtgtccttatttctgtcaaaagctgttgtcttttttcctaattaagtatcaaaatcaacaaaaatatataaataaattaattaaaaaaaaaaagaaaaagcaaaactttttcaaaaactagaaaaatatttatcttctttagggctgaaatcacattaatgttaatttccaaccaaaaagaaaagaggaaaagaagaaaacggtaaattataccttctcaaaaatattgatcttctttagagctaaaattcgatgagtcggaatatgaatagctctctgaacaacactactggcgccattccctatcgctccgaataccctcatctcatgcgaggcacatcgataagtcttctcactctcgaaggtcgcgtccaccatagcagccgaagctgtgcatttctgcaacccgagctcattgatgttgtaaacaccatacgattggctcaataagttgactgttccaccgtccgacagcttcacccaattcaaaaacaacaaaaacgaaaattcactacgaagcaagaggagatattagattacgagagaggaattcgaaaattgagagtgaaaatttcaccgtgtaagaatcggaagggtcgaaggttgaggatgaagagaaacccttttcggaatcgaacaatggtgtcagcttctttctcaattcttccaatccagccatttttgtggcgattctgtaccaatgtcaatttcaatctgttgaattgaattactatttttgtaaaattaataggagaaagaaaggtttagaaatcaaaacaaaatgacttagttgaaacaggtcaaaggtcttctgtaactttttttctgctcaagacacaatgcccaatcagttaccgccacgatagaataaagaaatctaatgatgtaactgttattaactaatttttcaaaatcactgaaaaagttctatttttattttttgattttttttattcactgttttaaaaaaaaagatatttttatctacaaaaatatattttcaattattattttatagtttatttatgattgtattataattgttatgttattttttatagttgatttatagttgtcttagagttgatttctcgttatttttttaattctttgctgaataaaatgtatctttataattttaaaactttaaaagagtattgttgtgattaaaaagttaaggctgtaaaatttgggtaccgtttggtaataattgtgttttttaatttttaatcacaaaaaataaagtaaaatttttgtttttaaaattttgtttttgaaaaacaaaatacgttctataaccacttttgtttttcaattttaaaaacaaaaaacaaaagtgtgttttgtaaagttgactttttattttatcatttgatttatttaagtcgggtctgggttcggggccaggtccaggtccggatcgggtgcta

SEQ ID NO: 17275 - DNA, 4882 bp, Cannabis sativa
atttttttaacacacatctaaatttttaacacatttgcaaaaaattgtcgaaaaaaattggcaacatgtttttttaaccgtactcaaaattgctatacatgagcataaaaagatggggatgagataagtaatcacatgtttatgtttactttaaaaaaaataacttaattttaatatggtaataatcattttttataaggattattaacattatgtttaagagattgattaaatcccctaaataagctattattagttccaataaaaaagagcaaacaaaaagttgttttgtctacttttttttgctttttttcaaagaaagattcctttcttattaccaccattttttttttattaagaaccagacacttaattaatttgttatactgattaatcaaacttaagaacccttttacacattacatataataataatgttttgtaactggtcaacttataaatttgaagtacatacaataaaaacaaatagtcaaaaaccaaccaaccatacatttcatcaaacattaaatactctcagcaatatatttttttcatgccttaaatgaggattaatgggccccctcacatatcacaatcaaagtgactcaattctaatttaactctgttcacattagcctctgtcactaaaaagtttgcatttgtaattgtatttgtattaagctaagtattaattcttcatttaaatttctaaagagaaccaaaccaaactagaatgatgacagtactaagaatatccaatataacatgcatgtgaatatgaataattgaatattattataaaaatcactgcttaataattttggaccagtgcacgtgcttaaacaatacaaataaatacatacattcatatataataattatatatataatgtcatgtaagacaaaacctgtttaccacccacaactgtattccatcttttcttgcctccaatttttttttcttttcttcactttattttgtctttgataattcatttcattctctttagtcaaaagtttctaggggcattgggaccctccctcactccctagccaattcttctttttgtaatcttaatcactaaaactcactattcaagataattgttaaatcccaaaactaattaggattaaacaaacacttaattagtataaattacctcttttgattatccaactgtaaagtaaacaaactcacattggatactgatcaagaaggacaaagaaagctacaaaaatattaataataatgtaaccacagagagagatcccttctcttttttatttcatttttcaccactaaaatcacaaagcccagaaaatcccagaagctgaaatctctcaaccatgcctgcaaggccttaccctgcaaatcccaactccctaacaactccaacaacaccaagtttcttaaccaaaactagagtcttgttcttggttttgaccatttctgcttctttagttatacttgcttctattctctactttctttaccatctttggcaatctcttgttcacaatagagctaagaccattccatttgattctagtgcacctctaaagcttgaaagattcccttacaaagagctaaagagtgctactaatgattttgattcttccaatgttattggcaaaggtggttctggtactgtgtttagaggcatattgaggagtggtaagttgattgcaattaagagacttgatgctttgtctttgcaatcagagagagagtttcagaatgagttgcagattcttggtgggctaagatcaccatttttggtgacccttttgggttattgtgtggagaggaataatagaatccttgtttatgagtatatgcctaataagagtcttcaagagtcactttttggagatggggttttgattttgagttgggaaagaaggtttgagatcattttggacattgctagagcacttgagtttttgcatttgggatgtgatccacctgttatacatggtgatgttaagccaagtaatgtgttgcttgattttgagtacagagcaaagatttcagattttgggttgtcaaggattaaggttgagggtgagtttggtgttgatatgtttagtcaagatttggggaaaagtcaagaactttctgggaatttgactccagagactcctgcaattagtacaccagtggaagatagtcctcatgaggtagattttgctcttgctttacaagcttcttcttcttccaaaaatagtaaagcttgttataatgtcaaagctttgaacttgaattctttgaattataatgccaacattgcaaatgctaaagggaaagaggtttcaacagtagtagattttggtgttggtggtggtggtggtggtggtggtgaagatgattgttggaatcataacaagtttgttgttccttatgatgatgagccttgtagtattgatgatcatagtaaggagttgtccaattcaaacacttgttctgttgttgatgaggttgttgatatgaaacagtgggggaaagattggtggtggagacaagatggtagtggtgaattatgcagtaaagattatgtcactgaatggattgggagtcaaattggaccaacaacaaatcctgattgggatgaagaaaagaagaccattcctgacaaagctgatttgatgatgatggaagaggaggaagaggaggacatggacatttcagctcccttagataaaccagaagaagaagcaaatgatgaaccccatttacaagcattcgggtttgaagtttcagggaagaaaaaccgaaagaagaaaccaaagaagatgcaagagtggtggaaagaagaacacttagctgagattagcaacaagaagaaaggtagtaatagtactaagagtagtaataagctgaaaaggcttaaagccaagtttagaaaaggcttcaaaatcccacatttcgatatggggaggcggttttattttcgcagaagaaagaattttgatgatcagggtggtcaaattgattgtgaagatcatcaaaatggtgagttcagcttcagaagagggtggaaaaagaagaggaacaacaacaacaacaactcaattggaagtgatatgtggagtggagatatattcagtagagagctgagtagcacaactagtatgagaggaacactatgctatgttgcaccagaatatggtggctgtggatacttaatggaaaaagctgatatttacagtttaggagtactgatgcttgtcattgtttctggtagaaggccactacatgttcttgcttcaccgatgaaactcgaaaaggcgaatctaataagttggtgtagacacttagctcaagctggtaacattttggaacttgttgatgaaagattgaaagatgagtacaacaaagatcaagctagcttgtgcatcaacttggccatcacttgtttacagaaaatgcccgaatttcggcctgatataggcgaaattgttaggattttgagaggggagatggaactacctccattgccctttgagttttctccatctccaccatctaagttgtacagcaaatgcagaagaaaaaacaaggtcattgcagattaggcttcataacattattattactattattataatgtttccttttattgctaattttgttaatctttgtttttttttctttcacatttcaatattgggggttcttaattgaagagtgtattatatataagctgttattgtttgaaatttgaaaacaaactaattaagcttattgattgtgttgtataaagatggattatgttcttttaatgtaatgtatattaattaacatttttctcttatttactaaacttgatatatatatgaatgattatgagtattgaatgaaatataaagataaaaaatatagaatgaaaataatcaaatatttttagccattgatttgtagataaaagaaaatggcaaacatcaattgagtaactgaaatttctagtaattaaatataattgatttcttactaacaaagctcaagatttttaattgaacaactttcaatcttgatttatgttcttctttttgatccactaacacgtactttgatgtaaatttggcattattaatgatttcaaggtgaaaaaaaaaaaaaaagatgaaaagctttattttagtggttcctttttaattattataatttataccaaggcatcagcatgcatcgttaaaagattagttaatcatattcatattcatattcatgccaatagtgacttattattattattattttgatacaatataatatagtaatatttgggtgtataaataaaacaataataatttaaatttgtgtgtcatgattgctcatgcaatatataaataaaataaaatacatatatatttggtttgaaatatttttgagtgactaaattaaagtcttaatcaccggccaatttaaatcactacaaaactttatattattaagtcacgggagggatgtctgtaatatatgatcactaatcatcactaatcaattaactttctgtctctattaatataaagaaattgctatcattatcaaataactatttaatattaatagaaaaaaaaacataatttatgttggattaaatatattttcatgtaataatcatggtaaaaaatgctagtggctcaataatgccattttataattatatacaacaatactcgtatttaataataatgctcgtaaataaatataaataaattttgtgtcatctctttttcatattattttattttagtaatgtaaattacttataacttaaaaaaaaatcatattcatttatttataacatatttttttaaaaaaaaaaattctgcaaatattgaaaaaattatagtaatttatgctaccaaaattagattt

SEQ ID NO: 17276 - DNA, 5147 bp, Cannabis sativa
ataaagtgataaactaacaaaaaaccaaaatatatatttagtggcaacataattaattaatcatgaataattggactatatagctataagtaatatttaatttgaaggatcaacataaaagagaaattatagtataattatgtttacctttcgagttagtaggtggtcgatctgaacgtggaattctttccatacctgaaaattgatcattatcaaataatttataatatatatgatagactatataattttaaagttttatataggtatgtatatttgttaattaccactttacaaaagattatttttgacattttatataaggacataggaaaaacatttgtaattatatgctgaatttcccccacagtttcaaaaatgatctctaaatttcttctgtaaatgtcaaataataaccattgctccacaatttcatccagcaatgaacttgtacttctcactttctctattgaaggaacaacctgaaaaatataaaaataaaacaaatagagttttttttttaataaggaaaaaagttggataaactaataaaattagataagagatttattattggctcaccttttgtgaaatcctttgtgccaaaacactctcatatttattgcaaagggatttcgtcaaagatctccaatcgcttacatgattacgattttcccagaacaattttcggaccgctctacatataattataattataatcaatattaatattaatatacagagagataaatgaaagtactgccgattaattaatttagccctctactgaattaaattaattaacaacactgttcttttcagagtttttttttaattttccataacatatatctgatatcatcttagttatatttatatatgttgatacaaattatatatacataattaaatttaattacttaagatatggcggaaatattatataatatgtatacacttacatggagacaaccatttgatcgactttattccattctgcctcattatgaccatcaagcttattattaattttctgaattgatttatctatgaccaccatcgtatcattcaacatatttcttatcatattctgctcattcattttcttatcatcatcatcgccccccttcctcattttcccctttcttgattaattaatatatatcttttaattgatatatgttaaataattattcctgaatcagatactcacacaatttataaaaaagattataattaagagaataattaaacattatcctgaacaattcaaaaactagatattatatgtaacaaatatttaatatattgcatacaagatcaagaacacaacatatgctatacatttacatatacatgtatacttaaaaaaagtttataaaaaagattgattataagaattaagacgaagaagaattatgtacgcagtaaagaatgatcaagaaataaataaatatatatgtagtagtataaggcaattactgttaaagatgaagaatacgttagtacctaattaaatggttgagattctgagaagtgttgaacgaaatacgtagagatcaaatgtttatattatattatcacttatgagtagttctagagcacgaagaaaataatacattcgagattatccacctctaatggtattggcactaaaatgagtcgcataaaaaatgcaaccaatataaaaaagcaaaagagttattggcggtaaaatttatatcattacccgactaatttctttttccagttagtaaatccacattttatttttttaatgaaaaattgcattatagaaaatcaattcagaagaacttataaatctaggatatcaatctttaaaaacgaaaaaattagtatttttgtcctataaattttttataatattaatttgtgctcttatagtatatgattagttaataatactcctttaaattaatataaattttaaatatggtctttatataatattctattcaattttaccgtgaaatgaatgacgcagtaaatgatagttgttaaataaatgcaaaataattacattttactttttttttactatagtgattaaaaaactaaaaaaataaaaatataaattattatgaaccaaaaaaaagttttattgtattatcgacactagtacaatttggatctttaaagactgttttttcaactctttttataaaaaaggaaactcaatggtgtaaaaatactcgtttggtacaaaattagtatttagcggctttttaataaaaaccgtagatatatcatttattacatactatttataatcggttttaagatcagaatatatattcccagaaataccctctatgtcgtcagttttttattaaagaactgacgccatgacacgctgacacgtgttacgttttcagcacatggcgtcggttatttgataaaaatcgacaccatagaaggtatttatcaaaccctttcagcagacgatatcacttcatcttcttcatcacgaacacaacaacaaccaaaactagaaacccaccaccaaaaaccctccccaaccaccactcttaacacccatattaccctcatttatacaccattttaccattttttaaaaaaatttctattttcgatacttaaatctatacactaaaaaagttttgtctttttctcctatttcgctgcaaaccgacctattgaaaaaaaaattggtagtataactccaaccactaattttagtaacgttaaaactcaatgtccattaaggtatgaatatggtttttattcattttagtaacgtacattgttttatttttatttttgtaaatttatttgagatttttcttcttttttttttgatgaatcagctgtgattttcattgccactaaacttttaaaactttacaacctaaatgcaccttcaataaaaggccataatatatgtattatctatacaaagtatcatagtgagtttatactaatttttcaaaccattcctcatcacattgcttcattctcttcggcttgacacatgatattcgagttttgacctgccaagttacttgctggcagatttgatgcacagatgcatcctgctgattccacattttgtcatttctggctaaccataatcggtaaaccagggcagcaagagatgaggcatacacctgcttcttaaacctgctcattttgctccttcctatccaccttagcagcccctgtacataattggtttttgcatgccaattcagccattgcttgagctgagagaggcatgaactaggaacccccacaatcaaaaaacaaatggtctcttgtttctactgcaacattgcagaaaatacacaaaggactctctattattttgaatttgaacagccgatttctagtttttaatctgtcaagtgtagctaaccacaacacaaaactatgttttgggatattaagtttgcaccatacctctttgcatcaatgaacttgctgctgatggggagtcaacatcttgtagccatctgctattttgtactctcctttagtaaattgatcacaatctgccataatcttcaccttctctttggccttgaccacctttttccagtaccagctgcaatttgatggagctttatagctccaccaatcctcttgcttaatatagacacaatggatccactttatccaaagattatctttcttgttcgccacaacccatacatgcttcataatagctgctaagttccattctttaatatccaacagctctaaacctccttctttctttgttttactcaatgtttcccaggctacactacctgatccatccatatagctttgacccttccataagaagcacctacagattttctcaatttcagatattaccttctttgggaggatcagaatttgggtccaatatgtgtggatagtcaataaaacaacattgatgagcaccactcggcctgcaaaggacatattccttgagctccatgtgtgaattcttgctgtcattttatgaatgagacttgtacattcatcagctgagattttttaagcacaaataggtatgccaagatacctaaaaggcacattctgcctgctgaatcctcaacagtccaacacccttttgacctctgattctagcattccacaacagtatatagcagattttgatttattaggctgcaaacctgatgtctcagaaaaaagtttcagcccttggagcatgtaataaatactcttgaaatcacccttgcaaaataataaaacatcatctgcaaaactaaggtgattgagttttagttcagcacatctttcatgaaaataaaagtcctctttctgtccaaccaatttcaaaatcctgctgaggtactccattcccaatacaaaaagtaggggagacatagggtccccttgtctcaatcccctcttagattcaaagaaaccatgggaggttccattgaacataagagaaaacttaggagtcctaacacaagtcattaccagacaaatgaattaagatggaaaattaagagcattcaacatctcctctaggaagtcccaatctaatgtatcataagctttttgcaagtcgagcttaatcatacaattcggccttgtagatttcctaccataatgtcttatcaagtcctgacatatcataatattatgagctatatatctaactctaacaaaccctccttgattttgagaaacaatatcagagagaattagtttgagcctagaacatataagctttgtagctattttgtacaggacattgcaacaagcaattgggcgatagttacttacagtgttaggacatctgacttttggaatgagagtaaggactgttgaattgatctcctttagcagcttcccagagtgtaaaaaggaggtaactgcttcaggtatatcattgcctacaagatcccaattatcctggaagaaaaagctactatatccatctggcccaggcgcttttggttccaggaatgctaaatatagcaaccttcacttcctcttttgaaaattctgcttccaacaaggatatatgctgatttgatagaaccggcccctgcctaataactttcatttgtaccctcttccttgtttccatcttagcattgagaaaacttgtgtaatgttgcagaaaaacatcagtaactgct

SEQ ID NO: 17277 - DNA, 4673 bp, Cannabis sativa
aacttcaaacgtatttttgatactgtaaattattcgaaatttttttaaaatttacaggaatgatgttgtaagcataacgaacacccctataaaaaaaaaattaaaaaaaatatttcaagatttattttttagcataaaaattaactaaaagattacaacaaaaggttaacagtagcactactcttgtaccttttaatatttcttcatatattatatattaccatttcttccattctttctttctcttacaccaaaaagacaaagtgtttaaattggtcaccgtgaacaaaggaatcaaatcccaatatttaattatttatttttatgtgttgtattgtactaataagtaggtgtaagaagtactaaaaagtactatactagacttatactattagactattagtctatttgtattctcttctcttcttttgagggtctctcaaatgtcaaaagtttcttttctatgactacttttgactcaaaccattcactttactattagacacacattgtaattatatcttcaataataaaataattttactttttatcaatttttaaaataattgagagaattatcatttaattaatgtacaaagatgaaagttcttttcttggacaaatataggaacattcaagactttcttctaaaaaatgtgataaatagttaatataattctaaattttatatattataaaaattattaatttgaatttttattttgttaaatggcaaaattaattatatatttttttttaaatagtataaataagacctcaaactcaatttttaatatttttttttaatataaccaactttaaaataatttctagcacgaatggatacagaatacgctagttttgtcataaaatctttaaaacgtattattattaagttttattttgataaaaaatcagttcagaatactatttagtattatattgtaaaatacaaagtctaatttgtcatttacagaaagttcaatcgttaatttttataaaacatagaattcaaaatagtattgacaaagaagataaagaattaattcattatgtttttttattatttattttgatggagatttcttgatacctaattagaaatcttgattagaataatatgcataaaaaataaatttattcattgtgttttgcctttgattcctatactatttaatcaaagtctcatactcaagcaactacttttaatcttttgtaaacacccaaacaaaaaactcgataaaataatccctaactcggaaggaccgagttacatacatgcatactagggtggcctttccccttgccctctcgcttttttttcttaaaaaataaattttattatatttctcgcaatttatcttaatttttcgattttcaaatgatgtatttgatctcatgagatagtgttttgcctccgtccttgcaacatattatcttgtctaccaaacatgccctaattttagacacatagccatggcatggcaagaaaaactttttttttcttctttttttaaaaaaaaaataaaaaatgaggcaagaaaacttcatttcactaaaagtgggccaagattaatgggccatggcccatgaaagggatggaccaatccaaccgaccgactagattgggttgacttggacatttcttttgtttcgtaaagaaaggctcttcttaccccatttgggctttctttgccccatcaaagggcccatattcttagtgggttgtgggttttgtgtgggacatcaagcccaaaagacaaaaataatttttgatgggatttgctagtgtttgaggtccactcaactaataataatggtaaattgaaaaagtgaaagtgtgagaaaatatcatcattttaagtcatggtacttttaggaaatttagataagaaacttctttatttaatattaaaaaagtgttactgtgaacctcttaattaatttttgtgtctagaaacacataccgaaatatttttcttcatagtagtgttcgttatactcacaatatcattcttgtaaattttcttaaaattttgaatagtttacaatgctaaaaataggtttaaagttttttgaatacacgttgtaaactaaaatatcatgaactccattttcagtattataaactatttcaattttttttttaaaattcacaaagatattgtaactataaaaaatatcactataaaaaaaaattgaaaaaaatatttcaacatataattttgagcgtaaaagctgactaaaaaattataataagaggttgtaatcaatactcctttaattatattattataattttttttctatgatggattatggtatttataaagctaaagtaagtggactaaagattttgattgaaagtagtttaacaagaagtagtgataattattttagcaaaaaaaaaaagtaattatgattttggggtgttaattattttttctctttctttctagttttggcaaaaaataattataatgaggactttttaaaaattaaaagaagtgctcacatgcccatttatagtttggtctcttatttttgccatactttttctttgtataaaattagtttaatataaaaactagcattatatcaaataagatcaagcaacctaactttgccggctacttatgaacactttatttttcaattattaaaagtaatataattgctaaacttagccaacacaaagtgcaatcttttaatttttttcttaaagaaattgtttggactagatatgttaaccaccatcttcattcttttattattattatacttttagtataaaaaaacaatagtgagttatgatttttgccctctaaattttgatatgtattaaattttgctgtcaaattttacgttaaaattttttcttgaactattgagattgtttgatttaaagacttatgtcgattttattaaattttactaatataacgattgtgtatgtactaaatcgtaacccccaaacaatttgatatttataaaattatacttcccgaattttgacatgtaccaaattatactccttgaacattcattcacgttagacttctgttagtaaaattggacaaaaagtccttaaatttgatgatctcaatagtttggagaacatttttaacgacctaaaaattttaagaaatattatttggtacatgttaaagttcgagagacaaaaactttatataatacttctctgagacttgtgagtacctagcttaatcaggcgagaattcccaattaaacaaaaaacgaggtaaaaatgaggacaattttttattctgcaattattaaatgaaacatgaatattataatttttcatccttaataagaattttatatacattattggagtttattgtttgtcattattgttttttatttggcttttaatttatatctttgtttaatatatttgtatattttttctttgagtttgaagaagaagaaaaacaaaactaagttaaaagatcatccattgctcatgacacaaataagtaccataatatgtggcataaacataaaagaaggtgatgagataacttctatttatatttagtaaggtttcaaaatttatttgaacattaacaaaaaaaaaaacataaaaccaatgcaataatttatttataattttagaaaaaagcatagaaaaaaccaaataaaaacttatactataactaaataataccttaagacaacttttttttttaataatgttaaaaaggttaagatggttaggagagttgaaccacacaacaatggctgcaaagtactttctctccttcctcttctattgtctcaaatctcatccatccatcatttgaagccgacgtgtcaaatttaaagaccgttgatttcattctcggtaaatcatcaccgtccattcgataacccgccaaaaagtacaaagagtttccaataggtgcaattgtgagatataattgttgaattgtggtactattattggtaattccatgttcacaatttagtctagacccttccaattcattccaaatattttgttccaaatcatatgcctctatatgacctttccacacctttaaacaatctcctgaacttagcaattttccattaacaacaacaatttgattaggtggaacatccaattgccacattcccctcattaggccccactgacgtgtcttcgtgtcatatacttcaactgaacatctctctgccataaaattatgtggtgttacgtcagaattggtttttagggcaaacccaccaaccacgtggatctttcccatccacgtcaccgcgacacatttgtatctcaaagtgctcatgtcaggcaaatgaatccacttgtcgagattaggatcgtacacttcagcagatgagactccgactacactattcaacgtggattttcctcctgccacgtagattttattttcacaaacagtgtaggcaaaatcgtaccttggaagggccatcgaggcacaattagaccattggttcgtacacacattatagcgcaacaccgaagatgatacactatcatcttcttctgacgtatgatcttgtttttgatgaaatagtttgcccccaataatgtaaatcgaatcaccaagtgaaaccatagcaaaatcttttacaccttgattctcaattatgcacggaaccaatgtgacaaagctcca

SEQ ID NO: 17278 - DNA, 4938 bp, Cannabis sativa
  modified_base (2882)..(2886): a, c, t, g, unknown or other
ttagcccaaaaatagacatatttatagttttgaacttccaatttcttttttttttctttttgtgaaactaaatttcacacatttttactggtgactaaagttttaaattactgaacaaattaggattttatttttttttattcaaaatatttaaatataaaaagaaaagaaaaaaaagataatctcacgtgaaaagtctttaaatagcggaggccctataaatattattgcccactcattaaaatatcccaaggttgcgttatatttaggcgttgggtttttttctttctcttgttctgaattttgaagcttagggttctgtttcccttttcctttcgattccaaatcaaaaaccctagctacaaccatgtcttccaagcaaggtttttttctattccttagtcaatatttcgttatttgtaaagctcgatttatgttatctggtttcgattatagtatgaactgacttctatgtatatttattttgtaggtggaaaagctaagcctttgaagcaacccaagaaggaccagaaagattatgacgaggcaaacattctttttaaattgaattttatttcaattttactagtggtcggtagaattaggatcttgctaactgagtcttttttttttttttgctaactgagttgatttatactgttttaatttgatcatcttgttgattttgctaactgacttgatttgtttatattgttttaatctagtaatctgattacctgggctgattttgctttatttgataagcgtttgttctgtttcataactatttgaatatttttgttaaccatcagggtataccgattttggccctttttttagcttaattttgaattaatcaacttcatggtgtttttctttacttagtttcttttttaatttgatcccaatgggattaatcttttgctttaaaactatgatttctattgaccataggtatccaagtcttcttgtaaatgttggatgctaaataactttttaataaccttgtcactatttagatcgatgtatagttattaatgatacatttctttgtatatacaatggtcttttgatgattcaaactagtttttgagtttcaaggtttttcatgtttctttcatcaaatatataattcaaaattgttacacagcatactgtacaatacagtgtttctagttgcattgttctgttatgtttaataacgttagctatttccacggtgcacctttatattttctgcctaacttggtgtttgaatcttgttctaaccaacatataaaatataatgagtttcatctgaacattgcaaaaaagaagcattaacactaaacgatttagcatttagcttttactttttgccttattattcaaatattgggggtgctttttcctaaagtttattaattctcacacacatatattgattaattaactatctactcctaagtagttcccatggctttcttattaaaacaatgtatatcattgcaacaagatatagtaactgaaacttatttgcatggactcttttcttctctttggattcgtgctactcttttctttatgtcaagcctatatatctactgtgtaatgctgttcaatcttgttctgaccgcttggcttgtgttcttatgaacagactgacttggccaacattcagaaaaagaaggaagaggaaaaggtgagagttcgagtctgattgaccgtgtgtcctttctttaatgatatgttttgtgaatagcattttctgattatgattcttatgatgtttaggctctgaaagacctcaaagccaaggcacaacagaagggagcttttggaggttctgggctcaagaaaagtgggaagaaataagggggtctaatactacaattccgatgggaatgggaattagtattcagtatttgtgagctgatgtattagtagaatcgttgtcataagtcacgataacgttctgtggatttacttatcatttatgtgatggtctatgttgtttatgaatttgctccttaacttgtttgataccccattcttaatagtattttaaacttgctctataattttcattgcgttccttctaactttgctgctgcagactgtttggctaaatgggccagggaatttgagatctctggtttatttagaagaaaaaaagtgtaaataaattgcatgcccttaaccaaattatctttattctacattgaggttgatacaatttgactttgaatggttaaagttctgatatagagaaaatgtgcataatgaatcttttaagtaatcactcttgtaagtaatataatcagatacataactaagcataacaagtaaagcttacgagttaatacttatctttacatgaatgaagattgacttctataacctacaaaatattaaatttaagaagataactaatagttaaaacttgcttaaacataatattttaacaaaaaattgcttagaaaaggctgaaattgcaacttcgcaaaatcaatagagaatttccaaatattaatagggaaatttgattttctatacttatatatatttaatattttatccttaaattaatacatatcaccactaaatatatatgatcactttatctaaaactataaaataaccctctcataactcaatcccatctctctcgcatttcagcacatgcatcggaccccatcggagtccccgtcacacccacaaatatttttagtgcaaaaacataaaaaaaaaaataataataataatattggtagtctgatggggtccgatggtggtccgatagtcccatgatgctactttttttatatacaaaaacattaaaaaaaaaaaaaatagggaccgatggtcacctgatgctacttttttttatgtacaaaaacatnnnnnaaaataaaaataaataaataaattgtagcaaacattaaaagttatgatatttataaatattagttattatttgtttaggaaaaaaaatttaaccaaatgtaatcataaaataatcaaatttccctattaatataacatcgatgtagtttacttcgagttgcccttctaaggtctcgtttatgtggctgtcatgtcactaatttatgaatcttaaagtaaccaaaaccaaccaacctcaaattcacatgaattatagagcatgaacatcaatataatttgcttatagaggacattacacctaaagtaaggacatgcaaaaataggacttccttcaagtcgctggcagcaatctcagatattctaagctaaaatcatatcagtcggaatgtgtagactggagactgcaaatacagttcaaaaaaactcttattttatgaagctattcttattgcttatccgggttatctggattttcccctggatcttcctcttcttcctcctctctcttctcctcctcttcctcatcttcttccggaggatctgctggcattggaataggcataggcgttttcatgggggcgaattgaggaaatatatctggtctccttccgggcttgggtctttcccattcctgtattgtcaagtaattttagataaataagatgagaacacattatatagtttggcaaaacagtcaaattccattaaaaaattggaacttcgacacgattttatgataatagattacaaagtttatccaacaagtagttaaacatattttttagtcaagtaaatttggctagtcttcatttgtttgttggataattaggtaacaaggtatgcataacaatcacgaattgcctatcctgaaaataaaatttccattctatcaattaatgataataatgtaaaaaagaaaaaacacacatcttgagtaacaaacatgtttaaaacgataattagtataacttaaatttccattctttcgaagaaaacaacacaaaccttgagtaacactaacagaagaatttgtttcgaaattagcagtagtcacaatggttccaataatcttgaggttgtgcttttgataaggatttgggaattggcagaataggccagagtttaaaatatgaaaatatatagatttttaatattgcgaagcaagtacaatcctaatgcttcagcaacaacttcaaccaatacttgaacacagaataaaccctaaatcagtggcttaatcattgttgaatggtaagtaaattgacaatgaagattagtaacaaaagcaacatatccctaaatcaaaaggataagaaaatccagtaaaaacgagaatatagtatacatataggggaaagaagagcttacaatagggaaatcaagcggagagcggcgagtcatcttttcctcatcgggagccattcgaactacatgacttggaaatcgacggttggagaatagtacagggaattgccggcggccatggaacggtgttggagtaagagaactattgcgacagttggtagacgaaaaaaaggaagaagatgaagatgatgatgaagttgatgacgaagaagaagacgaccttggggagaccgccggagctgaagccagaggtagtgcgagactccgcaacgccattagggttgggattcgtgcttctctctctcttctcttccgttcgctggtcctctctctctctctctttagtctctctctctctacaccaaccacacaaaccacaccgtctgtggattttggaagtaaatggagatcggaactcaaagcctctctctccgttggacctttcaatgtgattttaacattctgggcctcagactggactagtgggcccataagtaagtaccaggaacgcacttttaaggcccatacagcccatttgttgaataatggaaggggatgacccatttccaaattgcggaaactacactctatacagtttttatattgttctcttttatttttaccttcttttttaaagtctatcatttttatctctttttttaaacattgtaccaattttgcccctgt

SEQ ID NO: 17279 - DNA, 3829 bp, Cannabis sativa
tatatttaattgaaacatacctctttttatatgtattgtacccaaaatatcctgatataaggaagtcacataaagagttgaagtgacaaaagcaaaattgatacaatgtttaaaaataaaggtaaaaataatagacttttaaaaataaggtaaaaataaaagagaacaatataaaaatgatataaagtctaatttcctctaaaagaaaattatgttttcattatctttcatgtttctttttaggaattatttaaaaaaaaaaatacaaaaacaataaaaaaaaaaattataaaaatatagttgtatgtaattttaaatatttttacgattcttaagattttatttacataaaatacaattttttagtatatttttatgtaatacttttgttattttactgttgattttttattatttgtatattattttttttaccttgtttgaatgttgttttcttattatttttatatagtttccttgttatttttataaacaccgtaaaaaatataaaaaaaaaatcttgaaatgtaaaaaatgtattatgtaaatttctcttctttttattatttatttcatttgcttataactccaaatagaatattatatctttttttatatggtaaatataaaaaaaaaaaaaaaaaaaaaaacaattttcttggactagtgaggtggcccaaattcatgtatttggcccaatttaccaagttatccaaatccacgattgatttgtgcccattttaggatcattttttacaaaattaccctccaaactgaagatggtttaaattgaggccgaaaagattgatatttaaactatgttgtatttttgtttcatttttcatttctaaaaacgtgatgatgagttgtcttatttttctgttattattttttaacaaacattaacagcggatgatattactataggccttgttaaagttaacttattgtaaaaaagttttaagagagaaagctaaaattcattgaaatcccaacaaaagtcaaaagtcctttcacattttcataaacccaaaaataattaatcatatgtcactataaatacacattgaaatattagtaacttaaaataccttgtttgtaatgtaactagtaactcgtttataaccattaccaattccttcaaatcatattgtctgtaatgtaaaataaatatggacttttatttttgttggatttaaaaatttttgtctaattttacgtgtattttcaaaattcaatccttgataccgatacattaaataacacaatttaccattacactaaaccaatttattataatgttttatctatatatagtgatatttttttcacaatttttgagccttgggtgttcagaggtctgaggtgtaagtctagcttgcttactcttaagggcggccattttttacgtggatgaaactttaggagacacaatttgatacatgtttaagttcgaggaagacaatttagtagatatcaaagttaagaggcacgatttagtacataaataatcgttgattaagtagtattggccagaagtccttaaaggcatgatttggtacatgacaaaatttaagagacaaaatcataattagccttaaaacaaattcaaataatttttgttttttttttttgttaaaataaccatatcaagttagaataaaaatatagccatacacaaaaagtaaaaaaatttcttctatcaaagaaagttatccgtgttccatcaaatttacaatattgatttttttttcaaagaaacattcattagataataaaagttaaacttcagagtcattacttaccatggtgaaaagtaattctaaagtagtgatcaattctatcaatgctatcgactccaagtaaaaaattgagagttaatccttatttggtcaaagaatcatttcctcctttgttagctatttattttgttatacttcaaaaacttatgagtttttatccgttactaatttaggtgattatctatttcgactattcctaaaaactaatgaccacgaagttaaattttttctttctaatgaatgctttttttaaaaaaaaaataataatttataatattgatgttgaagaacataatatattttctttattaagtgaaaaattgagctaatataaaatattaatacaattttccatttaataaattataaaagtaaagagcaactataaagtagttaggtcttgttcatatcatatttctaatttatgtaaaaaaaaaaataattacgtttgtaataaattatcccaaaaaaaaaaaattctaatattctaaatacattacaaaataatctcttttttaattttttactttcaaaaaaattacaataaaccgataaccaattgacgaaaacaccctcacagcaaaaacaacaaaaacaatcacgaacccaccatttcatcaaccgccacgtgtcgtcttctccaaggatcccacgtagaaaaacactgttgtcctctcacagccagcgaatccgcaataggtttaattaccaaaataccctcacccacgactgcacaaaaaaacgtcaaaagaaaaacggccaacgaaacgccgccgtacgccgtctgatccggcgaccaaaccaccgacaatccaagcatcacgatctgaagaggaagcgaaatcaaaaccgttaaagccaacccataaatcctcaacctcaaagctttattaatcaccacagaaaccactctccaagccgaaaccaaaaacatcacccaaaaccctaacccaaacgatccaaacgccgtcgtactgagcaaaggataagcacaaagcaccgtcttttcaccatcgacgaagacagagcttctaacaaagtaatcaggaaatcgaaccgtaatcgattcgatctccgcgacgaagaagagaaccacgatctgtaaacagaaaagagggaaaatcatgagcagtacggaagcaacagcccatcggccgttaggggtttctttcttgatcgaaacgtcgacgaggaagagaagggttaccaaaaaagcgggttggaagaagccgaggcttaaagcgaggtggattttacagagggttgatggttgaggttgggtgaggtgttttccgatacggcggaggaagatgggttggcggagaagctcgttaatggtccagaaagttatgaagagaacgagtaggaatcggacggtccagagtgagttgaatcgttggagatggtgagaggttcttgatttgaaacagagatggaatatgaaacagagtgagaagagtgagaggaggaagagggcggttatggatgttaaaacgacgacgttgaatactaataataagctcatggaattgaaaaaagaaaaatggaatgatttgatttttgaattgattttttttttttatgagaataagaaatggaatgatttggccatgtttttcccaaccggtggaagaaccggttggttaatgggatatttgagatttgaaaatgaaaatgagtgtttggctttgggaattatgtaatattttttgtatggtgatgaaagagaggttggtaggtagtttctttttttctctatatgaataagaatgtgtaaataaatagatttttagaaagataaaaaagatttggttacttttttttttattctcttaatttattattattattttttcaattttcaaagcacgtttactgtacactaatcagaatcggaataaattaatggagaaatgtaacggaataaatgaaaaataatcggaatcaatactaaattttttagaaatggaatagttgtgatttatcttgtttactttattaggaaacgtaatcggaatgcttaaatt

SEQ ID NO: 17280 - DNA, 7357 bp, Cannabis sativa
tttttttttttttttttgtgagatttataaagaataagactagttaaacaactgctattcattgcataaaaaaaaaattgcaagaaactgtggctttggctcaaggtgagatttttttgtaatagggtgaacctttgaccgacacttttcttgcaaagttcaatgctataacttttggatttttaatttatgtataaagtaacaatttctgaccttgaggattcatgtatttggttaagctgccaagttgctaagcaactccgagtctctatatatgtgccactttttgtatctttgatgtcctgttagcacaggcctaagtcgaggagcagtagtgcaatttgcacagcaacaccctcttaaatccttcacacagtccgtacaacacctgaaacaaggattgattcaagaattaataatctagatataatttaaggatcgcttccactaaatcaacccacagtacagtactaaaaatatatacatggagatattcaatgtatatgagaaaagtgcaaaaatgtgtgttggtgagaacgaagtgtgctggtatcatctcaagactcaattaataaaagaaaagcttacagaaaaaggaaattgcaatcaatatttgcacagttcctatgccttaattcacagacttgtgagccacagacgtagcatttagcaaatgcactatcactggaaaattcttccctcttgattgctttagccttggcttcaggcttgtaagtagaaggtgacagagaaagacgagagtcaaacacgaacaaattcccagtccacttgactggaccttcattcttcagataatgagcgatgccaccctctaacgtgtacaaattttgaaaaccccgctgcctgcaagatgaaataaaacacccattataaacagtggaattgctaataataatatttgttctttcgcctaaaaatttccattattaaacaagagccaaacttgatggaacgacgaactcagttcacgtgatatagatataatatttgtatacaacaaaaacagaaaggaaaataattttccaagagctccaatccaaaaaatccacaggagacaaaacacgaatattattagcaatctgcactttgaggttctcatgtattagaaaaactgattagatgatctccaactattaattagcaaattagctaatatgccgtattcaagttattctgctcgtctaggttagtttgacagagggttcgtatagcttggtctgtacacttagtcacaatacaaaagtaaaagttcacttgagctcttctctcatattctgacgggcacactaggccacggtcaggtacacatacactagaaagggtaggaaaacttaatctagtgctgagatgtctttgaggagggtgttttgtattgtgagagaaaggtagaatgagttatgcaatgtttgagtaaaaactctctatcagtggagagctttgttctctccaacattgtaagatacattgtctcaagtttttcttatttactataattaataaagctccccacaattcctttctattcccattatcatccattctttactgttctgttgatttcggtcattactactggtgtgatttcctactgtttggctactggtttgtgcaactatagcaggttcctatattggttctcatcaattggtatcagagccaagtttggcagcgagaaacaccccgtctatgggcgtttctactttgttacagcgatacttcgccgtgtttgaagagccaataactcttcctccactccggcaacatgatcgcacaatcactttgcgccccgatgcggctccggtgagtgtgcggccttaccggtatccccaaataacgaaagaaagatgagattgagaggatgattgggcaaatgatggaagctcagattattcagaacagtaacagcccgttttcgagcccagttctgttggtaaaaaaaagacggatgttcgcggttttgtggattatcaggctctaaactgcaaaacggtgcctcataaattccctattcctgtgattgaggaactcctagatgaattgcatggcgctcaagtgttttcctactgttttgctactggtttgtgcaattatagcaggttcctatattggttctcatatcatattcctctgttgagacacttttacccgttgagatacaggctattaatttggaaattcagtggtccttttagtatcttcaatttcttatgtgcatataatgggcgataatgggtttctagaatcaaatataacccagacagaagaaggttctgtacagtgatattaaactcaaatagttgcaaagaactttcaacaaacaccagggtcagactattctgcaactttatagtcctgctgtattaatcttttatttaaccagcagaagaccataaaaaaaaaaacagatttagcttgactcaggctaacatattaatcccaccatatttctgggttgcttccatagttcagtaaacctcatgctattaatctgacagcattatagtactcaaacttctgaaatgcaggctaggacattattcttttctttttctttttttctgttctccttttggttttgggatcttgcaagtacaaaaccaatgaagtttcccaatcaatcactcaaacacaatgaatcctggtattctaaataactcctggttgccaaattttagggtcaataaagcaaagagaaaacaaaaataacagaaaagtaagagaggagaaagtgaattacctcagaattgtcgaatatacatcacaacgaatgcctccagtacaatacatcaatatgtctgttttttctttatcgacatctgctagagggtctgaagcaatgacctgaatgtgaagcaaaaaaattttaaaaaacaatacatgctagatattaattaatatcaatatgttagaaacaataaatttataatagtggatgatatgataaatcataaaattaaacttccacatccttgagaccttctgtgaaactataacaaactagaggctgcagccttcatattgtccaagtgacttctacagcccaacaactcagccataatattgatataggcctactgctcattttaaccatatgactgctgtaacgaagcacccaaccattataaaaacttggaactggacagatccttggccaagattccacctttttgggggtatgtggtgtttaactttggtgaaaggttagagtgatggacaacagtggttgggtggaggagtgactggaggagggtgctctaagaaagtggatcttgcacagtgactaagggtatggaggtcctcaatttggaagtgctaatatgtttcttgagaacatcagattatattgcaggtggccgatagaaggcagataaaacttaaagctgatcataagaccatctccatgcaggtgctaatgctaatgcggaatttgagacaaaaagtgaccgaatattaagtgttgcaacatgtagcattatgcttcaatgtataaatgttacattcaatgttaaataatctccaaggcaagcccatgccagatttgaaaccaaaaaaaaaatatgaaatgtcttcttttcttggaaaaagagaaagggaccacttgtcttaatattttttggaaaatactaaatgttatagttgacacaatattcgttcagcattattttgtcattgtcccaaggtaaatacttcatctctggctggccttattgcatagttaacacttagttagcatcaaggtttggatgtcatcactagtgttcacaaaggtgacatgtttggactttgaatattaggcccaaaataagtatatcttaatgcttttaagaaaaaaaaaaatcactcaaggttaattcaagcaatggataatatataaggaatattggtcatacctctgactgtgataagccatatgaagtgctcctaaagcagtccacatcaggtcgttgagctccatcaaaatgtccaatatcccactcataacctgattactagcatgtaaaaagtctttaaacttcaaattctgagacatattaaacactacaatccgtcacaggaaaagaaaaactaatagcaagcatttttttaagagcactgacaaccttacaaagaaaaaaagaagaatactgacaaagaaagaaccatgtcctataacattttgattattacattccttaatgcaatcatcattttttttttcaaaaagagacaggtaaaaagaggataaaaaaaattaaaccacaaaacataattagaaagctttcaatagaacccctatacatatagaattatatcttaagcccccaaaatgaggtaatgtagtgcagaataagtctccatttttttagaagatcttgaaatgtcaggccctcaaaacctttgacgaagaatattgcatcatctgcaaattgaagatgactcactctatcttgatttttccccattgagaagccactaaaatgaggaaagctatttccaccctacgtccaaggacatccacaactatagtgaataaaaaggaggaaagaggatctccctatctcagaccccaagaaaaatctttgccctatgtcttccattaacaaaaatcaaataagaggctgaagaaagccacaccctttcatccatctccatttcaagccaaaacccttttctccaagtaccatgtccatgtagtcccaatcaacatagtcataagccttttcaaaatcaattttaaatacttaccatttttccctctgcttctgtattcttccatagcctaattggccaccaagacagagtctaagatttttctaccctccacagtggctgcttgagtttttgaaattgtgtttgcaagtactcctctgagtctcctctaagtctaacaaataaaactttggatatagacttgtacaaacttgtgatcaaattggcaatagtctgttaccttgtagctattcaaatttttaagaatgggacaaatatatgcttcgttagtgttagcctatataaccccatcctctaagaactatccaaaaacatccattgaatcttccttcactacttccaaattcgcttgatacatagccattatgaagccatctggtccagggactttgactttcacccaatcacactactgcattttttatctctttatttttactttctccccatcacaccactgcatttttgatctcttcttcttcaaaaggtctttcaatgcgtgaggctaggaaatctagtaatgttttccattcaattctcaccattatacgcttaggggactaattaagtttagaatcaaaaggcaatctcctctaccaaaagaaaatttaaaatcttagtattgaattatcaaatcttacttgtcatttgccacacacacacaccaaaaaaaaaggagcaatgccatagataggagaacatgggccatcaatctcttgcgacacacgcaccaaaaaaaaaggagcaatgctatagatacgagaacacgggccatcaatttttggttgctaagctattccgttagccaactcattttatatggaagcaagtttcaatatgaagcaagtttaaggaataattatcagcgactgtttcaaagcaacaacttttatctaacacctactcttagtactttataaatagaagtgagaaaaattcattgaactattgtattagcactctacaatgtggttttaaggtgtagattcagttactaaatgacatgctttttgtgtagtcaaacttcattcccaaaaaagtgttttagttaaatgacttcgtaaagtgtagaattttctcttggagtcatacatttaaagatttcttggttgttcagtttgaaagcaacgcagagggaaagagtgcataccatttctcacatctagtaaaatgtagttagaactagaattctcttttgatggatcatcaaccgggtttacagcttctaatttttttctccattcggatggttctagtggtgttgctcgcatagaaggatcaagcaaaggaagatgagcatcaccaccttcaaactggacaagataaaatttgaagtgttacaattatgtttaataagtcaaatgccccttcacagatacttgaacacattatgtaaaggatcaataaaattcactcattcagagatgtgtctatgatggacagacacagaatgtgtatgtgttttttcatagttattagctcaaatactaacaaacacttgagacacgagttagaaaactgatctaaatgaaatagatacatatgaatgaaaaagaaagatggtgtggtttacctgaactagagaaggcttataccgcaacctcaattttggaaaggcatgcccatttagtgctggagaaacttgaactaaaatgtcagaaaatctgtcatcatcttttaaccattccacatatgccaaagcatcttttgatggaccactgtactgcacaaatatgaaatacatattaatacccaggtgctcaaaaagaaagaaatagagtaagaaaattcactcaaattgtatgtaatcatcttttatttctacattttgaacaatgtatgtgaaaaaaaaaacgcataaaaagtgtaaaagaacaagaagttgcttccaaacaacacagatatacatgataaagcataatatatgaatagcaatatagcatggcattgctgaaataattatccattcgataataagaaaagggatagtacctgagcgttaatcccttgttcgtttacatatatccgaccacgaatgtcgaggccctaaaataatcaaaccaattattctaaccaatttggataaggcatttcaaaattgttgaaataagcataaaattcaatactgttgagaaggtttaagagttgaacctccatgaaagaaagatgtttagccacctcagccttggggtcttcgaagaagagaaaatgatagaagttgacgacgacaaaatcgtcgtcgtcgtcgtggacaagctccgactctgtaaatttgcaatggcgttgtaaggaaaccctaggaggagtagttgccaaagcctgtgtagctcgattggtggatttcgtgggtgttgtagaggaggagagaaatggtttggcgaggcagagtgtgaagcggagcgtgttaggatgaattggagcaacagtataggtgagcgtagtagtagcaccgcagagaagtacagaagaaactctcatcatagctttcctgcggctttgccttatctcaggttctaatggtgtccttccttgccttcatgtaatggtgttggataataacagagatatgaaaagatgaagataggaaatgcatacgacacttcctcattttaaacgacactaatta

SEQ ID NO: 17281 - DNA, 3867 bp, Cannabis sativa
aaataaataaataaagtttcataattttacctgcatgtttagatagatggtgagattcagcagcttcccatttgttgaattgttctccacatttgtggcaagtgattgtggaggaaccattagaatctgcatcaagagagatcctattactttggcgaactccattgctattaccaccaccaaaaatagcagagcctccaaaagcagccccgtctgtgctattttccttatctgatagaagaaactgagactttcttggaggagttgaagaggtcttaaaggaagggttgaagtaatgcattgtagagtggcctccaggtccaggtgtgcctggtctcaatgttccaacaaaggttgacccaccaccaccacttccaccactactacccccactgccattaccaatacttccattcccaaccccttcttggaagccattaaagccagagattttgagctcacaccttgagttactcaaaataacttcatgtgttattgggtttaagaactcactgctccctatggatcttggactacagcttgggggtttctccatgtgtcttttacttccatggatgacatccttgagatttgctatggaccttgaacagcctgaccttccagcttttctagtcaagattgtgctcaaatgttttctggattttgggtcatgaacttctgatggctctgatttacagtgtagagacttcttcagcgagaaccaaacagttggcatattttaattttccttgagtaccctttttcttggctccactaataaagcttccaatgcttcaaatcttcacatttcttctctttctcatactattttttactaccatggaagctgtgaaaaataaagaaatatacttcaatttcagcctaaaagacctttcttatttatctttgatgcggagctctctttccctgaactttcactaccatttctaaacgcgaaaaatgaaatgagcaagcaaaatgaaaggtaagagctttcattcaatgtcttggtgaaaacatacaagtctgaaaagcataccattcctgttgagtcctctcagtctcagggaaccacccaaccagagtttatgaaacattttttgaaattttgggcaaaagggtcacccatggaggaagaagaaagacaagtggaaagttcccatgttctgattaagaggagaaaaaaaaaacagtatattaacaatttgttttcacaacaagaaatggagaatcttttaggctcttggaaagataataaaccctttcaaaacaaatgacaataaatgatataaatatatatatttgtatgtgtcaagaatggaggcacacagttaaagggaccagaaagagacaatggtcattatttattatttatttatctcatttgaattcaaaaggtttctgaacttgttgcagatttcttttacctggtattggatcttagagatttttcttctgtgatgagtacaatccaaaaatcaaattttcttttttacttttggctgaaatgaaatgattatagctcaaaagcactgtgccatgtatttactccaatcagatattaattaaatctattgtataattattgtcctctacaggtactattccattcactcagatatttttattcttttctttttcaaaaagttgaaattaatttcattatcttctttttttgtttctcttaattcttccctttccttttcacatcaactactagaaagagatttttttcccctttatttttgttttttcatttaaatcaccggaaaatacacaattgaatttgtatatcttatggcgttttattaatgcattttgattctgagatgatatagacacatatacattctattaaaaccaaccaacacatccgaatcgtatgaggagttcaatataagattagggtggtacatttgggctcgaaaatccaacctatccagtcgacttaaacgcgagaaactcgaaatttacactaaaaaattttgagtttgggtgctaccattgaaaaatcgggtccaagtatgggtgcacattttagtatatagtttaagtatcaccctatactcgaatattattcgaaaaaatatttaatttatatttatatttacattattcttctgtcagacccaaaaaattaaaaaccctagcctccttaataattactctcctccttccttcccattttctccagacccaagccaccccaaatcccaaattgttccttcattaatcatggtagctagccaatcggagccctctctttgttcgtctctgcactcggctaagtaacagagagcacaaccacgaccattttccactagagagagagagagagagagagagagagagatcacgagaaagagaatggctaagatagtcttgtaggggtgtgacgttggcggccgtggggactagggtggctctttggcgtcgttcaaagcaaaagaaaagggagatgattactacttagggtagggaagagagaaaagggaggatggaatggtttttttttttttgggttaaaaggtattttattagagagcaaacagaattacacaacagttgtagccacaaagggggctacatccctaaggaacccagagttacatgccgaaacatttctagcccacccagccagacaatcagcaagaacattcgcacttcgagggacgaaagagaaaattacttgatcaaagtacttacataaagatcgacaggattcataaacaggataagtaccccaggcaaacgataagctcccaaaattgagagccagaaccgctaccttcgaatcgaattgcaccagcaactttgtaacttttctcgatcttgcctgaagcagcgccaaatggatagcccgaaactccccttcaaatactccagaaacctcagagaagtccacagccacccaccagtcttggagagcttcattcgcgatctccaccacacccagacctgccttcgaacaaactaccgaagcatcagtttgatacttggtgaattcgacatacatgttggaatccatgggaatttcagtccgaatctcaacctcttccactgcctccatagagagcagcatctcctaagccctcaaccaaatttccttaatcaaaacctacaaattacagcagtctccatgaaagattatagtattcctatgtttccaaacaatttcacacagacaggcaatgtagttcttggcctcctcatctgccaacttagaccaccattgaccaaactccatcacagttgtccaattcatcatatccatacgaaacccccacttactttggaaccaaagagctctagtgatattacagttgcaaaacaaatggaatgccgattcttcaacttccccacagagtacacaatgtttttcccacatgcctaacctaacttttgttggaaaaatatctgaccatatcttccaaaggagaagctttagacgaggatgaatggaggatttccagaggacattccaaaccgaatttatatcctgaaatcttggttgttgactcagagcataggcacttttcatagagaattctcccgacttagaggctttgcagaagaggatgtctgaacttgtctgaagtggttgtatttgcaagatagcggtagccacttcatttgagaagctactcttgataatgtcttcattccaagttctagaatctcccacaaacaaatctgagacatgacaaaatctgtgtcttctagtgtaatgaaagctttcctttatctgctcaatcccgaaacctggaatccagggggtatcccacaactctgaatctcccttaccaatcaaaatccctgccccttctacgcaaatcgatctagcctcaagaatcccttgccaaactc

SEQ ID NO: 17282 - DNA, 4685 bp, Cannabis sativa
  modified_base (509)..(515): a, c, t, g, unknown or other
  modified_base (615)..(621): a, c, t, g, unknown or other
acaagggtcttctcatccaacggacgaaactcagagaaagccatccaatccaagtaggagatgtttggaagcaggaggaggggtaagaggttggaagtggaagtgtgtgtgagtgtgagtagggttaaatgccaaataaaaacctgggaaaagtagaaaaaggtgtcccagtccctcctctcctcgtattgttcaacatttgaacagagagattcgattagagaagacttttggtgcattgaatgtagtcatttcttaatattttatttaccattgtatgggtggcgtggatagaactggattctctaataaattaattggttaattagattactcattcgtatatatttgattattcttttctttttctttactaatcacaattaaaaggtcgtttatctcaaccattgccatttttcctttttttttttttttttctttaagaaaaagtaataataattaggggttttttcatttttacacttcaaaataatttttttttgtatttnnnnnnnattttacatagaaactcctattgtaactggcgctgtaacctaaattacaacaaaaaatcgtacgaaacccctattacaactagcgctgcaaccactttannnnnnnaaactgtaaatttgaaaaaagaaagttaaaaaaatagtgtatgggataattcccctaataattatataaaaaagaattttttcataattttttttttaattttacaaaaattcacatagtaattaaattgcaattaaaatttatatagcaattcacatagaaatcctatatactattttttttttcaaatttactctgacaattttcacgtgagttgctatatgaattttgattataatttagatttctctgttagtttttatgtcagtttctatataaatttttggaaaaatattaaaaaaaaattaatttaaagtgtaaaaataaaaataaaaaaaatctctatttaaaacaacgcacacaaaatcaggagtaacccaaaaacctcatttgttttaagaaatgaaaggtaatagtgctgcttagtatttttttgtacgtattaatattgttattggtcaaattaaatatagagtgttatataatttaatgtaataatttgtagagattactaagtaattgcaagctaaatgtaaatactcatttgttttgggcagtggtagttggggattgtcaccactctctggagagcgcgcgtagtgctacagttggatggcgccacagaaattatccatttggagaaatggatggaactaaaatggagtaggacaaaggagaaatcccaacctttgctgctccactctactcacatcaaccctgtttccgccattgtcttcctgcctaattcctcctcagttcgcgatttcggaagccatggtcgccgttatcttcattctctctgccctaatttatgtctgctccgctgaaacttacagctttgatcgcctctcacctgaccaaaatctctgttcgctgatcattcgtcctgctggttatgcttgctccgaacacacggtcctctctctttgtatttattaagattctgtttgtttgctaagaaacttgccgattataacaaataaaagaatattagaattaaatttcagaaaattgcttagcgtgtttctattttatatccattttggacatatttgattgccaatcaagttttgtttttgttataaattttcccacacattgaagtagagtttgcctttctttcttaaattgtgttgaatttccgttacataattgttggtttgtttagtagcattgtttgtattagtttatttttgtcatttattaaaaatcttaagcaaaagtaaagagcttggagctgagttgtggtttgtttatactattgtgtttagattttgactgatgatggttacttattggctctacaacgggtgtcatcgtccaaaattgggaatttaagacaaaatccacgtcctccggttttgcttcagcatggactctttatggtgatacttctttcagtttgttttacctttttgctcctttatttgttgaaatatttttttaggaatgatataataaaaatgaaaaattggacaatgtctttaaaacttgtgttatagctgcggcaagaaaggaaatcataaagctttcggattattggtttgtcgaatattcaagctgaaaaagagaaagaatgttgttgaaatactgattgaaaagctatgttctccaaatagaaatttaagtatggtgttacacattgctaattgacagtctttgaagataattaatattattttttaaaggttaaacatgttctagttaaacaatttctgcctgaattagtgtaaaaaatttatggatgtattgttgtttcacaaatggagaatcatttgaaattttgtgtttatatttttaattggttataatatttctttctctgaattagcttaagataatatctcgcagtagtcgatgaaaggagaacgagcagtttcattatctttttccattgtctatttgagcagcttctgcacattttgatttattatgttagtgtgtctcttactgccttgtgctttgcttttcttttgacatattaaaatgaggataatgattgagaatgagaatgtaccagatgcaaaataaatttaagatagataatagaaatttactggcaattggaaaatgggcatggcttcttaaatggttttaattatttcattatgaatattttacaaaaaagagatgctggtttttctgtgtttaatctgaaattgagcttttcattacttgtagtctgaaagtattatgagttttgttggcatttattatgattaattatgagactactacaagaaagatcacagttgaatcgtcagattttaagcttggtactagtgttgtgcttttgtggtgtttataggatatttaactatttattacttatgaggagaattcaactacctctacacatttctatatgaggaaaagaattgataacttgcatctctcttatgttttcctattttgcaagtagggaggagatgcgtggtttttaaattctccagaagaatcattgggtttcatccttgcagaccgtggttttgatgtttgggtgggaaatgtgcgtggaacacgttggagccatggtcatgtatctttatcacttaaagataaggtattccttgtgtaaactttcatttccacttttcccatccataaaatggtttctctattttggcaagtggatgttgttttaattgcttctgtgcatatatttgtttgtcttggatgctccttgacattcaattgaagttgtaatcagttgtcacttgagactgtatctagatctgtatgtggaaacactgtttaggattcaagtcacgtaaaaattgtatttatagatttgttttcaagattttaatttgcagtgaactaaaatttggatgaatgaagtattatctgctgcactattcccacctcatattatcccagggattaaaatagaagagagcagagtacacacaatagagattgagaaatagaattgaaaaacatacatcaatacattatatagattataaactagtggtttcatcattgattgaatgaaacaagacataatagatcttgaaagggaaacacagatggacactgtcatagaatgaacgtcgatgaatataagagaacagacaaatgaatgatacagattgagaaatagagttggatacataaatataactaaattgtatatatatcatataaatatatttgatactaggctctctacaatatttggtaactagaaaattatagtaattgttatgtaggtattcaggagggacttacagctcaaacattgtgggagaaaattacatgtctaactatttgagctatccctcttcggtcttttttgtatagattatataaatgaaaagagagaaaacaagaaggcttgaagggggaaacgcacgtagagcacgttaaaggatttattgcatgtgaagatatcatgtgtttgaatgtttctttgcaggatttttgggattggagttggcaggaattggctctacatgattttgcagcaatgcttcgctacattaaagcagtaaccagtacaaaaatatttgtcgttggacattcacaggtatttgaacttgtctttttctcaaagcttaactacgagtttgctacttctgtgtaactatagcttgttttttctttccaggggacaataatgtctttggctgctttcactcagcctaatatagcagaaatggttgaagctgctgctcttctatctccgatatcgtacttggagcatataaactccaagtttgtacttagaatggttaatatgcatctagatcaggtattctttttcctggtatcattgactacatctatgtgtttctgatgatgaagatgataatctctgctcatttcaacagatgattcttgccatgggtattcatcaagtcaacttcagaaggtctattctagctgtcctttcctttttttccctctagtacaatgggtttgcattatattaatactatgttttgcctcgtattttcagtgattggggtgttaatcttgtggattccatatgtgatggccatttggattgcaatgacctgctaacatccattacaggttaatcttctactttctagttc

SEQ ID NO: 17283 - DNA, 7178 bp, Cannabis sativa
aacctcgaccccaaacccaacctcgaccccaaacacccaatattgaatcccgaaccctttttaaatatcataataagctaatacggattattgattatgtattaaattttatagttgtactaattaatgcaatacaaaattttatctaaacataatgttcattgttatttaatacaatacgactcttatggggattatggagtatttgtatttgagtgaagcatttttcctttgggagagttagcgcagttaggctgtatttctttcttcttttcttatatatttaagcattttagcaatatttcaattgtcatgtctctatgattttcttatttctacttgagatcctactgctgcctattacaatactactaataatggaattggataaaaataaaaaatcatataattcatagttaaaaattttattgattataatggctaattagctgcatgtattcacgattgtttgttatggagtgatcatggctgtgcatcgttggttttctttgacaaaattttaggtattttgcagatattgtagaagggcaaaagctgttttcaaagagttgaagcaagtgccatatgttattgagctcgatgaaagaggtatgtggttttgtgttatttttgttttgaataaacttatcagcaattgccatctgaggctagctcaagatgtgagttgtgtgttggatggaggtgttctaatcctaattgtgtatgaaagttttgtcataagcagactttcattccatcatttcaatcagtttaatattcgaccttcttacattacaggtttgtagaataatgtcgtggtttgtgagttggttactaacatggtttccttgtaatagaacattttgtagaagtactttgaagtagatttttcacaatttattgttttgctagagcataatgttcattgtaacaacaaaaccatattatatggaaccacatgaggggccccctccctcttagggataccaacattattgctagagaacctggctcttttagctataccatggacaacactattaaaactacaattagtaaacttaaaacaacaggaactaagcttagtcttacactctaataatgttgaagataaaaacccttaggttgcaaattggaggatatctatcattgttcaaggcttgtaacacaacccttttggaaagcaatatctaaagctagctgaatttcttttaacccttccattggtgaggttgccattgctttctctataaaagtctcctaagtgtattaatctttattgatgagggccattgccaatccaaccactgtatccttccaagaagcgtttgagaaaagaatatttggtgtggtttttttttttttttttgaaacttgaagagaaaaccttgactcttcattaaccttgctaaattcatggaactttgaaattacttgctttattaatatgttcacttgaacatcagtgcccattcataccattgaatttcgatgtttccataatcaatccacaagatagactgtgtagtttagtatctattgcttcacatgtttgtcctcaatggtttttttcttgaaaaggagaagagatcctcttgtcttagacaggatcctcctcgttatatattaaaagcctcgcttgtggtggaggaaaaccatggttacaattaataacaaaacataaattctaaggcaagagtactccccggctttgcctcaaaagagaaaaagctaaacaaaaccacctgttgcccctatacaattgtcttccattccatacataaatctaagaatgataaatcctcaaagtgtttggttctaaagacccaagtagctgtccaaaatttaacttgctcccacacattttttctgatttagtagtcccttcaaagattctggcatttctttctagccatacgacccagattgttgctaagatcactgttttccaaagctttaatctgcgtttgcttccgattagcttggacgctatcaattgtgaaacagaccttggcatcccaggacaattcaaactctaccaacacttatagagatactacataaaactcattacttctcgaggaaggtggttcttagaaccatattaccctagccagaggacaatcaataaacaggtgcaaatttgattctattgcatcatgacaaaatgagaaatatttgtcttaaagaaagctaattatcctccgttggcaggatctttgacacagcttaccaaaatattgacatggatagagattgtgatgtcatatccgtttctagggagcctctttatcattaaagcgatgtttataaccagtccagtaagccccttttacttaaactttccatcttatgaatctcttcaaaaggttacctttcctatttgctggtattctctgaagattcataagattgttaacctatctcatttctaaacaaagtaaggaccaaatttttattctaggacttgttatcttcattcatctgggctgccacctttttcaaacgaggcgaagcatctttgaattcttggtagctttaactttcactatttccagggttgatttcatatgtcttcctccctcccattgcttagactggcaaaacaaccaattcttatatacttcttgattttagtcttaggtataagagtctcttgacttgcttttcacttctctaaatggtttatagtttactattacagtatcgtgcatcgaaagctttaatccatggtgtctcatcctttcttgtcgtaatccttgcaagttttgaaacaagtgcccttttaatatcttcaaattttcgaaaatcaagtccatcacatgcttttgcttgacacatattgtagcttttgtagttagaaatctgtcttcatcaccagccagccactagtctgatgtaccttggtagtaaacaaccaatttatgcaaaaactatggcagtagtagaaaagagaagaagaaatagtttgagagtttctattgaaaatggcaacacaatcacatttccacaagcattcgagagatttggaactctccatgatatttcactcctgaattcacacacaacccctctttcttcccctactcctatatatattatcccattcccactcaatagttaccctccaatataattactcatttatcattttatttgctctcttctaccatgttctactcatcttggggtctaacattaccggttggctgaattttaccttgtatgcaaggtgaaggactatagcgccatgcttggcccattccctgacaaagaaggcaagttgagtgagcatcttggctggtcgtgctaactgcgagtgaaaaggcatcacactgcaagccgaacgtgatcgaaaggtgagtagagcaatgttgtttgacctcccttaaacagaatgagttgatgctgaagtcaacagtcgagtacttgagcctttgtacttgtagttcaggtttcttcccgccaaagagtgacgtctagcttttccccataggaataagattctagattcatcttatagatgcacagttagtggggcgagatgagctcatggatgagcttaacatgcatctaaacaatgcgcaagctagactgaagaaagaggcttatgtacactgtcgggaagttagtttcaaggtaataggaaaaggttttctgaaattaaaaattgaataccttacagaatgaagactttggcttgacgaagtaatgagaacttggccccaggttctatggaccttacgaagtgtcaagtaaggtgggggagctataagctggaactactggaaatagctctcatacatcctgtttttaatatttctcagctgaagaaagccaataaagctgatgtatcggtgtcaccgttacctcgacaactgtctacaggattggagctagtagttcagcccgagaagcttcttggtgtaagatcagccagcaaacgaacacctcagcaagggaaattgaagttttattcaaatggctagggttagaagattttgaagctacttgggagtctttggaggccataaaaagcttcagtttctagatgtcaaccttgaggacaagagtcaaatttaggaggggagtaggtagacctccgataaggtccacttatgtaagatgcaacaagaggaataactaatctaagttcttttacttagctgagctgtgttagtaggttgttattccgttagtgattgttctgctaggagttttattttgtcaagagcaatagttagttgaggagtataaattagtggatttaagtttagactttggagattagctatctcgaattagctgttctattctttttatgattttgtcttagtctctaattgagtcttagtctctaattgaggctagggtttatgaaataaagagagggattttctgtttgtgtgtgagtttcttagttgagttctatcaaaatacatcacaaaaacttatttattttctttaatatgttttattcatttcaaatatataaatattaataaatacatatccacatataaaaaaatgttaaaaccaaaacaattaataacatgttaatatattgtataaatgtagagcataaagaagtatttgatgcagtagtgtgtttttactttgtttaaaaattttattgtacgatggtcatacatttgaactgcatttcctacaggggagtggaatgagcgaagcatccacatttataacaaataagaggaggtttacaatatttaaactgtattcactccttcccctgtcaatactcaggaaaagcctgctggtatttgatgagtactgaatatttctgctttaaaatttagaaagccgctcctcgatgtttcttttctactagcaacctcaaaaccatggtaacatactttcgtagctatagcaggtaggttttccaacgtgaggtcttgcacttggatcctatacatagcgctctctttatcaacctgctgccactctccattgtctggccattagacaatgttcagcaactgtccactgatgatccgtggtcttttgcttaaaacatacaaccttctttatagtcaaagaagattcccgatagtccctattttatttcttaagtctccatttacctttgagtgttcatgtctgtgatagaatctggacgaccaattttctggcgaccccacatttaccaaaaatcttagccaaaactgcagtcttccccacttccttgttcatcttggtatcagcttccagctccaaggacagagcttccgtaaaccttctataaataatttctatctcgctgttgtggtccgaagcagcatccactggatgagcaaagcattcatcctggacctgctacttattactgttttggcctacaccaactctgtcctggtgcatcatgctatcggtcatgactggctctgtatctatattctgataccattcatcttcagggctcatctcatggctgtgaggagctttggtatctgcatgaagtcagaaggctagacacacacacacaacctaatattttacatggtcaatgacaacttttgtcaagttggtaatccaacatctcacaccattgtaagaacgcaagggaacaagaatcatctcccatcttatactcatctcaaatcttctgtgcctttttcgcttattgaattgtattagaaattgtagaaataatactctgtaattttattaattgaataaagagcagcgtatatagctgtacttctgataagtaacagatcaaacaacttagtaataaccaatgcattataattaataaattggcctggttctatttcttgtgaaaatcgtatcagtaaaagcttgttgtccaagtatttatgccaagttcttaggagtttgatcatcatctcataatacgtgacattgattattgtggtgaaccttcaaattagacgtatatatttcaacggcattgtgaaattgactagtgataaaaattgtttattgaaaaattggcgacctgcatcatcctgtatgatatttgcatgtcatctttttaaattaaactattagtttttgtgtgaatgctgatagatgatggtggaaatattcaagatgccctgggtgagattgttgggaggcgaactgtgccccaagtatttataaatggaaaacacattgggggatcagatggtaatatatgaatattggtttactgttttaaaaagcatattataagctctagtacttatgacttgttattgtggtgaactttcagatactgtcgaagcatatgaaaatggccaacttgctaaacttctaggtatcgcagctacacataaagatgatctttagtcgaataaatttttcatttgctgtttttatggaattgtctccttagctaaaaatgcagtgatgaagtttgaatttttgataatttatgtgattaataatagcactgtatcaatggcaggaatattttaacttcaaaattgatgataaaatttagagtaggtttggcaaaaactccaaccctgtccgcagtttggatccattcctgcagcaggtaactaaactcaagtaaattttgtggatctagtaggaaagaaaaaggaagaaaataaacaagttgctacagaaatagattacctactaatttaaggaaagaaaattataataataaaacttttaatttgccgaaattccaagaaaactcgagcttttcaaatgttcttcacgtacaatgcaaggactaaggctagttcatagcttgatccacgttaaattgtgtgcattttcctttaatcttcagttttctctctctaaatttacttgatttgacataatatcaaattttaatgaacctttctaaattctaattatcatccataaatatatattccactggctaatgtttatttattataaaattgagcttaataactttttttaatattcgatctggtagtattgatgtcctaaaaacacatgtaaagactttggaaaggaaaatttcatttaatatacttaaataaaatttttattacaaaaatattcccttaattattatggaaaaaaatcacctgtcctaattttctcatcccaatcctgttcttccaacaaacaactgccatatatctatttactttctcatttatttaagggttttttttcataaatgtacaacaaaaacaaaataattacaaaaaatgtgc

SEQ ID NO: 17284 - DNA, 3407 bp, Cannabis sativa
  modified_base (3356)..(3356): a, c, t, g, unknown or other
aatgccccaaccacataaaaatccatctcttaatttcttacagctctctcgaaaacctcggtcaacaatatgatttcaaaactattgtcaacactgtcttatagtcgcaactattttttcatcaccgtatctcacctatagttgcaattatattaaaaactgttatcgtcaacgtattttacttgtgcatccaattaaacataatgtacaaacttgtatataaaaaaatcactctttaataattattattcatgtaaattttcaataataattattaaaaatattgtgtgttttaattataagaaaaagatataaagaataaggaagaaaatacaaacactaaactatttgcatcttatcaataattgatttcctgccaataaaagaaaaaaaaaaaatcaaaagtctcccaattacttttcagaaaaagtcacgtaattataaaaaagtaagttttataaaaataaaaattacaaatatttataggataattatgaatatttattataagaataaactatatatataatgaacaaatatgcatttttaaaaaattagttactaactattaaaaaattattcaaatatgttattagttattatttaaaaagatatgaaacagatatggtatatgtgtattattaaaaaaatagttgttaattattgaacaattagttattaataaatatctaatttaaatttaaattcataaataatttgattactgatatattcatattaatttgaaatttaaattcaaagaaaatttatataaaaaaagtaaaaagagatattatggtttaaaatatatttttgaaatattttctacaattcaaaaataatcaatgattaaagtttaaaatatatatatattttctagcaaaatagaaatgccaataatttttggatggtttttatgaatattgcgtgaaaattatatatttagcaaatacatattaaatttttatttttcttaaagaaacatattatttattttatttgtgtaaaaatattgtaaataattgtgtgaattttattaaggtaatttttttttttttatagatattttgtggtcctgagtaattgataattaattaaaaaaaattagaagtaaataaaattttaaattttacattatttttatggaaaaggaggtgtctaagaacctatttcattgaaccaaaaattggtgacattaatgaatgagcaagcaattgagagggaaagaaagtgatggtttatggttacatcaatttttttaggaatataagaaaacattgtatatgtatggagagcaataaggttgaaattgttagaagacaaaccataaaatcatcttgtcaaattcctcctcaccaaaaatatttcaatctctcatttttgattagattgccccagcaatatacactttgattgttcttttctacccaaagaattataagtcatattgacctaattgatatcatcatgactacctaaagaaaacactctcatcaaaaaccttagctcgtagcttctttccactggccggtagaatttacaacaaacaaccattgagtgcacagacaaaagcgttccgttttttgaagctcaaagactccctctcaacttttcttgaccaaaaatcacacaataatgtggttaatatggtatctattgatcaggcagccagtacttcgtctctcggtggtctgaagagggaggagaattggttagaaaagatgatgcgaatattttaatttgttcgaattggtgtaacttttgattttatgagattgattttggttaatgatattgatggacacaaaagagggggatggagtgggtaagccaatttgggcgagtaatccaccttatatttctaatgaaaatataatgacattgatggacacaaaacagtaggatggagtagaggtttattaacatggcctcctttgagcgtgaccctaatattctatcattgatcaattcctcaagttaacctgtatacaaaactaaaaaaaaaaaaaaattaaggagagattagaaagaagtatttagagtgatttttttattaaaaaaaaagtaattttatagttaataaatatatatatatatatatcaattatcatgatttttagaattaataaatagatttgggttttacaaatttatagggatattttattcaattaataattataaacataataaaaaattaaaaaaaaaatgagaaaattaaggagagtagaaaaaaatatttttagagcagttttaaagtgctacatcactgcctcatacttcttctttatatatatatagattattttagtcactttacaataatatataatatacatttttttttgtttaatttacaataatagtaatattattattattgaaatatttaaataaatttgacatttttttttatctttttttcttgatttttttagtttaaattcctacattattaaaagtaactttttaattactaattgtaatgataaaaaaactaattagtcgcttttatataaaaaaaactttatttctatgttatataatttgagatatattttagttgcttctaaaacttattttgtatacatcttagtaattaattagttatttttaagttatattatggaaaattataatttaaaatacatttagataactttaaaaattattttcgaaactaatgagttgccatataatataattgttatccgtgtttctgaactagtgacacatggcataaaaaggaagcgaatctcataatctccatgttattctattttttgcactatgacgtggctgaatacacaagtgacacttgtcctgcattcttcgcttctggacagaaatggatgtccggaacagacttcatattatacatctgcttgaaccacgtaaaaatctccatctcatttatttatttttttttattatttctttagttctcaaatattttgtttctgaaaatctcaataaatattttggtactttcattgagagctgatgaaagacctaaacccatagtgttgttgtaaccatggtagaatcatgcagatggcctcgacgctgtcatagaggatgtaaaccctttgtctctaggcctcactcaatctagcaatgcgagaataggggatacatccaacccagacaactgagaggctgatcttgataagcagcacgacaacatcgatgataatcaagatgtttagaattaagaggaagacgattgtaacaccctaactattaaaggcgtgttagcgtgatttttaacgtactgtgcagctcgttgctaaccaacaagattattggaaatagtgaataattaaaatttttgcttaattatttaaaacatattntattacatttataaaattctgggatctcgtttacaaaatacaattacaaaa

SEQ ID NO: 17285 - DNA, 5932 bp, Cannabis sativa
  modified_base (4542)..(4562): a, c, t, g, unknown or other
tgcaacataaaatgttatttcttatgtttattaataagtaaatctgattatatgaaatgagttttttttagggcataaaacccaacagccaatgtacttagaaaatacctcaatgagtttaattatatttctctttaattaaataacattggtttcaaaattgatgaggatgatcaagtgattatgttactaacttctttgccttatgtatgtttgttgacaccatgctctatggaaaagaaactcaaaaaaggtctgaggataaaaatgattctaatggtgaaggacttatggatcatgacagactacaaaagagagagaatataggttttaaagaaataattgtaatgggaatcatcaaaacaatagtggaagcaagaatcgtggtggccattggtctaaatgaagattaaaacatggaaacttttgcaacaactgctagaaataaggacattagaaaagtaagtgttattttctaaggaataagaataataaagataggagtagagataaagatgacaagatcaacaatagagcaaaagatggtattgtgacaaaagggtatgcatcaactgatgtgtttgttgttgctaattaaagtttgaattaaaagtggattttgaattatgggtgcagttttcatatgtccctcgagaaaagtttgttcagatcccttaaagaaaaagctattggaataggcttttttggttaaaaaaaaggcttgttcagtgaaagacattggttttatcatcattaagaagcatggaagcctccaaagaactattacaaataagaggtatgctcttgaattgaaaaaaaaatattttctctattggttttttaacggttaatacctataaagttaaaattgatgatatttcacttaaagttgtcaaagatttgatgatttttatgacagattagtatagagataggatgtactgccttattggagatactgtaattgatgttaaatcattagtaacaattcgcaataatgtgtcggatcaaaccacatcgtggaacttgaaatttggggcatgcgagtaagagagtcattttagagcttgaaagacaaggtattttgaaaggaaaactgtcagggaagctccaattctgtgaagcgatgtgtatgtaaaaagttgagttatgtttaatattagtgtgcatattttaagtgaacctttactattaatgtattcacttagatctttggaattcatctaagaaaaatactttaggtggagccaggtactttatgaatagcattgatgattaaagattttgtactttaatatgtttctaaaacaatttattattgttgatgctaaaaatttgttgaacaacaaatttgtattacaacataaaattctttacacaaagtctgttctaatagattacaacactctgtcagtttacacaattttctctcaatatttgtgatctttctcctattttattgtttcctaagattgaaagaatacgatgatgtattcctataaagttttcactagtcttgtgtaagccagaatccctccctctttttgaacgatggggtctcctatttacaggcgagagtgctattggtccctcacatttctttttttggactggtccacgtggacttgtttctcttcatttcttcacacgtttctcttattttcccctcctctgtgctcttcaaactctacttttagttccccaagctttattctgctttcctctctggctaagctttctctttcctttttaagtaagatgttacatttaatatcactgccacatcgtttcatcagttcttattcatttacaacaaataaaactacctttttacctccgattatttttatcacttataatttccccttagttgtacaatatctgagctcgtgactctctcaatttgagcttagatgtcatttaactaatcacccaaaataattcacatgtgtcattaatgagccatgatatgtttaatagataatcattcaaatttttgagaaactgtctccaccctttctaattaatttaatatttccatttaattccaattcaaatttaaatcttcaaatatttttttaaaggatgagtcaagaatttaagtaacttccgtgatatttttcttattttcaatcttccatttcatccttcatatttttcttagtctgatttccttagctcattttctctttgttcttctcatacttttgcaatggcctcaagagcctccaataacaaatcaaatctactacggagaaaacttcacccttggttgacctcgatttcattcttgagtacgagtcagtttttggggatatctgctctcgataccctatttcaaatggagtaaccttctgtatattgacaatggatgaattaagtaagagtctgtaagatctcaaaatgaccaatggtgggattctagtgagtggaaagtacatggaacttttgcgcattcatgttcatcctctactgcctacattctcccccttactagaattttgatgattcaacttgttcccaacttcgtttagaaatttttgggtctggctaccatatgtgcctttaaggacacgatgttccttactctgaattcttccactagttcagcaaaaccactcgagcttctcgttttatagattggtacatctctatgaaaagccctaattaattggttcatggtctctcaaccttaaacaaaggtttgatgcttatgtttttataatttgaggcaaccagcattttagagttatcaatcctaaggtctttactatcactagtcaggtagtcacttcatgttattgacatgctgatgaatttcttacagatcataggcccactcttttagaattgtgaattatcaatcacacaaaagagcttacatacaacattaatgacatcatgattgaaaaagatttaaattgcatgtcgaccctatgcgcatattctatagctgataatactactcttgcaatcaaagaaaatatgattggagtagatgttatgaaatagatgttgttttacccaaagttcggccatcgtttaaaaggaggacacgtgtcaaattaaaaagaatatggatcgatgcatgaaacaataattatacttgaaaatggaataactcatgaaatgcggaagttacagagtatatttataattactgactataaggtcttatgcgagataaagatatgcaaactgttacctcatgcattaacgagaaaccatacggcattggatgcataaggcgagacatcaacctcattacgcttgagtacacgtaagcgaggcgtaatgactacgaagacacttagcgtgtaatatacagtatatcaactaagtataacaggcgaacccaagcaactaatagtaaggcgcctatctcgctataagaaggcacactcctggtactttcaccaaccagcttcagacatctttcaatgagatttatagtcttgaagagttggttctctcaagcagaagctgacattcaaatgattttaactaccaaagtactccttgttattaagaaccgtgattgtcaaaatgaagcgttatatcttcaagcgaagaagcgatgaggtttacattatcaacctcggagagatagaggtaaaatctccaactcactatcaaggtcattggaactgagttcctatcgagacatcccagaacgttatgatttataatgtgtttaatatacgtttactttgacccagtaaaagcggactaatcacagtgtgatattcaaatactaaccgcatttatattacgtgatatgtaattaaaccccacgatttcaggggataattgttgtaaagattacagtcaactctctcattaactgcttgacaatctaattataaatagaggtaagttagattgaaaaggtacgaaaaattcataagagaaaatgccctagaaaaatatcaaaaatctaataagattgactcctggactgtgcagaattttaactgcaaaaccacgtaaaaaaaccttcgtgttcattctactctttgtatttctttactgttttcattattctgtggatgtttatcactgtttaggctcaatttttgttaacaaaaatctgtgttaacagtttggtgctttcattgagagccttcgtgtaaaagctcagaaaaaaccctccttacatataaaaaaactatctccttcatgattgaatacgcagagaacgttaacacaccacatgaagaaactcatcaccatcttggaaaggagcccatgggctccagaaggccttccaactcacagtctaaacgggccactcactccaggaggactcaacctaaaggtggccccaatactcagaccactcattccaggaggacccaacctgaggctggtcccagcacacgaacgacacgtttgaggagaactcaggatgagaatggacaagatcccggaatgacagatgaagggcccaatcgtggaggtacttagcccatgggtgagcgtacttatgaaatggaaaacccaacaggaggtgtcgatcttattaattagtaaatctgattnnnnnnnnnnnnnnnnnnnnnagggcacaaaacccaacaagaagtgtcgatccattcatagatgatccatgggccaattcaagttcaataccattgtccattttttcaagaaaaattgggcatttgttaaaagggtgaccaatgatcccattctccatataatacatagaaagtcgctcatagcgaaattcaacctataactcatctggtatttttggtaacgtgatcatttttccttagagtaaaggttgtctaatatcaagtctaccccaaaaatgaaggaaagggccccaaccttcattgcacgagtcgtcatatacttccaaaaatttaccaattaaagagccgaaagctttagtcaaagaacgtgacttacttaggaacagaagcctataagcttgaacccaaaaaggagaaaaaaaaacccattgaatatagtgtgatattctgtagaaaagatggcgtatgaagtataatgtgttgattttcaaaatgccaagtctcactactacaaaacaaacttttagaggcgcttttttcagcataataataaataaccgacgccatagggttgaaccgacgccatagggatcctatgtcgtcggttgttatgaaccctacaacatcacttggaacagcgtcggtaacgaatttcgccaaaaccaacgctaaaagtccttaaaaactgcctctaaagcccaattttgtagtagtgtctccatccttagagccctttctttgttccattacaaccaaaagtaactaaaatcaaacccgagtgatgcttagtaattttttttttttggaaacagctatcccaatgttgagccattttcctttgcaatgtaaataactaaaccttcatggaagtcagtatacatacaactagaacaagttccagagattcaggcggcagagttaccaccgccagtaatgacaaccaccgtatgtttttttcaagtcaaagatactgcagatttcatatcattagttaaaggatccataggatgcaagaagaaagaaaaaccaaaaaagagataagagaaagaagaagaaaattagaagagaacaaataaaaaaaatgaaaaaaccgagtttttgcaaatgtcgataatgtatacaaaaatataaaactgtatacgtctgcagaagcagaatgtaattctgttactgcaaagacaagttttgcagtggccaaaaagaacagacagaatataaaaataattgcagaaaattaaataacttgacacaagaaatttgtatgtggtgtttgtgttctttcgaatactcctagtctacgggccacgcccagagaatgaaatcaattaataaagtatcaaaattacaaagacaattgacttaaacaagtttagactccctctaaagtattg

SEQ ID NO: 17286 - DNA, 5953 bp, Cannabis sativa
tcaatccaggaagcagccagagttcgtactcgtgtataagagccattagtccgtgggtttaaggaccaatggaggcttgaaccggggacgttatagtttttaataatatttttgtgatacctgtattttataatcatacaatcatacctatttggtaccgtaaattcaatttttttaataaaattttatcaatgcaatcaacagtctaaatttttatgaattctgagttcaaatttaattatttgattacatataactgaaaactgtttggttaaattaattaaactatattaattaaattttactttaaggtactaaatatgtacaatttaaaaatatgaaatactgattaagtattattgaatatacaaagtactgaatatgtttttcaccaaaacatagggtgttaaatgagtatattcctttattattattattattattattatttttctttcccatttttccagttgaaatttcggagcatgtatgtatgtactaatgaacatgtgttgtttcaggtacttggaggtgccagggatgaaaatagaattggattcctcaatgcttattgcaaagggttttctagtacaataccaaaatgatattagatgattgtataagttgtgttgagagattgggtgacctcaactctagtaattatatacttgaatactttgttaaagaggaatgtaccacttttgtaccaatcctctatgaagtttacgaaaagggcaataaaactggaatatcatcattatcctcagaaaattatatattttcaggatgcaagattgaactttgtttatttcttataattaacagagtcctctaggagacttggacttccaaaaggaaaaaaagcttttaaacaagactacaaggaaaatcaaaaccaaaaatgctacacatctaaattaaatttagtaccaaggagaggaacagtcactctctctgatagcatcatggccataggccttgtcaaattctaacttcctagtcctaacttttatgaacactcttcaattatttatgccagtaataacaaaataaaaacctctcctatacatcaggagaaaaattcaggactgtcaaatgggaagttcatttcaaaatccacattgtcaagtgtaagatccaaatcacccattggagagttggtcagtgatgttggagctgagagtatctcagtgagatcagactcaggagtttggacattgttggcaagtccaaagctggtcatcttatggcacggtgacaccgaaaagtaggctgaatctgaagtggctggagatataaaaggagacgagaaaccacccgcgaaatcagtctcaatcatctcagagaagaaatggttgtgttcagattctattggagttgaagggaatgaaaagggtgcaaacatgtgatcctcccttgtgtccaaatcctctgtcttaacttcaagagtaaaaggtttcacttgagattgccttatcttgtcttccttgactactacttcattgtgtggaaaatggttctttttggttaatgaagatgaggccacaatggctggttgagaggctcgcctacatgtatggtggcctttgtaagtaatgtctacaaatgaagggtcctgatccgatctttggacttgctttgtggctaaacaaccttgtgtttttctatgtgtgcatctgaagtagcttctgcaatatcacaattttatgttagaaaaagtgtacacactcttgttttggtatacaaattttgtaagagtgaataattaagagcttatgttgccaccaaagaagaatatgtcgtgtgaatgttgtacaaattctttacacaaacagtaaattcaaatcattactttctttatagcaatttttctctttttaactcaagcaagccttttttttggggggtccacaaaaggcactaactaacaagatgaaatttggtagagtctaaactttattgcacaacagaacacgtggggtctgtaaattaatgagtaaagagattaactttggagaaaaagaaagacaggaaagaaagaaagaaaaaaattaccaagagagacatattattagataaaagtccagccagaaaaataggggactaataaattgaactactacgatgaagaagaataatgttttgtgtctgtttgtgtggcttgagatattttgtgatgaattgtaagaagtagaattgtcaacccaagtggctaacaacaataggctcaattaataaggcccatcaattaaacagttctaaaaattaaaaaagaaaaggagaaccaaattgatgattgattagcctaattgagttaaacgtgtgctttgaaaatacaaactcaattttgtggtggtgaaaccaatgattagattacactgaatggagtcaggcaaacaaaaaggagatctaaaataagtgtgagttgggttaaaactacaagagattgtgtcttaccttggatgattagccccaagaatatccttctggccatattttctccagctatggccatcttccagattcccttctgcacctgttcccaatggtaccctcacttgctcactcctcacagtgatttttctgcaaagtaaaaaacacaaattatgttattaaaataaaaaggcagctcaaatcagacaaattccttacaatttagctgaaatttaaagttgggcaattttttttgtacctcttcttaaagacatctctgtgattagtgtcttgatcaatgattacacttcttgggctagtatttccaaaggaacatggagaagattccaaacccaaaggcttagactttccatcccagttgagcactgaaagtgccttttcatatgaagataatatcttttcaaccaaaacatctctggcttcatgagaagaagatggttgaagatggcccattagctgttttgctagctctttcccctccattagttcattcactagggtcttttgctcaaaatccatgttcttctccatttaattaacaataacaacagtaaaccaacaaatgcactaagctgaattcaacccaaatttgataatcaagtactcaaaggacttaaaatggaaccatctttggaggaaagcaaaagggtgtttgtagaaaggaaaaaatttgttaatatagcttgatcatcaaataattgagagtgaagttgtagatgttggattgtaaggtggcttacttaaagaaagtgaataatgtgtgtagtttgatgggtttttgagtttagtactagttttgaagagagaaaaagaaatgggtaaaacttaatgaatgatgagaaagtgagtgagggtttcttaaaaaagaaggtgagaggaagtggggtgatttataagagatggggaaaagagatggaaaaagagaattataaggattttgactgaaggaaaacaaaaaaaaaaaaaacgatctttttctttgaaaagaaaaattatttttttttttaaattattcaaaattgttcttttctttctttagtgacaaacaagaatggaccagtaaatgtgtttgtgtacgaataatccaattgctgactacttcaaagttcaaaaccgctgtataaatctactcattagatatgaagcgaagcataaaaaatctatatggccattttacactcttgtgtacttgtctatatcataaatattaaatttatatatgatataaatattaattattagctaaagtactgagaaataacgcggaaaaagatttgaaaattctcgttctcatcctttctctcttgactatgccaaacccacgcccttatttatttaatttattattatcattattaatataattcttccctttgctgaatagtcaaacagaaaataacattattattattatgttatgttgtgttatgtacacataaacataataataataataaagaatgtcaagttatgtatgagtaagttggtatcgtaatgtgcgacccgttgcttacgttggtgttaatatctcatacttgttgttcatgacacactgaaacaaacatccaacttggacataattagttaataataaaaagtttaagatatgattatatattgataattaaacacaggttttattacagtaatattatatgtttaaacaaatctccactcctacgtcttcaatttgaaattatatatatatatatatgcatcgtaatgttagttaacttttttaatttacttattatttataaaatatgattttcgcttggttcgaagtaatgagattattcctcattatggataattattattaattaataacatttgaaataaagaaatagagaatagttctgactgattattactctattaggaactcaaattcaacgataactgttgtatattaactaatattgaatttaatttagttattacatttttagaaagagatcattaatatattatgccgtactccaaggatctagattcacattttccaaatttaaattattactagctagttttataacacaacattaccacatgatctgatcaccgattaatggactggaatttagttctgaatatatatatataatatatatatagtgatcattaattatatacggcttaacccaacaaattgagtctatatatagggcaagatcatctgtgaaaaattagtgtccggtattaaattaatttaaaaatgtgtccaattaattaatttttttaaatattattaatcatgtagacatttttttttaaatactcaaattcaggacatgattatttctcattttgcctttatcgttgtttgttttccatcaaagttttgggacggatgagaatatttttggagtacaatagtacatgtatttctttttaatataatcaactcaaatgcaaatgattgttttttttttttccttaaaaaaggcaatgattgttaaattactaaatacttaaagggttgcacaatggtgtatatgacagtgaaatattctaaaaaaaaggtttaaaattgccatatagatcagaataaaatgaaattattattttcatcaccaagtaattcttgttctctttttagaagaaaatttcctgtcccctgcactaagttgtagattgtgctagatctagatgactgatgacctagtccaacctaatggaaggaacaagctgcccaataagttagacagaaacaactctccacaaattttacaaggagattgactaacaaaagacactcgacaccaattacaaagaagagcaacaagcccaaataaaaaggcataaagccgatgtcccagaagacagagtgataaacattactacagcagaaaaaactaataaaacactgcaacaatacctgacctacacaaaagagagccccaaccttcccaataaaatatctgaataaagcacactaccacacgagaaccacccaaaatggagacaaaataactcgaggatgcattgcccacgggcaagcccgcgttctaccaccaattgcaacctccacatgaagagcccaaggttggaaacacaatcagcatgcaactgaatgtaattcgaaccttgtttagaaatagtaaatgttaggaatgcaaccaaaattttacgttagctagaaataagaatgatcataggtatataaggatggacgctatattcattggtgtaacttgtaaggccttttggaaaggtgcccaagaataaaacgtgaaggctagctttggcccaaagtggacaatatcataccaagtatggagatggatagcgttcgacgatccttgataagtggtatcaaagtcagatcccaacattaggcatgtgaatgaatcctctaaatcctcttaataaggtgatgtgcctcagtatactctcacgattaggggtgttcatccaatttaatctgcactattttgctcacagtgcatccgattcgcaccaagtgcggatttcattttttggatccaattcaatc

SEQ ID NO: 17287 - DNA, 6006 bp, Cannabis sativa
  modified_base (3570)..(3573): a, c, t, g, unknown or other
aaatggttttagttgagacagaaggatcttactccaatcagatcacattggattctcttgatgtacacgtgggccaatcttactcagttctagttacagccaatcaaaacgagtctgattactacattgtggcaagtcccatgttggtcaacaccacccagatgagtagtagcatgacgggcattggagttttacactactccaattctgtatcatctgttggtgggcctctccctgttgggcctgacccatttgatctcgactcatcattaaatcaagcaaaatccattaggtacaacaaaaataaatactgctcaagaacaagcttttatgtcatgatgtccttcgaaaagtgtgaattgttaactgaaagttgttgtgtcgttggtctttggaaaaaataggtggaacttaacagcaggagctgcgaggccaaatccccaaggcacattcaatgtgtcaaatattacattgtcacaaactttcgtcctccaaggcctaaaggctcaaattagagggctacctcgctacacagtgaacaatgtgtcgtattacacagtgagcaccccattaaaactagctgatcaatttgtgaatggctcaggcgtctaccaacttgatgccttccccacccaatctgtaaacgacatcgctgcatatggaatctctgtcgtttcgggaacccacaaagggtggttggagattgtatttcagaacagtttggatgtgattgactcttggcatttggatggtttcgggttccatgttgttgggtaagaaagtgttattactataaagattgtaattaacttattatgatttgatatgtatactaatcaatataaatatatttaggtttgggattggagagtggacagcagagtcacgtagtacgtacaacatatatgacccaatagttagatcaacagtgcaagtgtatccaggaggatggagtgtggtttatgcatttttggacaatcctggaatgtggaatttgagatcacaactcttgaacaactggtttttgggtcaacaactctacctaagggtttttgatgctgatcctaatcctgccaaggagcgcccaccccctcaaaatcttcttctttgtggtaattattattattattattattattattgctaattaaaacatactctatctagtgcagtgcccacgaaccatataatatatataaataaatattttgtgtttttgtatatacagggatttttgatgagttccaggctccaacgccggctccggatgcagggttatgatttgaatttatggagattataattatggattatatgtatgtattgtaattcattccatgaaattttctctattatgacccattacttaatgggagattgccaattgaaaccttaataaattatatctagagaattattaaaccataaaaatctttaaactaaaatccaaagataatatttggagttaaatttaatatgaaatgatattagagaatgagacgaactattacaaagaacatacaaaacagtaaaacactgtattataccaattgcttatttatttatttattattaattttatgaaaagtagtatgattcaatttgtcatcggtaaatttcccatgtcagtaaactcaaccacgttagtaaagtaatgagtcaaacattttatagttgatgagtgagtgttaatcaccaccatcaccacgacttggtgaatatgggctacaggctacagcccacgatccgtctcccattggaatataaaagcccattaattttggcatggtgttctagccagctgaaaggtagtcgttccacctcctcagctccacgtccaaatatgaaagcccacttatttttggacttggtgttttagcctacctgagctagacaaatcaacaaccgaaccctttcctctcctagtcgactgtgattccacagaggaaaacatgtgttatgtgtacaaaagaaattgtctagtctctcttttaacttcttttaaataattgatgtcgcaatctccgtcttattattgctctttctttgaatttttctctcaaaaacatatttcaaaagtgatagaactcgtatcctagaagtcatatttataattcttaaaaatatttcttgaaaaaaataaaaattcgaattttgctagaaatcacttcctcgccgtggccacgactttcctgccaaaaaatttaagtcacgtgatttgtattttggccataacttctttgataaaatttagaattggacgattcaagatgttttagaaagctgagaacgagatatacaactttcatgttgagctccaagtccaattctgctttcaagatcgtcaaaatttgtaattaagttctgtcttgtaaaaacgaactcggtggcttccactattttctactaaaatatactaacatttctttaaataactctaaatgcatgtttagtctttaaaatagcctaacaaattataatcatactaatcaataattttaaaaaaattaatttaaaaatattaatacataaattaactatatttataagataaaatattgacttatcactatgtttagtaacatcaatttaacaaaggaatgtagttaattaaagtgaaacaaataattaaagttaaatttaataatgattaaagcttgcaaataattaaagaaaaatttaacaataattaaagtttaaggtaattaattttatctggtttacataatttaattctaaaattttaatttttattctttcaaaaaaaaattaatttttatttgatagcgaatttactaaaaaaattatatttgggctaagacatataaatctcaacatatatgtatattcctatcataaatactcacttctcaaattttgcattgaaatcattaaacaattaattggcgatcagacgattaaaagaaattaaatacgaatgaaataaatacatataaaaaattgagaaagaactaaatcatatgaaaactaaaataaaatgtcaaacaatctccattaacatcctaataaaaagtctagctacttataattattgaaaacatctgataacaattaagaacataaaaaaagagtagaagaaaagaactcgttgacatatattgataacagtctcccacttcatgcttcaattttcatcctcaatgattgtttccctttaaagtgttaaaaaataacatttatatagctaaaaaaaagataaacaacctaatttctcgaagtttaaaataggcggaaggtagtgtcacagtgtttgaagctcaatttttggcagcgagcttcctagtgtgacagctgataatatttagccataactcttttaataatgctcggaattagatgattcaagatgttttgaaaagctgaaagagagatttagaatttttattcacaaactttttcctcaaagtgaacacatcatagtcaaaaattcattcgaagcttcaaacttgattttcaagcacaaacggagtgtgttgagcatccaaaacttaaaatttttcaccactcatatcatagaactccatattccatgataattcatcatattannnncatttaacatgtttattctcatttttaatttacattatgaattttaccatttatacctaaaataagtagaaaacaagcgtaattctacacgaaatgaatataatcaattgaaacacacttttaaaatactttataaaatgaacctaatactagcatatcaaaaccacacaaccatgtcaaaaagacaagacaccatcaagagcatcgattaccacactagaatcactttccacagtcatgaacttgaaatttaactccactgcagttttcaaagctaagcaacaagttgcagcttctctacaaagagcatatgagaagcacaacttcttagtagctacctaaagcagggaaccttcatggtttctagcggccactaccgcacatgtgccagttagctcaattttgacatcacaattcagtttgatccactcatgggaggaggagaccatgcaagcaccaagtcttcggattaggctgaggaagaagggaaactctataatctgtatatcaataggtaatatagtcaatataatgtgtaatgttatccaaattattattacgtttcttgtcattttgagctctccaaatagtatcaacaataattgaggcatagataaacacttccttggtatttactcctttgttgcttaaatccagatgaactttatccaatcccacatttgagtcccattgccagagatggaaaaaaattccaaaaggggaggaacgccaaaagtaaaatgtgaagtcacagtgtaagaaaaggtgttccatagatttgtcaaagccaccacaaatagggcagtgagtgtcattaatacacatacgtttccctagaatagatcgaataggaagagcattggagaggatgtttcaccaatttttccaatgagcaggagagacttcgcaaggggagcacattacaaagcttgagtgagatacaccgacttggtcaaaaaccggccattagtctccttagtccagatacattggtcacaaccctcacctaaaagtttaccgccatttaaaattgttacaacaatgtcatggtgaaacaaattaggacagcttttgaaggtcccactcaccattatccatcaaaaggatagccactttattaagccccacagacaacaccccattgaattttgaataaaagtcattcccataagtcatctaagggtcatcccgaatgctagtgtctttcccatccagcacaattttgcatacaccttttctaaagatttcaattgccttgacgacattattccaaagtcaagatcgagttaaagctcttgtagctacagttgacaaaattctttctcttaagatatttagcttccaaggcacccattcaaaatattccaaccccacttggttagaaaagcttggttcatttcattggctttacggaagcccatgccccacgagatttgggaaaacataatttttctcaaattttaagatggattccttagttttttttctcaaaactccaccagaaatctctcaccattactttggagagcttggtggtctccatggagtacaccaaaaggaataggctaataaacttaattaaagtgacgcctcttttagatttctttgcatacccttattaatatttttgctgaaaaaaataaaaagtcttcaacttgtttacttgttaaccagacctccttaatattggccctaaaatatgtgagaaagccttggcccacctctactcagattgattcctttaaaatcttcctttctcaggctctcttccaagagtctaggaagaatttccgcattccaggtgaataaataagggcactggacttacattcaaacagatatggagagaagaggtagaaatgcattggctacctcttaatcagtaacaatattatttggttctaaaaaaatgctaagaaaaaaaatacaatgtactctttttctaaaaaaaagagtacattgtattcttttggatcagataaactaatgtatttaatagcatattaggctactatacctattttatattctctcattttagaatagtttaaaaaaatatttttattcctcagtacaattaattcggttttttttgataaagatatacagctgatttaagataatagatttttaactttacagacctaaatttaagataattcaaaaatttgaaaaatcatatatattcttataattactagaaaaatcataaaaataaaactttatctctcctaaaaaatattgttagatttttttttagtatgtttcaataaatattgagagagttattataattttagtatttttttttgaagatgaacaataattatgatagattatatttagaatttgaagtatagggtatgatgaaggaaaattcggtacaatttgcaatcgtattttcgggtgcaagagcgcttacagacatattca

SEQ ID NO: 17288 - DNA, 3434 bp, Cannabis sativa
ttataatgaccctccttagtggattcctttaatttgaataggaaaggaaaaaagagagaaaaagacttgaaagactacacctttgaaatgtgttgtgtggaataatatagccctagctagagctatcattatgtaaagttttagttcggaaaaagatttgtatgagcatgattttctcaccatccatattatataacacaaattatttatgaagaagaaataataagaataatattggaataaatagtaatagtggaaataaataaatttagtcaacaacagttttttctttgaatatacaaagtcattcaaatttgacaaatcttttgttgatcaccaagaaatggtaatttgtcaaattttaaatgataaaagataaagaaatgagaaatagtttgagatctaataaaaaaattattttgtaattatataatatattagtgctatactatatatctacatattaaaaataattactataaataataagacagtatacataattgattgtatatgcttagtgtttatatatatagctacatatatcagtataaaatataactctattgggtatatatgtatattagagagatagtaattaatgattagtatacttattttatgctatatcatataatatttacatgtgaattgtgttaaatgatataataattcaataaaaatgtagccataaatattttgatctctaattaactcctaatctaaaatttaaacaaagaaggtttcaaattaattattatctatttaaaaatttataactttgataataagttgatgatttaaaaaaagaactttgataataactaaaaataaagaaaataataattttagataaatatgaaatttttaatttttttaatttttatgacaaaacaaatgtaaaatattataacataaattataatgtgaagtttatttttatttataactaaatcaagttggaacttattaaaaattttttataacactgtcttgactatattatttgttggttgacatggccaatcatattcattattaggacagtaatatttgtttttttgtctttattttccatattttgtgaagctaaaataatagagatcttgaagatgtcaaattatttctagaagaggaataattaattaggagatatgtttgattttatatatcttaattatttacaatatttagctaatttgtattagtttctaatgttgaattattatctcttctcaatatgttattatttataagaaggcatcacataaataatacttaagaaaaattactacaatttaatataaaacccctaaacattaaaaaatagaccaaaaaatcaattaacggttctttcatcatacaatattttaatctaataagaaacgcaaagtaaaaaagtcaaaagataagataagacatatatattaattcattaattcataagtaccaacttatagcataacactataattaaagttatgcccatacattgtttaattccattaaattattacctttttattatgcatgcctaggtggttataattaattacttattttttttaaaaaaaaaaataagagctatagctatgtataagaatattatatattttagatttaagaaaaaaaaaaagaataaataaaagcatcatttgataacttattgcactacctaaagatataataatgattattaaaattaaaattgatgaagtagataaaaggttaaaaatatttatcatataaagatgggatatattaatatttcttatatattatctttgcaaagttgaaaacttgaatatatgttttccataaaggaaaattcaaagatatattgtagatgtcaacaccaaaagaagtaaattggccatccattttacgtaaagccatctctataaataatagaaaataaataaatattatatattctatatattactattctctctacttcaattttgatcttgtagtgcatgaatgacgtctttcttcttaaaattgatttaaactgaattgtgatcttaaagtagagataaaaaacatgtgtatatttatagctaaaaatcacaaaggcaaggtgacttaggtaaacacgataaagttagattttttttgttgctttttatggagaggcgattgcttattgtttggcgctgaaaatgacaaaggttaaaggttgtaatttcattattgtagaaatcgattctaggataataattaatactcaccgacaaggaggctagataagagattgtgaactactcttctttttgtaaaaatacctccctttattttgttggttgtttattttatagtactcttagaatttgtaattttattgcccataatgtagcaaagtgagtctttacccacaatgagtatgattgcttctctgttttccctattccaacaaatatttttttgtaatgaccacgagatttaattttatctatcattttttttttttaaaaaaaaggagtctggctaacgtctaaaaaaaaagtagacttgacccataatttccataaataagaccatctcttatgggaaatgtaaaaattatgctatatttagaattatcaacaagttatttgttatgttagggacatgaagtaaattatttagaatcaatagtggattaaagatattagaaataactaatgagtgacctatatacttaacatgtaaacttcttccatctcccacaaacatctgatcagggtcattgtaatttgagttggaagcaatgtttgaaggttttggtgtgtagtgattggtagtacccgagttagggtaccaatttgtatccaactagttgtattggtcatcacattagcatgcacttgagatggattgttagaactaggaggactactagtaacacctgtaaagttcttatcaaatctgtaaaagcagcttagtgcagtgtgtctaattttaaagcacaaatgactttgaggtctgcttttgagtgaaaaatatacccctcaagctgatcatgagtggaagttgcctctattatttctaaagaaattagaattattgccaaatgactgatagttaggattctcaccttgaggatcatagccacgaaagcctcctctcttgctttgggcttgaggattattgtaaaacctattatagagtggaaatggaagtggtctgaagttggctctcccatagttaacgagattagctttaagaactggatcttgctagtctagaatggaaatgcgagttgtcatgtcaacttccttttcactcttcttaatagtcttaatctctgtaaccgtgtaatattcagtcctagtgttagtggatatgacaaaagtgccaatttcactcaggaggcccttaaatatgacttctatgtgatcctttggtgacaagagctctccaacttaaccaagaagatccacaaattcatt

SEQ ID NO: 17289 - DNA, 2406 bp, Cannabis sativa
gacaatattggctctcaggtcaaagctccagaaaaagaaggcaccattttcttacaggtcatcttcttcttttaaattattattgttactcaatggatttttttgaagaggttcatgctaagaaaattgagggaatttcctatcacaaaagatgaaattcttgaagttggtatttcattaggtgttcctcatttttttctaggcctatatgtggacattacaggaatcgtaaaaggaaaggtccatttgatttaccataactattttgaaattatacgaatactataatattaaatctttgtatttgttatcaaaaattttatactttgttgtacttttgttattgtgaagatcaacatttcttattgggtgcatcattttctggtcgaagcactggtactgacggtcagagggatgctcttggaaaagtttccacaagtttttattttacagcctcatttatagtactgaaatgtatcaacacaagttcttggccacgtgagtttcaaccttcaattttaattgaaaattgtaatttcaaggttttacaaatggttctcaaaggtacattgaactgatttttccttttgaaagattactgaataatgcttatcaataaggtaattttttaatagagtactcatatgtgaatttagattatggtcggaatatatatcatatctatccactggaaaaaatagagggaaaggaaagagggttaatacaatttcacagatgaagttgcaaggtgataaaattagaagaaaggggatctctctttagctattgaggtatgtcattaattatttaatataattgttgtttgttttctatatatattgagatacaaagctctctcactatatgttggtatttttaattagagtaaatagtatgccttcctctaagctttgacataataacatgttgttggttgtaatgtatatagaatactattactttactatataacttattgtttctatgctttttctttctctataatgtacatagattagatattatttttaccatgttcaatttcttcttttttattttttatttaattgatgtgtaattttactgatttttctaataattgagaatagttatttctaatcattttactgcattttattcttattcattttatacactaaacatttttttttgacatcttcttcaggtgaagtggagtgaagtttcaactccctaaagatacacttgatattgtgttgatgtcaatgacttacattaactttccttttgatttgtttcttctaaaaagaaatctttttggtcgtagacatgctttttggatagattttatgtataatgatagtgatgataaaatttagttcttgtttgttatgtttagtgtatctttgtagtttaacatatttgcataaagaaacatgtcatggtatttgatttaaaggaacgatgttagtggggatattctttatttttgtgtacagattaaagtatatgccattcccaaccaaagaagaagaagatgcagtagtcatcttattggtttggattggattgtttatgtctgagctttggttcactctttattggcttgtcacacttgtggttcgatgaaatcccgtatatcgtcacactttcaaagacaggctaattcacaagtcagcatattattatccatatctctatcatgtatgtatagtatatattctaatagtaatatataatttgtaattaaatagcaggtatggggagaaggatttgccgggggtggacatatttgtgtgcacagctgacccaaaagcagagccaccgttgatggtggtgaacacggtgttgtcagtgatggcttatgactaccctccacacaagcttagcgtgtacctttctgacgatggtgcttcggagttgacattttatgctctgttagaggcctctgaattctcaaagaaatggcttcctttctgtaacaagttcaaagtagaacccagatctcttgaggcttatttcaccaacaatgaagcttctcaaccactcgatgatcatcatggtcaatgggcctccatcaaggtatattatatttatatgtgaagaaactctcctcttctacatagtggttttaattggtttgcattatactattctatgtagtgcaattttcattgcctttaattatttttattgaaattttaatttgttaatctttgtaccatttttttttatgttttaaaagatatatggctttttaaattctcatgtatttttagagtcaagttatagttctctctgagacatattataataaatctaatatgcacactaattaaaacagagatgccttttgtcttaatatcaaatcaaaacaaaacagagatacctaatcaaaacagcgagtagttatatttttatttgaag

SEQ ID NO: 17290 - DNA, 6796 bp, Cannabis sativa
gcacggtaaacaccttctaaacttgataaattttcccctttcaaaaaaaaaaaaaattcgtatagttttcaaatggagtatatcgtcactcaatattctcattgaaccctaatttctttaaaaaaaaaatggaaaagaaaagaaagaaaaactaaatagttttcatgttaaggtaataaattacaactgaaaatgcattaaaaacccaacttatgctagtttacaataaaaggacaaaaaaaatctttgactaaagaattataaaaaccatctggatcaaatctttgagctgagattagagattgaacaactcactgaaccctttgacttttgagttgtgaacaaaagttatcagaggaaaaagctaaccgaaacagtgacccaaaattatgtgtggctgtggactgctttcctgtttgttgaaaaatattctcagctttcctcttttctttttctccatctccatgggaaactttaaaaacgtaaaaataacgagattttttcttgcttttctttttttatatatatatatcttttattttattatttatagtaatatttggggtttaaattccaataaataagacatttacaactcatcaagctagcatcatcattttcccatcatacccttaattataacgttatagtttcttattatgccttatagacagatgtattgtactctactatatagtctagcttatatacatttattgcatgaagagggcaaaaggaatccaatcagatcaatttaacatataatgaacacatatatataacatgtctagagatgaaaatataaaataccaaacagagtctgtacgtgttaagaaacaactgaaggaactgaaccaaagtcatttttgtttttggtgttgttttgggcagtagtttctgtttcagaaaccacacttatatataacctgataatccaacacaatcccgccgtctttgcagagcaggaaaacgtccaagagctaacccaaataaaactcacccaaataaaaatgagtacatatagtccattacatatataaaaatatttacacaaaacagtaccacccataacatcttaattatttaattattattattgtccctttctgaggccacgaggtgggacgttggactgagtagtgagtacattatatatatatagaattgatgtacccaaaatcaaatccaaaacactaaaattgggtccctcacttttgtgtctttatccaaaactttttttttttttttttttttgtctctgttccactttccgggtcttctcttcttggtcttgatcgatctccatttttttttgttacacaccagctcaattcggtttttgaccatttttaattagttttgatatattatttgtcataattatgtcttcatcgtcgtcatcatcatcatcatcatcgttatcttcgtcattccgagggggaactaataataataataatggaaatgtgggtgcaagaggtgggacaggtggtgctagttcgagtaggcgaaggggtacagggtacgaaggaccctcttcgtctcagcggcgtgagcccacaaatgaggactggcctggtcatttcgttgaagctctcgtcacacaagtcgccattgaggcttctcgttccactggccgccgtaccgctgctccagctcttgccactgtcttcctggtaacattttattatattatacaaaaatgttagtaaattcttcatcattttcatatattttatgatttttttgaattattgatttatgatttttttttgtttgatatatgtgctgaacttgggttatttatttatatatattttatgtacaatggatatatatatatatatcctagaagaggggactgttattttgaaagcaactgcctttatttattattattatttttttttttttttggtttgatgggtcatattctttaactatcaaagtttaaaaatgtcactttctcaggatgtaggtctttattctaggggtagaaaatatactttagcttcatatgtcaaagtttagaaaatgtctatttcggaaccctttttatttccatagatcttatgaaaagggttcttttggctttttaattttctttttcccccctttattggcatgtatctttttagcctctaaatattcctctcctttttgactaaactttcttagcttttgtaaaaaactaatatcatattgtttttgttttaagttttacattactccttaatatatatcccagcttcatatccaaaacttttgatgtttaacaaaaaataaagtaaaccctgaaagctctactcacctgaaagcctcttttaaactaaggagaaactgataaaattaaaattcactacatttctataattatgtccaagagtggtgacatttggttttgacagttttgcatatataatatattgaatcataccggcaaataacttcactaataatcagaagaattttatatattttgtatcttttatgaatgaatttttctgggtaggtgtttgtagtagaaacatatgaatattttaagtctcgtagctctcgtttattttaatatatatatatattatattaacttgtacgaagataatataaaataaaatgtactgttgaacatctgcagttgcttccctttcaaaccaaaaaaagaacaaacaactgcagttgctttcttagacaaactgtagagcatgtttgatagcatgggaatatatatcaaaataatccgattaattatgtattatatattgaaataacttattaaacaataaaaacatttatagatccctatatagtaatagtgctacaaattcttgaatcctgggattccaacaagtggccctacattgaaatataaattattaagaaatatttatcaacatggttgaaaaagaatagaaataaaatgggaaaaggtgtataaaaataaaaatagaaatgaaaagaaagagagagtagttttgattatattcagcagtttttaatgggtattgttatggcatcagtcaaaagacagcatgtgctggctaaaaagcacatggagcccaatgcctgcttcacaaactgatgtctctcctgtcacctcaaagagatctggtcatctcttttgcattactcatcgggcgacttctattttgttttcttctttattttgtttttattctttttcttcttcttcttcttccaaaataaaattaaaaataaaaattcactgttttgtctctctacttgctacacttcaaattgttttattttgtcaatgtattaataattaattctttgctttttgcgtgatttcatattcaattgttttgttttcattgttatgtatatcttctttgtttgtatagcatttgtctgattagacaggtagtaaaaactcatgtggtacagtcaaagtaaagtctttatttacattttattaatttttgaaaaattaaaagaatgctaaaataaaataaataaaatgaggtttttttaatttttttatatatttttacgaaaatttatattaaatcttatactaattaacacatcaagttaaatcgtaatcaaattttacatagtaattcacataaaatttatcaaaaaaatctataatgtaattttaaaaaataaaaaaataatatataatctataaagtaatttctcaataaatattataacataaatctaaaacaataaatagtatttcttaacatatagagatagatatagagaagtatgaatcaagattttttattaaaaggtggtttttcatattgtattgtgtggtttttatttataaaaatttaaatctttaattaagtcaacaaaaatagttaacatatttaatataaatttaagtagttaatgtattagatttggattggtttaacacattattaattattaacaaaggcagttcctacattattaattaattattacattatcatagatgtgttcatatttaagaaaataatttttaacaaagaatagtcagagaagtataattattaatgctcaaaataaacaactttttaaataagttattgtgactgttcttaataagacatataaaccaatcagaaagtggtgtattgacaatttgaaaaaaaacatatgtcaaacttcatatatttaaaagttgatatttattaaactttcgctgaaactattagtacgtactcaaaatagataagatagcgtagatagagatctagtgcatgtaatgtattaaggtagtaattagtattagtatgattcaaaataattaacaagcagaaggtaaaaagaggattagggatttttgaggataaaagattcgttgcttttaacgagactggcctttggcttgctctttcttggaaatgaaagaaagaaaaagcgtgggaaagcacgctttgtacacctatgttcatatctaatttacattcaaaaactattccttcttgtcctctttctccaaatattttctcgcccttttttactatctttccctcccttttttattaactgcccaaaatttagccaacccacccattcccatggagaatggatctttctgcaaactctcattttctcaatgacatataaagattcatacatgaaatttgtgaccagtgttaaatgagatcttacataaaaaatagtctcgatgaatgaaaaaaaggaacaaataatatgtgcaggtggaaaagagacggaaaagaagccagaaatataattggctttgactaaaatattcttttgtggtcctattgttaatactatagttataggtttgtactttgtatgtaccttacgatggaacacctgggaaaggctatatacgatgtgaacatgtgtacaacaaaatgaagattttttattttaattttatatatatatttttgaacaaaaaccttttatttttttatatttattcactagaaatcataagttataaaaactagtagatgattgatgatttatgaattattatacaaccattaatcattcaagggttttggatttcaactgaaattattaaaaattgaaagaactttcaaggttaagcgttttgaatcctcatcgatcagccacttaattaattccaaccctaccaaacttcatttactgtacttacgttactgtgttgtaattaatatgttataagttgggaaagcaggtggaaagatggtactactttgcagaataagaaacaaacccagttcatatttttatatattagttttgttattagctatcatgtagcgtggagtactgacatgtctcttacaatctataacactgcccatcttttccctattcttctcttccttttgacttttggctgacaaaagcaggtcaaaaaaggactaaatatatatattcatatcaatatcctactagctaacactggtcatgtcatgctttctttttctttttagagccaattcgtctgacacctctcctcttacttacttacactgtcctatatatctagctagctatactatacactagtgttctctagtccatacttcctcctgcttcttcttctaagctatttagcttttgctctgtctaactcagactcatcatggctccgttttcaatacatattacattatataatattgtacatgcatatatctgtatcacatttaaagtcctttacgcgcatgtcatggtttcgcatggtctttcatttttcggattttgctcccgttttggctctcctcccacaaatatatatattataattcattagggtatgcaaaacactaatcaatgctttatctttcttttttctatttaattatttaatgtagcactgctgaaatatgcagtgcctaatcacaataggattacagcttcgaaccaataaagaaagcataagttatgggcatatgtgtaatgttatgtagttaagactaaagaaacaatgttttatatgcattcaaaagttaaaattacgttaaaataacaagtgttgtgcaaataaaatacttataaaaaaacatatttcttgtcagatataaaaaaaaaaaaacattatagcattgcctgcattcccataatatatatgtaattaatttataggaatttattttgttattatttttaacaaatccatctcattaattcagatgtgacttgagatgaatattgttcaaatatatcttaaagttcgatctgtattatttctatgtatacgtcatcataaattgtatttttttttttaattccatctttcgtctacgtgcaccgagttttgcatgggatgaaatgatctgatttgattctcaaacatgctgacgtgttttttttatttgtgccaggtgtgtcccacgtggcgtgaagcctcacgctcggaccatctatggcatcgcctaactcgccgcatctggggtcgttcctaccttcgacagaacacatggcgtgacgagtacatttactggcatcgaacggcacagaacttccgcttggcacaatacgcccacaccatcctccgattcgaccccaacgaagaggaaggcccagccaacggcctcacctgccgctgcatcactctctctgacacccacttggcctgcggtttctccgatggatccgtccgcctcttccacctccccacgcgcatccacgtcagcacatttcgtccccgcacgagggctatgttgggacaattctcacgcgccatcaccggcattgtcatcacaaacaaccaccgccttgtatttggcaccctcgtcggggacatccacgtggcgctcatcaacggcccaccacacacccgccgagtcttcgaggg

SEQ ID NO: 17291 - DNA, 4376 bp, Cannabis sativa
  modified_base (4340)..(4348): a, c, t, g, unknown or other
aaaaatgacagggtattggattatattgtattatattaaagtaagttatatgctatatttttatataatattgtgttaagttttattttatattaaaatattatatatttatagaaatctgatatagttttaaataaaatttaatataatactgtttataaagcttttgtttatgtttatagcttctaaataaggccttttcaataagcttgtaatcctagctagtttctataagaaaaagatgtatcactaatttttacccaagtactctcaaaaatacttagctaattaaataagctaaaataaacttattttaaactttgccaaacgaaatcatactatcaaataaatcatcaatataaaactctacattgtttaagatctcatgctagctagacttaccaaacgcttcaaaataaccatcaggtggtagcttcaactcctcagcaaccccatgagctaaaagagcaattaaaaactgtcagtcttaaacaacttaccaaaaactactcaaaatgtaaagatcacgatctcatcttcaccactagatttcaccggacgacgatgttgagccattgcaatagccaccgcttctcctactttcaaggaagccatttctcttagacctttctcaactaaaagcaaattctcaatgtttccatccccattgaattcactcaattcccttggttcactctttctttccactacaccattgtcttctgatcacaaataattaataacactcggtcataaattatccaattcaatccaatctaatcatcctttacaagtatgacaatttaccattatgctccttggctttgtgaccagcagatagtacaacttcaactgggagaggggctaaagatgaccaatattcatatcttgcagttgcaatctcagtatgaatacctgccaaaacataatagcccccagtaaagaccatagaaagagatgtatatctatctatctactcagaaaaatcaataactaattcatgtaacttaaattaccatgttgaacacataaaccccagtaacgagcaagccaacacctcttcagaacaacctcttcctaagatgaacacttaattgatcagacatgaagaagtagaaagacacaagccttaaaaaataagctacgcattgaatcctaaccatctcttccttgttcagtatcattctttgagttgtaattcgaagtgatttcagttcgtattctttttcatggagattctccaaagcagatatagcttcatctcgtgcggtctaagtcattaaaacaaaacaattatgaaataaattgcttgtaacatttcttgattaatacaatatgtaaaaatttagttcgatacctcagcttcaatcctaagtgcagccacctcactgtttagatcgtttttaccgatttgttctgcaactcttactgcagcctgaaaaaaaaaatttaagttcatgcacaaattttctatgacaacttttacgatgtttcatgagaaaaatagcaaatcccagagtaacatggaaacaaactatatctatacttattttaagagctatatatgtggtacttattgttcatgtttggactgtaatctttaagttgtgattttgttatgaaattggcaagaatatggaagaaaaaacactacacaaaaattaaccccattaatattttgggatatcctattcctatacaatctccaatcaatgataagaaaataaaattacaacttcgcatgcaacttatattcatctaatttagtttggcaattgatcaactcattgattcctaagtgtttgtactcttatttttttttaatccaatccttctttcaaagcgtgacaattgagtgttttatacacaaacttaggtaacaaaagtatacttgtacgaacctctctttgctgcaatgcagcctcctttctgaataggaatcaaaaagaagaaaaaataaagtaaattagattctaaaagataatatctgaacttgtttatgatcatcaaaacttgcctgcttagaagacgggcttctaaacttacaccctctccaagattagcaacctaacatggttataaaggtagaattttaaagaagataatttatgtcaaattagaaaaaaaaaatggtactaataatctatcttataatggttgttagcaatattacctgtttctctaactgtcgagctcttgcctcagcttcttcacacctctcttctgcaagtcgaagctggggaagcacatatcaaaatggagttccaaataaaaacaattgtcctcaattgagacagaatggtttcaaaataagtaaaaagttagatcaaaaagtttctaaattttctggcatcaccttttcgagtaagctgtcgttttcttcttgtaacatatcaagctgcaatggaattgaaacttatgagtgaagtgaactcagccaagccatactaaagagcagaatgacagaaattacatcagcacttgaattagaaaaacctcatcttgtagaaccgaagaagagcgctgactgctaagctctctgaagttcatactcccaagatctaatgacaatctgctagtaatagtcacattaaaaactcaaaagggtcaatagtaaagatgataatagttctaataaaacatttttatggctaccttttatctctaccaaagttaacatctgaggaagttgaagatggggatggcttaattgacaatggaacagtagggggaaccatgggaactgtcttgatacctaaatgaggacgagtcactaatgaagaacgagcagaaggaggttgttgttgatgctggtcagtgggactaggcagagatggcctattagctattgtagaacgagcagagctaggctgctcgtgataataactttgctgagatggtgatctgatgtgtgaaacagagaaagctgattgagtctgctcttcattattcaatgactgaagaagccttgatgatagtttctccacattcagaggtgatggaattggtctagtagtacctgatgatacaagcgtctagaaaagcaaacaaacatagcataaattacctaacacacattcgaagctattgaaaacaagatttctgtgatgaatcatttcaaaatagcagcaacataattttgagggatttctttgatataatcataagaatggttgattaagttagcatttaccataggagagcgtggtcgaatggcccttccaatggcgagtccgaggcttcctgtgccagttgtactcattgagccataatcgaacaagagatcatcctcatcatcgtcctcatccgcagactggtttgccatgacatgagcaagcctttgtgcagccacctttgcattgtgagctttcttagcattagaagtagtactgagcaagccagttgccgagcttgccctcacatggcggtgcaatggcgatgatgatgctgccattggcgaagatggtgttcctggcgtccctgtaccgctgttgccttgcttagagtacatatgtctgtttcgatccataacataagaacaatgtgtatatataaatatataaacacagacacacatatatatatatatatatatttatcaatttaaacccctgcctttggagaaatttagtccattaatgcagttgttaagagacttgaatttggttggtctatcatacatattagataaatatttattcatttttaatggcttagttgttattttcccagctcaataaacaacagctatatcatgtaatcaattttgtattattttcgttgttggctttattttaacaaaaaaaaaaaaggagtttgagatatgaactgggtttgcaactaatgggggtttggaattggaggtgaaatgagagaaactccgaacgttgaggcattaatgaggaatgtgaattgtgaacagtcaaaagtgaagcttttatcgttatcaatgccacgttttgattgaatgagattaattatagggttttttttacatccagcacctaactttatatctaaattttaaagataaggtatattctctttttaaatattattaacgtttttattagatgggaatgtttagctaacgtggccactattttattttttgatttataattgtttttgggtcatttaattgtatgtacatgtatctgatacaataaaagtaaaaagacatatataggagagatttgacattacatgcttaaaaatagcatgtggtgttttaatatgttagccaaaaaatagtaaaaaaaaatatcctccaattaactttaatcccaacaataccctccccatttgaaactaccactctccctctctctctctctctnnnnnnnnntctctctctctctctctcacgccacaca

SEQ ID NO: 17292 - DNA, 5330 bp, Cannabis sativa
ttagggcataaaacccaactgaattaaactcctttatgacaacagagggcaaaaagttcattcaaaggctgatattgctgaagttgtgcataactattttgctaaaatttatggccacagatatcgatgaagcagccctttccactacactccaatgcatcccaactcttgtcactgatgaagataatgataccctttcaaggacttttatgctaactgaggttgaagcagcgttgaagtctacggcagcagacaagagccctagtgttgacggaatgtctgctatgttctattaacaaaactagtccattgtgggggatcttctgtctaaaattgtattaagtgttctacatgatggagctgacccaacaagaatgaaccgaacaatcatcaccctaattccaaaagttaaaaaagcacaacgaacgcaagatttcagaccaattagcctatgcaatgtaatttccaagattgttactaaaatcctagtggcaagattcaagcaagttcttcccgaagtgatctttaaaatgcaaagtgctttcttaccaaaccgattgataacggaaaacatcctagtggcttttgaattggtttatgccatcataaacaagacctcaaatagaaacggtattgcatctttgaagttagacatgagcaaggcttttgatcgcgtagaatggaggtttatagaagaggttatgaggaaaatgggattctgtaattaatgaatatcgctgataatgaggtgcttaacaacaaacatcttttcttttctcattaatggcaaagtgacaggtgctctaaccccttctagaagattgagacaaggataccgtttatctccgtacttgttcttaatctactttgagggtttatcacggttacttcagtatgaacaacgaactggtaatctatatggcttcaaactctctaggcgagctgtccctatttctcatgtactttttgcggatgataacctgcttttttgccaagctaattaaagttatgaccttgtaattaagtgagttcttgatctttatcatcgagcttttggacaagttctcaactctgacaaatctgtgatgtttttctcccctaacacaactttggctgcccaagtattttttcatcggcatctcaacatacccattagcgaatgccatgaaaaatatctaggttttccatcttactcaggaaaagataagaagggactattcagccacatcaaggaaaagatttggaaactaatgcatacttggagtgaaaagattttttcaattggaggtcgtgaagtgcttctcaaagcggtagttcaatctatccctacttatgctatgagttgttttcgtttatcagtttatttctacaaacaactagaatcaatgatggtaaatttttggtggggcatgaatgagaatggtacaaaaattcattggcacacagggaactttccattcaaaaaaagggtgatggttgtatgggtttctgctcttgtccacttcaaccaaactctacttgcaaaacaagcttggcgcctcattgaaaaacctgactccttgcttggacagctgctgaaaagcagatacatcccacagggttcttctttagaggctcatatcggtcattccccttccttaactttgtaaggattacactaaagagcttcttaaatcgggaatgcgttggaagataggagaaggtcgatttattaaaagtggtattgatccgtggatcctgggacatagctcttttcgtccttttcgatacacgaggccaccaaatggtgttgttgcaaacttaatcaccaccagaacgtcaatgggacattgctttactgcgtcagtttttttctccccttgatgtggatagaatattgacgatgccacttagcttcttcagctccaatgacaggctcatatggaaccatcaacacactgcatttacactgtacaatctggttatcacctggctagatctctcgatgaaatcgagaattcttcaagctcaacatcggcctcttcatggtggaattttttctaggctatacaacttcctccgaaagtcaaaatctttgcatggcaagttatcaatgattctttacctattgcaacttctcttgttaaaagaaagattattacagatttgacatgctcagcttgtcgccaaacttgggaaacaattggttatgcacttttcacatataaatatgtcaagaaagtttagacatattcgaaaatgacctttgactggcatgtttgttcttcaatgagaagaggtgactatatgctacatctccactcaatttactttaaatctgaaatggaacgaattttttgtacactttggtcaatttggagtgaaagaaataaggttgttcatggtcaaagagcaacactagtaaggaatttagcctcttttgcatctatctacatccaaaattatcaatcagccactcacaagtatcatgttgatgcctctcaaacaagatcgcaaccacctccactgatcattcctgccccagaaccctggaagccgcctcttacaagtacattgaagttaaacgtggacgctactgtggatgaaaaaagcaatataattggtgtcggtgctttagtttgtgattcaaatggatgtgttacggctgctctttcaatgcctgcaattgggaatttctcttctcatgaaatggaggccaaagcacttttccataatctaaattgggcattacaacaagatctaccgatttcagtcatcgaaacgggtgcacttatggttggtaattctttaaaagctccctttaattcaatttctacttttcatgatctgatagttgacattagatgcttgttgtccttttttcctaatgtaattgtttcttatgtcaagcgtacagttaacatggctactaatggcttggccaagtttgcgttaggggtggatgagatttgtttttggttggagactatccctccgccaatatactcttttattgtaaatgactatcttttttaatttataataataagtatttccactaaaaaaaatataaaaaattaaaaattcaattaataaaataaaataaaaatacaataatatttatgctataattaatttgagtaatttaacatccatatatatatataatattttatgataatttttttttatcagatgagaaacgtaatttaactacaacaatttatgacactagacgcatgtggtgatggtgtcaaatttgtctgtttcacccaacattcagaattctgcattttgaaaccaaaaagttttttcgataaatataagggattttttttatggggaaaaagcagcccttaacttcacttccgcattggtacaattaccaatgaacgcaccattaattcatcaagaaacaagatgttcttaattattatactaagataatttccattttattattgtagatgttatactgtatttaagtcattttgggatatttgttactattagtggtactattattaatattatttgactttgattaggtagagaagaaataatatatagccgctaattatacaatatcctgaaaatttgtaaaagaaaaaaaaaacaatatcctgaaaatagaatcttaattatgaaaaaaaaaatagaataatataaaatttgattatttgagatggttcctaagaagaacaaccaccaaaaataatacaaacctaatctcagccgccaattaaatcttacataaaacttatttaaaaatacatgagacacgaaaatattatgttcggcaaaagtgggccccactaaatatccgctccagaattgacctgattgacttgggccaacaagatcttacgcaccgttttcccaatagccgatagaaaaaaaaaaaaaaagaaagggtttcagggatttaaggggtggggccatatatgagacgtggcaaacaatgaatggagaactgtagataagcacgaaactgttcgtaggggcgtgaaacacgttgactagaaccacgtctccctcaaggtgtagacagattgagcaatcagtattgattttgtggccataaatataagtgtagtctccaccgcaccagataattagttagttgccttttcgcttttgacgggtgccactgagaaaagagtgttgacgggaaacacccaaaccatatgtacccgctccttttattttttatttttattttttacactgattaaaaacaatcaataaaattatttttttaaaaaaaaaaaatcaatataattatcttttaaaattaaataaaacgaaatattccaataaaacgatataaacatcatgtgatttttttttttttttcagatgtgataaacatgacaggattaagtccacagaaataataagtattaattttacctattttataaaactaattaaaaaatactttataattaaaataatactaaagtaattctaaaattaatatttatatattaattaatattaaaatatttttctttttctatgtattttttcataaataaaattaaatatatagtagttttttaataaaacttatatatagaagtctgacaattggacagcacacacttataccacttattgcatagagtatatgtttagtttttttatgattattttttatcttttgaaataaagattagcattcaaagaaaatcaattgttacatgattactttaaaagtccgtacaagtatctgtccaaataaatttccctacagaactaataacataagtagcaaatgcatgcccaacaccagagtcgaagctaggtgtagatccagctgaaaatattacgtctcttcttaagttatctacagcttaggtctaaataattttttaagcttttatacgaatatctttctaatctaacaattttaagtgacgtttgtttggtatagtggtaaaatttattttaaaaatttgggggtcataagttgaacacttcacactttcattttttatttttattttttcaaaaaagaactaaaatattattatttagatttgaattacctagcaactatatgtaaggtaaatacataaaatgtcattctataaaattcattttaacatactttttttttccttattttgagagaaaatacttgttattattaaacaaacaaagattcgtttacaataacagagtcaataggtggaaggatagtctccaaacaagtacaagtctcatccacccctaatgcaaacttaacaaggtcatgatccgcgttatttgtagaacgtttaacatgtgaaacagttacattagggaaaaaagataaaagactaacaacatcaattattaaatct

SEQ ID NO: 17293 - DNA, 8885 bp, Cannabis sativa
attattattattatgttaataaagccaaaagatggaaaagagccaaataattaagttatgatttatgaaactccgcacggcgagatgcctaagccgcgtgccgactactcaactacgtctctttcactattttctttctccccttccatttctttttctttaatttcttcccaatattttctcgggaaacaaacactcatacacacatataacatatacatacacacgtacacttacttatcaattaccatactctcttccaagaatttcccatattagttaggtgaaatttcgttgtccatatcatctttctcttcggctacagagaattattgatgggaaattattcgagttgggtggaagaaagaaagcggaggattatgaattcatgacactgatgcaaccatcaaccatggacgatttgcctggatcatttggcacaagtgctagtttagctttgcgtttgggacagaccatattctctttcgcttctcttctctttatgtgcttcgaagtacagttctacagctacaccgctttctggtatgattttcggattgggattctaactttgttgtctatcaataatacccatatcttacttttccactttaatggcttttcccctttctttctggatttttgctaacaattattagtttgttgttttcttttttcttttttttgtttttactttgttgattgtacttgttccttttttgatttagaagacaaagggtattagtattagagagatcccattaaagttttggaccttaaaattattgtatgtatttcttaattcttatggtaatttattatagaaggaaggagcttatttagctatatagggtcttttgggaacaaaataattatctccaacataattgtgctagaagaatagatagcataaatttatacactttcttgctttggtccccttctcaacacaataggcacttcataaaatggcctttcgtttgtgtctatatatatagtgtctgttacaaaagaaattcattaagttactagaataacaaactaatgaactaatttagccttaataatttgccattgaatatattggcctagcataagattctttgaaaactttgtaatgtgggggttaaggtaagcaaagcaaggtaaggctaagtaactccaaagcttttgggaattttcgatttagaatcagacttagtgtttttgtaggtttttcttttggtttaattcagtagctgcatttgccttttgtctcttgttcatctcaaaatcttgtatgttgattttgcagctacttggtgacagtcatggggttagtagttccttggagcatgacattggtagtggttgatgcatactctgtctttgttaaatgcttacctcgtcaaccaagaaccatattgataatcattttaggcgattgggtaagttcattttttcctaatctaactttagataatcattatgatttcactctaatttcatgtgtttgtcttgtcttgtatgtatatacaggctttgtcacttctgttactatctgcagcctgctcaactgctagtgtcacagatctattgattgatatcagtttctgctctgtaaagttatgtagtagatttcagttatctgcagctatggcattcttgtcttggtttctttcccttggttccttcttgttcaatttctggcttctaccccaactatgaagatttttcatagcaaacaaagatgaatactttcaatacctattcttccatttttatttcctaatcacagaaaaaaaaaagaagaaaaagaacaagttatctcatcccggtagcgaattcaaagagcttcaaacccaactggagtcatctcttgctgaagctgtgactggattctgtttgggacaaaagtgctatctttgctgcttggtacagtacagtaattcacagcagtctttccctttacacatattgtgtctttgaggtaataaaaaaattgagcacaaaacaaattgtaagtaagcaagttgtgtgttcagcaaaacaagaaaaagaaaaatgcattgctcatataatttactccatagtgatctttgttgttaacttgtgaaaagtataagtagcatagttaaaatgcaatttttttgaggtgaaaaacactattgtttatatttttatatctttgtattgcttacagattttaatatctcctactaccatgagttttgtcttgactaaataacattagagttgtaagtaaatgaacatgttatatcatacaattaagacttgaatgtgaaaatagcactatggtgggctctagtgactgtttaataatataacaaaataattggtgatagactgagtggaatatctttctacatgcaccatccaccacccttgttgattcattttgttgtctgctatatttgacttaaacttgtggttgtgctttatttttctcattcttttttgtttaaaagaaaattatataaagaatataataaaggaaagcctttggagtattctttgtattttctaaaaaaaacaaatgtagcactttttgcctatttattttacttttttagtgtgtaaaaaattatccaattcaattataactgaccgatttaattttaaccgattcaatagaattggatatctaattataactgaccgaatcggttattggatgagacatgaaatataatggataattgaaccaaaccgattcaattatcattcaataattattccatttttttttaaaatttttaatataattttatatatttaatatattttatttaaaaaagtatggtaattgatttaatatatattaaagaaaaagaattttagatctaaaatattaattctcatctttctaaaagctaacagaaattgtcaatgtgtattgataagttttattttttagcgcttttaatatgaaatcatgagaattagattggactaaactaatgaatattgtatatgttagattattaggttttaaattatgtttatatatatatattttctttttaatgaaatcaacttgaataatagctaaaatggattgaatgaatctaatccaatcccatagaagaccagttaatacatttattagttggaaccgattcaatctaatatatttattggatcggatcagatcggatgactcaatttgaatttgattggattggaatggatgatgacaaaattcaatatccaataaataattggattgaatttgttaggttcaaacccattgaatgtggtttaatagacacccctaaatattagtagtttttcttttagcctgtccatttagtgtttaaatatgatctttttacagcttcttcatgtagtttaattacttaaattgatatattgttattgaattgtgctcataaattaactaagcatgtttttacgaaaaatgcttgaataaaaaaatgtttttacaccctgtccaattttattgtttattaagtatacaatttcaaatttatgagagaacccaaattctctttgagacgttatgttcgttactctcagaaacttgaccgttggttcccgcctcaacaactctttacactgcttttcccattctctatctttcaaaacctcaaaccaccaatttctccaccatcttctcgagaaatgtaaatccatgagccaactcagacaaattcatgcccaaatcatcctccaccgtctcaccctccaaaatctcaccctaggaaagttaatagctttctgtgccgtcgccgacgccggcgatataaggtatgcccagcttgttttcgaccaagttattgaacccaataagtttatgtacaatagtctcataaggggttactcaaataccgataccccattaaagtctttactactgtatcgtaaaatgattagttcgggacattctccgaacgagtttactttgccgtttgttcttaaggtttgtgccggaacagctgcttttcgggatgctgtggttgttcatggccaggctattaaattcggaattgggtgtcaagtttgtgtgcagaatggtctaattaatgtctatataagtttcgggttgattcgttttgcacgccatgtgtttgatgaaatttcgcagaggacactcgtttcttggaatacgatgattggtgggtattctaaattgggtttttgcaaagaggctttttggttgtttagagagatgagagagtcagagttgaggcctgataagttcactttagttaatctgttatctgtttgttcacagagttgtgatttggctttgggtagatttgtgcatcttcatattgtgataaccggagttgaaattgatcaaattgtgagaaatgctctcttggatatgtatgccaagtgtgggaatttgagatcttcacaaactgtttttgatctgatgtctgataagaatgtagtttcatggacttcccttgtttgtggatatgctaaaaatgggcacattgagtctgccaaagcggttttcgataaaatgcctgtgaagaatgttgtttcttggaatgcaatgatcacttgttatgtacaagaaggccaattcaatgaagctttggctctattcaacaaaatgcagagttctaaagtggttccggataaggctactctggtttcaattctctcagcctgtggtcaaattggtgatttggtcatgggagaagaaatttacaaatacatatgcaatagcaatatggaacttggtttaactcttttgaattcacttgtcgacatgtatgcaaaatgtggtgccctcgaaatggctttgcatctctttctcaagtctcccgaaaagaatgttgtttcatggaatgtcatcattggggcccttgcgctgcatggttgtggactaaaagcgattgagatgtttgaagatatgcaatcaagagaagttttccctgacaaattcacattcactggactgctttcggcgtgttgtcacagtggtcttgtagacacagggcgatattacttcgacataatgaattccttttatgggattttgcctgagctcgagcactatgcctgcatggttgatctcttgggcagattagggctcttagatgaagcggtcagactgatcggtgtaatgcctataaaaccggatgtagtgatttggggtgctttgctcggtgcttgtaggattcatggcaacttagagattagcaaacaaatactgaaacaactgttggagttggagccacatagttctggaccatatgtgcttctttgtaacatattttgtgaagccaaaagatgggaagacgcaaaaaagattaggaaactaatgaagaatggtggggtaacaaagagtagagcaattagtttcattgaaattaataaccatgtttttgagtttatggcttatgaccaaagacaccaactttcaagtagtatttacactatgcttgatcaattaactgatcatttaaggtcttgttcattttttgacatagatgaaatgcaggtcttggtgtagtttcaattattacctgtctaagtataatttccaaggtccaacttggtattttaaattgaagaaaaaaaagagcactgattgtgttgaagaagagtacatgtgcattattagtttaatgattaaacacaaataataaattttgctatgggcgtggatatggggtggcacacacttgcctagagttttcgagtctttgaccaaaaacctaaaaaaggtgaggatctttggtgagagaccatgatgatgacaaccatgcaaatacagaaaaatacaaaacagcaggaactttcatggtaatgacaatgaccaacttttttttatgagatcaaacatacattcatggatcaaaatcaaatgatatagcaagcaaatatatatgagatattgtctggccattgataattcttttccccttttattttttaatgaaaattctttcttagcacataaaataataataataaatctaacacataagtttttttttttttttttttcttttgtatagatcggattctcttcatacttgtctgatacttagaatctatatattatctctattgttaatgtcgttttgccgggttggtgaccttcactgttccctttgccaactatgtttgctcccatagaccaattctccacatttccctcagatttaagataaggaaagtagtaagtattatatataagtctgactcaaaataattcatatatattaggatagaatatttgactcatactctactctaagctaatgccatttcttactgtttagcccttcaattttaattttaataatagttttcaattttaatagtgtttattatgttcattgtatatgtgtagttttgaggctcaattagtgttatgttaccactggtgtagctggcctacatggttgaaggaagctctgcagaaagagcacgcttggttaggttcctcattgattttcaaagtaagagataccacactaagggcatagtttttgctaataaaattatgtttgttttgatgtaatgtaatgagaatgatagtaagtaaaatataagcaatgctaggatgcggccggagagtgccatgacaccttgtatatttttttttttttttagaaatgaaaataagtaaattttgattttttgattttacatgtattggtcatcttttaatttacgagttggtttcactattagaaacaataagaataataatgagaatgatattatgatttttgataaaattctataattacattctaatataaaataattttttattcaatttgatgtggaaaaaaaagtaatatatattgataaaaatatgtttagtttaattattttttatttaatttgatgcggaaataaaataaaatgtaatatattgacggaaatattcttagtataattatttttaaatattaaaaattctaataaaagtaaatagaacaaaaagggtattttattaatattttctaacaactaatgtaatcatttttacattagcctatataataatgtcataatgattataataatatgttaatgtaaataataatttattttttcttttttgccctcactaattagaattgtagctggctcctactgagagatgtaattagtattttgtagtgtatatttttattttatatgcacatattgctgctaaactaaacttgaatacaaagaaacaaagaagaggtccaatatcttctacagcctctactcacattgttattattattattcattgaaaattttcaaaaacagtttagctacatgccctagtcagtaatccttaagttggactagtttttgtttttggaacaaagtattggacctagttattagaaaacacaggccctattgaaggtattggatgcttaatagagtagatatatagggctgctaccctaaagattaaaatgggccaagcctttgaaaatttcaaaagaaagatttcactttttgaaattgtattgtagtgggaaacatgagatggagatgagaatgtcattatcacaaagacaagaaaacctcttgttttgtttatcactttttaagtgaatgaaagtgaagtaaaagaaaagggagaaccattacaaagaaagaaagatagtggtagacacctttgtcagatcagaaacaagacacccaataattatgatatatggaactttgtttttattgggtgattttcgtgacaagtagctagctaaacaagaagcttcaaggaaaaattaaataggaaaaaacaaagtatagtgaaagagtgggggcatgtttattttcaattatcaaagtaccactcataactaatataatattacataaaaaaaaaaaaagaacacatatgaacaagttcgattctctatcaaaatatcacgtttttatattactttaaaatagagaaaaagaatattttgtctgaaaaagttcattactttttatttttgtgtagcaaagtttatgatcattttaaaggtggttgattagacacgttacccgtatatatgatgattatttttaactatcataatatcgagattcataaatcacttacaataattaatgtaaaataactataaagttaaaaatataattaagagcaacaaaaaaaatgtattaacaaaagtcatccaataaataaattattatagctcaaaattttaatttaagaataatatttaggtaaatatagatacaacatttctaagttttagtatgaaactataatttttttattacattcatagtgtatttttttttttaatgttttagtgcaaaaatatttatatataatattattttagaatattttgtggcataaatatatatctttaactgtggattgtaaataaatacttaagtttaatttttggccacaataatacttaagttatattttttacaagtctatttaatgtcaagtcattatacttgtgtcattttcttattggtatatttaaactaatatttttttttttaaaaaaaaaataatgatttggaccaatcaggaactgccacataataatttacataatacttaatagtcaggtacttacagaagttacagaattataacttaaatatttatttacaattaggagttaaacttaaatattaataccgtaaattacttaatattttattatttgtgtattatatatgtattatttaaatgatatcgagaaacactacaaaaaaaacagcagctacttttagtgataacttttttagtcacaatataaattttttgtaactaaatgtgacttttagttgactaaaagttacttgtgactaaaacataatatttacttacataatattttttgtaactaaatgtgacttttagttgactaaaagtcactaatttagttttaatcacaataaat

SEQ ID NO: 17294 - DNA, 1853 bp, Cannabis sativa
atcttattttgcaaaatacaaggtccaaaaatagaatttaccctatatatttcaaaagaggggaaaaaatggtaaatactattttggattatgtgttttgcaaaaattactaattggactacctgttttgttaaatgataaaatggaccctatatttttcaaaatagtaaaaataggaccatgagcttaatttttaaaaaatttattttttaatataaccaaccttaagacaaattttaacatgaacatatacaaaaaatatatccagttttgacataacatctctagatcaaattattattaaattttattttgataaaaaatcagttcaggggtcctatttgtaaaattttagaaattaaaaggtctattttgttatttaataaaatagaagatccaattaataacttttacaaaacatagagtctaaaatagtatttattaaaaaaaaaaaagaagagttaaacaataatattcctttctcttccacacacagcacccattattccttaattttgtcatattcaaatttgagttgaggtatttgaataaataaaagtgaaacgttagtcttgaatacataatctgtgagaaaaatgttatgacgcaacttaatgtgaagtaacataagacctgacatagaattatatgtgtattttaatattaaattttatatttttttaatttaataaataatataaaaaattattaaccaattatagaatcgtaactatgatcttggacaccaaataagaatgctctacctagtctatgatgttaattcttgtttgatcttgaaccctatatatatatcttgctagctgatcaccactaatttaactttactgtattgtgaaagaaaattgctagttttaagcgtgtaatagtatagtagtgtttgacaaatgacattctttacgcggttacataattaaaagtacaaaaatatttatattaaaaccttaataactgaacccaatattgtagataatatatagagagagatccatgttggaaagttacggaaggcttgatttactttaaactatttgcccaattttcttaatgacaactccctatatatatatggtcatacatattatttgaactatattggtagtattgtatcgtgatataatttgatcatttgtaatctatgtatagagagagctggagatgaatatatgtatatatatacggctattacaataagaattaaatattataccatatcaataaagataataatttatagcttgatttaatccaataacttttttttttttttgaaaagaatctaataacttaaattaattcttaaaaactacaccataattaatatattttttgaatattattaactataagttcaactaacaaaattccaaacctataacttttttactttttattttatgtatgtcttaaaattttaattatatatattttttaatttctaatttacatagaaaaatatggtatagttcctctaaatgataaggtctcctaaaattgttctcgtttttgaaagttagatgacatctggaagagagttcccggaagtctaacttgtccatctggaagaagtctcgtaaaatgacagataccatccgaaagggggttcccggatgcctatcatgtccacctggaagtctttaagaaaattagtcttccttcagaaaggagttccagatggctagttgtttcttcctggaagggagtccttgatagtcgactctagttgttgcctttcctatctgaaagtccttttaacgtaccctttggtccgtcttctaggaagtgtaccgtcttatctagaagcacttcttcttatggtgatgtggatatattat

SEQ ID NO: 17295 - DNA, 4650 bp, Cannabis sativa
ctcttctgctatagtgaattgcttttgttgttaaccgtttgctgtctcagcccttatcaattggtatcagagcgggcactccgtggtgaatgccggtatcgacgagaatggaatctcgggtagatgggttatcgactacagtttttggggtacaaaaccagctcaacgatcacggagtgttattgaagagtcatggggtagacttgaaagctatgaaggaggtcttggatcggttggttactgcccaagctcgtgtggtagatgagctggcctcactccgggaggggtcgacgggaattatggggtccaatcgtcgtcttcacgggggagacggatctgttgtgggtggtaccggaattaatggtaggaatacagaggttgttgagcaacgtgtagacgctggtgaacaacgatcggaattccgcgcccggaaaatcgaactcccagtattcgatggtggagatcccgacaagtgggcgtatctcgcggagaggtactttggactacagagattatccacagcagagcagcttgaggcagcgattctctgtcttgaagattcagctctgagttggttccgatgggagaatcagagacgtccaattcaatcttggaacgatctaaaactgttactgctccgaacgttcagccccacacacgaaggatcgctgtatgatcgctttttcgtcctccgccagacctcgaccgtgcaggaataccgtaggcagttcgcgtcgctagcttcgtccgtcggagtaatggcggaaccggctctgcaagctgcattcatgacaggcttataggtggagattcaagcttccttgagaatgttggagcctactgggctggtccatatgatggaattggctgaaattgttgaagccaatcatattttagctaacctctcaagagttgggctgactgggcccaataggtcaagcccaaaacctccacttactcaattaaccatacccgactcccacagaggtacattccttccatcaccctcttcttcttcatcgtcgtattctgtgagtggaaattccaggtctccatcgtcaccagcagccgcggccaccagctaccggctactaactgaatctgaaattcaagataagaagaaagcaggggtgtgcttcaaatgtgatggtcgttggacccgtggccatgagtgtaaaaaaactgaaatgcaagtcatcattatccaagaagaagctgccgaggagggattgttggatttcaatggagaagaccttcaacttccagatttgttagctccagcagaagctcaattagtggaagtgtcgttgaatgccgtggtgggattaacttcgccaaaaacgatgaagctgctggggtctatacatgggcatgatgtgatggtcttagtggatagcggagccacccataacttcatcaccactgaattggccaagaaacttgaattgccactatccgcgacggaggctaacggagtccaaatgggtagcggacaagctgtcaagggggaaggcatctgtcgggcagttcatctctcgttacaagaattggaaatcattgatgactttctacctctccaattgggcaacaccgatgtcattcttggtgttcaatggttagaaaccttgggcgagactactcaccactggaaggaacacacaatgacacttaaggtgggtagccaacgggtcactttacaaggggatccgcttctccataaaactcgaatatctctgaagaacatggtcaagttactgcaacatgaaaaacaaggtgtgtgggtagaattggggtgtgtttcagtagcacaagggaatgtggagtgcccagaagatattaatggattgttacagcggtacgagtcggtgtttcaaactccaacgtctcttcctccaccacggagccatgatcatgccattaacctcctaccgagcatcaacccagtaagtgttcgaccttaccgctacccgtatcacattaaggatgaagttgagcgtttagtcagggatatgttgaccggaggtattgtccaaccaagcaatagtccttattcgagcccaatccttttggttaagaaaaaagatgacaaatggaggttttgtgtggattaccgagctttaaatcaagccactattccggtgatagatgagctaatcgatgagttgcatggggcccaagtattttcgaagttggacttgcgttccgggtatcatcagattcgtgtgaagcctgaagatattcacaagaccgctttccggactcacgaaggtcactatgagtttgtgttaatgccatttggattaacaaatgctccggccacttttcaatttcagatgaatgagattttcaaacctcaccttcggaaacgagcgttggtgttttttgatgatattctcgtctacagtcccgacgcacaaacacatctcaaggaccttgaaatggtgttacaaatgctgtccccacatcaattttttgctaacttaaaaaaatgttgctttgggcagccacaagtggagtatcttggtcacattatctcgggccaaggtgtggccgtggatccttctaaaatcaaggccatgcttgaatggccgctgcctaaaacagtcaaggagttgaggggtttcttaggcctcacgggttactaccggaagttcgtgaaggattatgggactatagcacgaccgttaaccgatcagctcaaaaaagaccaatttgggtggacagatgaagctaccacagcctttgaaatgttgcgcacagccatgaccacagtgccggttttggctcttcccgacttcaccaaaccgtttgtggtggagaccgatgcttcggggtatggattgggggcggtgttgatgcaagaaggtcgaccgatagcttatttcagccaagttcttaagcctcgggcccgcctgaagtccatttatgaaaaagaactcatggccattgttcttgctgttctcaaatggcggccctacctccttggccggcgttttgttgtccggacagaccaacaaagcctcaaatttttgctggagcaacgactagtcaccccggaacatcagaaatggttggtgaaattattgggctatgatttcgaaattcagtatagggcagggcacactaatcgggcagcagatgccttatctcgcttccctcttgctgaatgttctttgttgacttctacggcttggcttgattgggatgtttgtcagcgggagattgacacggatgtcttcctatctagagtcaagagggatttagagcaagggaaatccgttacaggtttcacattacatcacgagcggttgttgtataaaggacggctggtgttgtcttccgcatcgtccttgattccccatttcttaagggagtatcacagctctccggttggggggcattctggggaacttcgcacctatcaacgcttgaaaggcgatgtctattgggtcggcatgaaagcgaaggtgcttgactttgttcgctcctgtgagacttgtcaacgcaacaagcatctgtccatgtctcctaggggtttattacagccattgtcactaccagctcaagtttgggatgatctcactatggattttatcgaaggattacccaaatcggagggagttgatacggccttattggtggtggatcggcttagcaagtacagccattttattaaccttaagcatcccttcaccgccaagtcagtggctgaagttttcaccaacacagtggtcaaattacatgggcagcttcttactatcgtctcggatcgggatcgtatttttctcagccatttttgttcggagttgttcaaactccaaggcacggagctccgccatagcacttcatatcaccctcaaacggatgggcaaactgaggttgtcaaccgttgccttgagacttatcttcgttgctttgcttcgaatcgtcccaaaggatgggctaagtggttagcttgggcggaatattggtacaacaccacctttcactcttccttgggttgtacgccctttaaggtgttgtatgggcgtgaccccccacctttggttcacagcggggtctactgcggtcatggttgttgaccagtggcaggaagagcgagactcttttctcgatgatttgaagatgcacctcttgcgtgcgcagcaaaagatgaaggacgtggcagaccagtctcgccagcaggttgaatttgctgtgggggacaaggtctttgttaaattgaggccttacagtcagaagtcgttggccactcgtaagaacgagaaactggcagcaaggtactatggtccatttgtgattcagaagccaattggtagtgtcgcttatcggttggaccttccctcttcggcagccatccatccggtgttccatgtgtcccaactccgcactgctatcggtacacctcactcttccaccaccctccctcctaccttgacagccgatttggagctcattgtcgaaccagaggagctgctgaatgtttgtcaactccccacagctccagaccacgcaattgaagtcttgattcgttggaaggatctgcccttgtttgaagccacttgggagaagtttgatgtcatccgcgagcaatttccaacattcaagcttgaggacaagattaaaaatttggggggggggggggggggg

SEQ ID NO: 17296 - DNA, 2058 bp, Cannabis sativa
cacaaaggagccaatcaggtgattccttgaaactccattgttgcaactagagctctcaccagagggctcctccgaaggttcctcagaaagatcatcaccggccgcacgattttcttgaatttttttcttagtgtcccaaggaaagtctctaactacaccatgataagttctcactaatttgtgaggtctcgagcatagagaagcggatccctcaaatttcctctttttaaaaggtgtagtacgctcattggtttcagaagaaggcggcacaccaatatcaccacccaattgtttgatctcatacaaatccaacttaccaaagtgtttcaaatcataaagtaattcttcttgtgctttaaaaaattgagacaaggccttttcctcttcaacatctttttcagcttcattaccattagagttgacaagctcaggtcctttgccaatcaacaaagagctattacccagagggagaacatcaagctgaagagagcctcccaagttagcattaagattgtcacggggtgggcttaaattaattcccccaacctccaaggggcccgacccaataacaactctcggcccaagcttttccaaagaggtctccttattcttcaacccattattcataggtggctcaagagtaacacacggcccagatgatttgaagtagtccagcccatttgaaacaaacggcccaccatgcctttctgcacactcggcatttaataaccccagcccaagactttttttcaaagaaaccccaggcccacgagacccttggcccaaatcacactttcctttattagccccaaagaccacaggggccccacctgtacgcttgtcatcaaaaaccaacgggttactcactattcccgcctgagacgaaaccagcgagtttggaaaatgcccagaagactttcctccttctttcaaaattacaccaacactattaccattttcagcaaactttgaagcacccccagcaggcaaggccttgggcacccaagtctgatacgaaccccgatgaagctcagacatcccacgcccagtccttttcttcccacgtttagtagctcgagacgagatggagactggacgggccaccgtcccttccaacgcaggaccgttcaaaggcgaaccaaggacaaacacccccgcctgagacgcactccccgaaaaaacatcatggaacctcgacgccgtggacaaccacgggccatacatggggtacgtcgaaccatcggtcgcctccaccatgaccggagaagagagtgagcagcccctcctctggtggcccaggcggccacaaaaataacagaaaataccaattttctcgtacttacattgaatccactttttgcccccagaaaagagatcgaaaaaacagccagcgttcaagggattttgaatattaatgtcgataagcacacggagataaggaccccattccaccggcttctcctcgtctaactcaacctttacaacctctccaaccttaccacctaaaagtgagccattctcaatcgaataatactcatgaggtagattatgaaattgcacccacactttgaggatatccacggactgcgactgctctataccagaaaaccaagagtgaagagcaaaggtgtatcctttgaacgaccagggagcaagatccagagcccaatctctatcttcaacatttgcgaacccaagcttgaagcagttctttgacccaggtccctcagcaagtgagcacacagtgacatgcttctgccaattttttgttacaaattcaatgatatcatccgcatccaccagcataggtgccaccacctttccaaataagcacagtgaggaaagaaccttcagggaggtggcacaaggagccagagaaatcgaagcttccacacaggtaaagcatttacctttctgtgtggcagaagggacattaactagctccataaaagctcacaaacaaaaacacaagacaacaagagacaagagcaataactatgagaccaaccgtccaccccagcaaagacacacacacactttaagacacagagcaaaaag

SEQ ID NO: 17297 - DNA, 5825 bp, Cannabis sativa
caagagaatcggtttccacaataacatgcttccatcttttcttcttaatccaacttaaagtctttttgacaacaatggcctccactaaactgggttgaacacaactagctttatgcaagcaaaacacctcaataagctgaccatcagcaccagcttaataccatcttattagattgtacttttgaactaatttatttgtgcttacgtattgtgttttcaaacttgtcgtatcgcactgtattatgcctaagcacatattttttttgtatcaggtcgtgggtactgatttcatgcagtgtcaaaagaccctaccaatatacatatattttttcttttgacatctgacccgacccatatttactaagccattcaggagaaattctttgacataaaattaacattatctatgtatttttttttatatatttttctaataaaaagaaactaatatcaaactttaaatagccgaaataggaaatattgaaaattgacaaaatatatataacaattgaaaattgaaaattgaaaatatggttagcaccatagttgtaacttgcaaggattctactctaggagggggtccacagtccacaccagcatcgccgttaacaacgagagggtaaaaaggtaattccgttatgaaattcctacagaattacaaatctcggccagaagtcgagctgtacatttacaactatccacaacgaggcgtacgacagagacagctgtagtggcagtatcgtaattaaatatgaaatctgggtagaaaacataattaattatataataataaatataaataaataaacaaaagtctataacgaaagatgaagatccaactttgccatccagaaatccccaaattttcccctgcgacgactccacgaggaaaatccttttaggagagaaagaaagagaaagagagagagaaagacagatagagagagagagagtgtgtgtgtgttcaggcattaatggcggaggggaagaaagagagaaaatcgagcagtgaggagagcgtgaagctgttcgttggtcaggtgccgaagcacatgaccgaagctcagcttctcacaatgtttcaagagttttctctggtcgacgaggtcaacatcatcaaagacaaggtcacccgtgcctctcgaggtttctgaatcattctcccgcttcaccattgactttcctgttttgttttcctctgtcttcgtcgttgaattcatattcgcttcataatgcctatgatttgcgtgattcggaagattgttcttgagatttggggttttcttttggggcaaccctagagtcagaccttctacatggttttgattctgtgcttttggttctcgtgtatatgtttgcagggtgttgttttgtcatatgtccgtcgagacaggaggcagataaagccgtcaatgcgtgtcataataagaaaacgctacctggggttagttgaactacgatctctgattttatgtttggtttgctacattatttcttggtgttttgttgataattgtgaagaatgtgatataattttgtgatcgcaatcaactgtagttttcatgatcttgcaattgggacactaactaaatcatgcacattggatatatgtgactaaaaacttattgcaacttctgtcgttgactttggttagcttcatatttactactgataagtattttaccacttactaattttggattagtgaaatagttggagtcactgacattaccaatttcaatgtttgtgcactacgttttagaggcaagttggaataaaatatgtacgcacttttcttaaaatggtgttacagggggtggtgtgaataaacccaacttcttggtgttcattttttaatgattccaattctttagcgttttgggattttttcgagataacttggtctggaattggtatttcactctgcattgtatcaagcagcatcatgtttagacaaatcttatacaagatatgtgcttatggagtttggcattttcctggtctaggtgttagagtgatttgtggagcccattttaggccttttggatcttcaagtaatttcccaggcaagcttctcagttgggttcttgcctttgactgcacggatgattgtgatttggtcaatgcaagacatactttttgcacttgtaaaaagccttgatgaaaactatagtcagggtagaatataaatttttagtcactcacattattgccttaggctagtgttaatttgtggaacttatagttttattgtgtgctgtgtgtttgtattctcttagtctgattgaaaggtgtcctgttctttctgttcaattcaggcatctactccgttgcaagtgaagtatgctgatggcgagttggaaaggctaggttgtagtgtaatataatttcacatgacagtttctgttcctaagatgattttgagtttgtttctattttcaagtcatgagttgtatttatttcatttttttcgttatgctgaattattttatcaatttttaacatttgttatttgactttactacaaaccagaacacaaactttttgttggtatgcttccaaagaatgtttctgaagctgaagtttctgctcttttctctacatatggaaccataaaggacttgcaaatattaagaggttctcagcaaactagtaaaggtacttattttatctcttatttttgttgtagctttgctgtgcttaaaattggttttgtaaagaaatcaattgggttgtccaaatatgtttccatggcaggttgtgcctttctaaaatatgaaacgaaagagcaagctcttgcagccctggaggctatcaacgggaagcacaaaatggaggtttgtgtttaatgttcattactgtacctgaaagttcacattctggaatgtagagaagcacttgctggaaattttctagggaattaaacagtcacttgatttgtatacgtatattttaaagcttttgcagcagttatgctgtgaagaacatctttattttatttgaaaaatggtgttgttattttatcatcaattttaatattcaaacctcatttatatgcaaaaactgtggacatgaagtatttggtaatttgcgtccacaagtggcccaactatgttcctttggttactgattgatatctttttttttttgtcagggttcaagtgttcctttggttgtcaaatgggcagatacggaaaaagaaaggcaagtgcgaaaggctcaaaaagctcaatcccaggcatctaatgtgccaaatgctgattcacagcatccttcactatttggagccttaccaattggctatgctccaccctataatggctatggttatcaggttaatcttgttttgtttttctttttcttttccagcagtgtaagatgaatgtatagcattagtgtgactatgttccacgatcacgtcctctgaagttccttttgctttctgttgcacttatcaactttgttttggtttcattttgataagaaacttcaataaattgaagatattattgttttcttataggctcctggaacttatggtctcatgcagtatcgcctatcaccaatgcagagtcaacccggttatcataatatgatgcctcaagtaaaccaaggaaatgcattaaggggaatcagtcctgatcttgccccgaatatggctccgagaaatttcggtatgcccccccatccaaattatgtggggtcagcttatcctgcaatgccagggcttcagcatcccatgcattatcctggaggaatgatgagtccccgaccattaagtggttcccctgggtcagtgcatgcagttgtaagcagtaaccctgcaacatctccagggtcaagtaaaaattctgggggtcaagttgaaggttgttaggcatattcttctctgtttttctttttctttttcaggcaaaaacaaaaaaggaggaaactcttttggatgtaatgcatttgctgttgatatttgttaattattctaatgttctatcacttaggtccacctggtgccaatttatttatttatcatatacctcaagagtatggagatcaagatcttgccactgcttttcaagcttttggtagggtcttgagtgctaaggtttttgttgataaagcaaccggcgtcagcaaatgtttcggtgaggagaatctcatctactttgaatttgatttacattgcatagaaatttccatctcttaatagctgttatatacaggatttgtaagttatgacgccccagatgctgcccaatctgccattagtatgatgaatgggtatcaattagggggcaagaaattaaaggttcaactaaaaagagacaacaaaccgaacaaaccatattgatttgaaggttattgatggatgagggcgggattctttattaaaagcagttgaagcatgcttgatattttgcagtcgctgcagtatcatgcttcaaggggtggattgagatcatctgttcttatgtgcataactccatcctgcttctactttcctcggtcggaataaaattccagaaacttgtaactgatggtgctatttgtgccaaaaaaaaatctgtaacttgtgtatcattcaaattcacttagacagtaatttatcaatttattgattcttccttcagaacatcttgttgtataattgatggaaactttcatgaaaaaatagctgattctttttttcttttcccacaatttaatgacaaattctatcttcattcttagtcactctgtatctctcattacacatcctgcttgatagtttccaagacaaagaagaacgaagaaactcaggccttcataattttaatgctctcaactttcattctcgtcctcttcatttagtcatgttaattatatagccattgacattatgatttgggtatctgttttcttactctaaggacaattagaagttcacgtgggtgttttgtgctgtgagcttgtgggtaaaattctgttataggaattagattatgctttagaattgctgagtatttttagtgagtgagaatgtgtgagctgagtatgagaattactttgtaattgcacctagctttttgtgctgagaaccaagcctcatttcctcacagttataaagaattctcagcccagatttgtacctcttatcaatttgatacatgtttgattcctgtatactcgtactatcatctgcttactactgttgtcttactattgtctttttttcctgtatacatgtttgtaattggtcttgtttttttcttttttgtaatattccaatgtaaaaatactaacatatatatattactatggaattggttttagtaagaagtttgacaaaaggtgaagctgatgagctgctatatatttaaatatataaatttgttataaatgtgtgctgtcacatttttttgaagggtacttttcttttatttgttccatttattagttttgtttttgtcttcctaaattattgtttttatgggagattggtcaacttaagaccaatgctaactgacccatttcaataaaagaattaatcaaaagtcaaccactaaacaatcgattaaaataaaattattttggtaccttttgaatactttcaatgagttagcttcattaattaataacaaaaatctttttaggcagttgaagctagcctttcattattggatgataagcatagtaatatatgagtcacaatttggtaggttaggaaaatcaaaaatgatatcttgtattactatttcacattaatacaagaaagataatgatatcttgtctacgttttcccccagaatttgtactctttttttaaaaatatttttattttttatttt

SEQ ID NO: 17298 - DNA, 8067 bp, Cannabis sativa
aaaatcacatacaaataaaaaacttaactcttggaagtataagatgcatcatggggcagagatataataattaacagaataaaagtatctcagttaccgataagtgaaatagttaccgaaccactacaagattttgccaagtgaatagccatgttcatgaatacaaaaattgattggctatcctcattactgaatccagtaatgccgtcaatgttactgtttaaggatgaaatataagacaatgttaggcataatacattatatacaagtacaactatcaataggtcatcgtacatgaatgaaattgccaacatggtaatcttgtcttactaggttcgaggatgatacgaagttggccacagcttacattgttcttcccactcttcttttgacaatgcagcatattggcatacctaaacaaaagttgaatgagtaaattcaagtgtaaaatactgattcatttatcagataaataaaatattattagtgatcttgaaaaataaaaagtacggttgtcatatgaagccaaaaattgaatgatgaactcaagtttaattcaaggaaaacatcatttagatttaaattttcttaagtttatttattttacatagttataacgaaagatatgagttatgatcatccaaaaaaagtaataccctctgcacctagaagattaagttagaagcagaaatgcaacacatattataagacatgaaaagaagacccactttcgtttcaaaaacactcaactggtatgaattgataagctcctgcacaccatctggcatactgcatgacttattgctctcttcagaagctacacataagatcaccgatagctgaatatttcctgtcaatccaagtcaagtcaccaagttgtggaaatactgatagataccaataagaaagagtaaaggagggattattaaaaaaagtggatgggttaaagagtaattgtactgatgggtattggataaatgggaataaattagtatatatatgggagaggtgagaattagagggccatatcgtggttagctcaaatggtcatgtggtttgctcccacaagtctgaggttcggagtccctcttgggtagcagctaaatagcaaattgctatagtttcccggtcctcaaatattgtagagttaggtagggatcctagtttcaaaaaaaaaaaaaagagggccataaattgtttgactatatttggagagcttctgctcttcgggaaaatgccaagactcgaattctaggccaatcactgtttttctcactgatttccaataatgttagttttattctacctgtttaccaattctattctaacgtattttctatatctggggtctatcaaataatatttgtatgacaaaatttcaattaggaccaactcttgacaattttctactgggggacaagccaaattgctttattaatgattcgataaacgaagtattgtctctgctcttcaaggaaattaaagagtgagaagtaattcaaacaaatactggtaagtcaaatggtatcaatccagaaccaatgccatgacttgcttcacgagaactggagttcaattacttcagagcagagcacccccactgtaatgtgagggatgacaaatacagaaatgcagtagaaaaaatacaggcataaaaagctgataaattcaggaaatagattttccaataacttgacaataataaactgctattcgttgtgcccaagaaggatagctcaaacgatcaagcatgcagtttgcttccacaaagcctgagattcgagtccctcttgagtatccacatagcaattgctataatttcctggttcgcaaatattgtaaggttagacgggaatcctagcttcgaaaaaaagaaaaaaaaaactattcgttgtattattattaatgcacatatgttttatgtagacaaagactaaatacctttaaacgttcatcaaaaaaaaaaaaaaaaaacctttaaacgtgctgtagaaaagtagaaaagtagaaaagaaaattagaaagagaaaaatgaaaatatttgaggccataaacaaacctccttctaattgtttcttttgcacccgcttcacatgtcgaagattttcaaggggagcaatttggttcaaacgcctaagaaaagaagcagtttatatggaagcgtggatagagaaaagtaagaaagatggcaggaaagagttatagtaaattggggcaaaccttataagggcattggtgagcttaggctcaatggctgcagccaatacattcactgcaaaaacacagcagtacataatgtaaatacatatatgagcaaattaacttaacaaatgtaggatgtgagaagaagcagaagaaagttgtgataaatcaaaatcaccagtgggttgttgattgggtgaactttggggcttatctgggatgtggacaacgtcccacatctccatttccaggtggagttcgtttaattgtagagctctacctctgacaagtctaatctatagaacaccgaccccggataaccctggagaagaaaccactcctgagccagacctaatttctcaacctgtaaaactgatagtgctaaatcttgttaaaaatagttaatattagcacatagcccatacaatgacttgagggataaaagttagccaagtaagagggattgagcacgtacctcaaacatagatggaacatgttgagcaactttttttgagccttttgcaccagcttgctagcttgcaaagtctgcaacaagagacgtactcagaagactacagtacaaaagattcaaatgctggtttatgagaaacagggatcagtggaaagattcaattattgaggcctcacaaaagaatgtttgtatacttaatgagagacccagttaaaaaataaggatcacaaaaactgatacactagcaataatagaactctgaacagaataatacacatgctaatggagagaagcaaaatcccaaagaaaatagacagagagagaacgggagagaggattttatatcaagtttggcgaaagttccttctcaaatggaaattcatgagattttatgcctcctaattacagtctgaatgagaaataaagcaaaaaaataccatctttatctatcttattactaacaaaacacacagatagctaaaccaacgaatcacaaaataatgatttgaactatgtttacagcaatagaaaataaaaatatcaatgacacagataacaatgaacaatatcaagagaaaagtggaaaaaaagagttaaaagggaaataccggagacaaagaggttggtgctgcgctcagccttttcctgagcctgagcggcagcagggaacggatgaggaacgaaatgagaagttgaaatcgtcgagaagaattatgataggccacaaggttccgccaccaatcccaaatcgaagagagaatggaaacagggtgtccaaactccaattttagagaagaaaaaaaatgttgaacaaatggggcgatacgtctgtacctcactttgcaaaagtacaaaataatatgtaaaaaatttatgacaattttattgcactactacatagcatgcaaaatttgtataacaatattgcatgcaattgtgatacaataatgaagttatgaaatgaaagtgttagattctttgcttggaattgatatttggaggatttgtatctgtctgcaactcacttgtttatagtgaaagagaagatagaaatttcacagaaaaaacctgagctcaagatttaagtagctagtttgagcaagattcttcattggtatgtacaacatttttattatgaatgaataggatttaaccaatattcatcgagttttgccatctaaatttttccttttttgcaaaaattactcctaaattgctacaaatatctcatgttgttgcattttgcttatttccttaaacattttgttaatatagcactaatataatgttaatctagtatagttcaagagtctaaattaaagatagaaatatataaataacagtataatctaatgatgaattataaaaacatgtatgtgcattcttaaaattaatgatggtatgtttaatgtcaataaactgaatattgagtagcttaaagttgttaaataaattattgtactgcaattataccagtaacttatagtcagataagcaaattgtttttgaaaaaaatagctagaatgtaactgaagtagatatttgcaacgatttttctagtttggggggaatttttcgcaacaagaaaaaagtttaggggcaaaactctacaattgtcaaaatataaggggcgaaaaatcttatttattatttttcaaataatgttatgaatctttaatattgtttatcattgagacttttagtgtaattcccttacttcacttgtgtagtctcataattacacagtatactatacacgagtacgtcactttgaaaacttcttggaatgacgactagctctgcaaaccaaaatcagtctttccaacatgttttatcctcactcacatgcttcctaggaagtcacccatcctgagattgttctagatcaaacacacttaactttagagtttttaagtgatggtctaccaaaaagaatatcatcttctttgtcaaagaagatcatataacaattcctactttattttactacaaaccatttaattttgcaatcttaataatactgatcattccatacgaatatgagattaagaccacatagataaatttaggaattttttatatttacttaatacttaatgtattcatataacatctgacattgtttacatatatgttgttatttcaattcagttatttattacatttaaaatatcactacaaaaaaaaatatcctatcttgacggctaaaaatccacgagatagacttatctcggcggttatcaaccgccgaggatctgaccgtcaacatagagatgatgacctatctcagcggttcaaaatataactgccgagataggtatgccacatgctcacatatatgtgcaatgtcgacactagaaccaccgagatagggtagcaaaccgccgagattgctaccctatctcggcgattaagaatccacgagataggataatgaaaatggtttgtcaacattctaaagtttaaaaacccactcaatatacattctaatttttttttcaataaagtaatgacataaaaataataaaattgatcacatatgaacttattatgtgatgtaagattatgagtttttctaaccaatgcttatatgtttaatagcatgtatattcatgctccctcgtaaaacatgtaattaaggactcaaaattgttcccaatcattgacattattgaaaattgttaagaaatctcacatatgacagtcaaagattttcaccttatttttccacataagacttcacagttaccattgtacaagttcaaccctatctttgttcatcatataatcatgtaagaagaaagaaagttcatcaacaattccccttgctcctagtagtcacgaaatgtcttctgaaaattcttattcaatcccctgataaaaaaaaaagccaaaaaaattatgaaaccagcaaagtaactaagaaactcatgtctacaaaacattaagatgcatttgatttatgatagaacttgctatcaatttggtaaggacagtagcaaatatagcagaaaatagagctaagtgctactatattgatactaaaagataaaaggaagcaaacaatgaaccactggatattcaagagacccaatattctcccaaagccaaagacaagagctactgctcagtacaaattcattcaccactaagccaaaaccaaaaaatattataaaagaagtacgaatagattcaacctccactctatatatagtaccaatatcccattacaattaccctcgtatcctttttatttattatcctaaggcttatcaatttataatggtgaattgaatgaacccaagtcccctccccacaaacaaacacactcaaatacctggagctagcctcaactagcattttatatatgattataaccatatgaatttgagttttttctttcagtctttctctaaattcaaaccaatcaaagattgtgtatggtaattaacaaaacagaaatgaaaatgaatgagattcacacctaatatcaggtcccaaataaggaagcttgttaagtttccaatcacggtgaagtgaataaacatggcgaacttcaaaattatcaggccatgcggaatataagaactccaaatcatcagaacatgatgataacaaataagatgtacatgtaaaaactactagagaagactcaaatttacaagcaaaataaataggtaggaatcagataattaatgccataatggtataataggacaaattaaactatttttcttagataacaatcatactcatataatgcaaaaacaataaatttcaccataaaagtcaggtcactacatagaagcaacaaaaacatattatgagagctatgtaaagatgatattttagttcatctatagtgaggttgtttttacttgggactttctttccttacttaataagagggttcacttttccaagatgacattttcatttataaaattcacaaaagaaactagtctcttattgaactactaaatgtatatatatggatacatttatacatataacaaaacacgttatattagtatgacatatggatacatttatacttaataagagtgatcaaaatttctcccaacttatctgcaacaaacaagttatacatataacaaaataccaaaatacacaagcataaatgagtactaaaaagcctcatgaaaagaaagtataaattatagtcataaagttttaatctaaagtagtaataagcaagttctacatgccaatataataaagttattctatgcttaaactaaagcataatcaaatcccttttaattttgaattaatgctgataaaattaaattgatgcttaacaaataaaaatggaactaaaaaaaacacaaagcttgatcttggggacattgttaggcctccaataagtaaaagaatttcaaactcagggaaagactgcaattaagatctataacaatgcagtatgtttctttataagatctataactgcagtaaagaaaactaagcttagcaaatcatttcatactaatataaaatctcatattttaaacaaaattaatcattagtcttcagcttccataggaactaatcatattttcttaaccacgaaagtcttcatatgttaatttcttaaccagccataaacattaatggaaatgaaattacttaactccaaaaaaaacatgtaaccataaactagtcaaaacaaaatgcacttgaaaacatagactattttttttttaaaaaaaaaacaaactataacctatgtttgttgatgtgcaaggaggggcatgaggttatggccgggaatgggtcggaggacaagcggaggagctcttggacggtcagacgaccggatacataccggaggatgtgcgactgcgactgcggggaagggacgatcgaacgtgcagtgttgctggtctcgctggccgtctggaaggtctcgacgtgcgacggtgctgtgggttagaagatggacgtgcagattattaggtttttaggttctttcttttttggaaacttacaaaaatatgtaatttagagtaaattttacaaaaatactgtcacactaaattttttttcaaaaatactgtatttttataaaacactagtaaaatacaaaatagaataactcaaaacaatagtagaacaactaaaaaacaccagtaaaaacttaacacaatattatgaaacttataaaaaaacacagtaaaacaataaaaaataccacctgacagtatttttgtaaaaaaaatagcaaaatttagtatatcatgtaaatttcccttcttctttttagggttgggctgataatatatgttatgggtttcttttgggctattttcaaaaatatgggaaaaattattaaagttgtgataaatatggcataaaaagtaaatgccactaaa

SEQ ID NO: 17299 - DNA, 2850 bp, Cannabis sativa
ataatatgtatttattatgtttatcatcaataacattagaaactcgacgcattggagaaaatataataatgccatagtttttaatattttagaggtaccataaatttttaaggaaagttaaaaattatgtgattatgtggattattaggagaatgaccatatcactccttggattaaaatttattctttatttaagtgagggtattttttgtaattctcatttaattagattagatttatttaacttatcatatatgttaagatttatgtagaaaattagagaaggaattagaaaactctcttctcttaccctgacccataccaaagagaagagcaagttttcttatcaatatttcctcatcaatttcacaagaaaactaagtaatatgaagctagttctagtgaggaattgaagggagaaatcaaaggtacgttttatgattcctttttctcttaatttttaatatgatataagttaggttgtgatcattattgggttacgatgcttggttgttagtatttgatgttaagaagtgaatttcttagttggtactgttagaacgtagcttattaaagaggaattaaacttactgaagtagtttccttaaaggatttaatggtgtaatctaaattctgagtttaagaggtattttgagctgttagaattatttgggtgataataatatgttatgagaagtttgaactcatatgaaacatgtttggaagagttagaactcagaaaagagtttatacagaaatttgggctaccagttgttctggcaatgcccaaaaaatagagcacccaattgtaattttgtttcctggttggagatttttaggggtacctcgattttgtgtttttaggttatttagagtatctataggctttttatcgatagaaacttcagattatgaactataatcctagaaagtgttttagcgagacacttaccaatttaccactagtgtgacttaggacctctgatcattgaacaaatttttactcaggttgactgacacacctaaatcaaaaattgaggtaagaatagtatttagatgcacatatacacatatttagtatacatgaatgctatgttgccatgtagctagcatatttgagatagtggtataggtgtatatacagttgcactaagacattgatttctaatataataggcaatgttgaatagtatggattaatgctactaaaaccatatcaactagagtaataagcttagtatggctaatcatgctataggtacaaatgttcaaatctcactttatacgcattggatgtgattggtagacttatgttaattgagtgtatgagtgctcaattacaagtcagatatatgttgtgttatgttatgattttcgtactgagtctgttgactcacatgtatgcttctatgtataggtaaaggcaaagccaagactaaaccgcagtgagagtagagcttagtaacgatcgtacatatccaaacatctaaacctcaagggttgcaatcttcaagacaccattttttgaatatgtcgttagatgacatttttgatattgtataatttatgtatggtatacaaatagattttgagattcaaaattgtaaatattttgttaaagtgtttgatgtttattaaattttttattattacgaaaaaatttattacacatttttatgttcaaaccctttgactggaaaatactagcataataattaagaaaatatcgtaacgtgccttagctagtaagacattacaatttggtatcatgaggccaggtttgttctccatagaccgactagatatgtaaaatcatcatcaaagacaagctcaactcataattcagtatgcttttatatgctttagtagttttgaataagatagtacgagtataaacacaagataggaagcatgttagtagtaaaatagatgaatagtagttgattaagtttccatgttatgcagtatttgttgtgtgatttcgatcaccgtctgactgacttgacttatgaaatcaaaagccttgtcttatagaatggacactgacaagacactagaagttagggtgatctagttgtggctagaggtgatcgaggaggcaagaatccccttcttgctcccgaccaaggtacaggccatagtcgaggttgtggcagtaataatgctaatccaccacaaactttaccatattgagagtagagctttgtagaaaggtaagccaaatttcaaagacaagaggaggagatacaatgactcaggcagtaggctcctcctattttacctctttagaaggtgccacgagttcccatttgagtgttgccaattgaccaacccacaacttgtaaccaaatagaacaattatataaaaggttctgaaagcaaggacctccagtctctttgggggtcccaatgtgatgaaactcgagcagtggctgagaactatcaaccaaatcttgaactttattggggttaccgataatattgagttacttgtggtacttcttagttttaagaggatgcccttgtatggtaggagatggtatctttgagtcataatgtggcgactatgacttgggatgagttctaacgtttgttcaatgccaagatataatgaggcaacacgtaattctaagagaaagaagttcactcaattaactcaagagaagccaataccagtgatagagtatatgactaagtttgataggcttgtcaagttggccttggaaattgtgccaatagatttcagtaagaaagaaaaatacttagctggactcaacgccaaaattaagcatgacttgatgatcataagtgtaacgtccccacttcaagcctccattgggtccttacacc

SEQ ID NO: 17300 - DNA, 4130 bp, Cannabis sativa
taaatatataatactaatatatagagagtgaagtgttgaaaaagctgaacaattaaagttgttgagagaagggataaacaaaaaagtaatcaaggatggtagagtttcttgatagaaattggttgagaatctgtggtttgaattttagatggaattgcccttataatttctgatttttatgctcaatgaccatgtcaagagagaccaaaaaatttagaaaatgaacttacgagaagtgagacatggcttatctctttcattaccaaaatgccaatatgagcacaagtgtctagcttgtgaaaatattaatggtaaattgggatagaagaagaaaaggatctacttgctataaaattgttagattacaaagttaaatgaaataaaagatcttttagggtagaatataccatatgatgcaaagattggaaagaccaatcataccagcaagcctttaaaatttatatatattttcttttgaaaatgaaatatagtaagagcgaaattaccacaaccacacgattcagaggtagtttatagtatgcagcaagtggtcctgtctacagataaataaggagagattcaagttagaacttgcagacatttaatgtgcaaggtttgattcaatagaaaattatgtcactatctatagtggtgttgaaaatagaagaggctgaatgataaggtagtcgtgttctttgagcttgtggtatggaatattatcaatgatcaagataatctttagaactttacctgccaaactctttttctgggcaggagtagatgagtttgactatatacttgtaagaaattactaaaactaataagaacacacaacacaaagaaaagaaaaactagtgattaaccatgttataaatgttaactaactgtgtaattttgatatgatgatcagattagatcattggtatgtttttattggcaatgatcacaaaacagaacacattcactcattatttatttatgctcaacctcaacttattctgttctgtaatggattcttcaccacctcaagtatgcatatacatatacatattcagctccctatctctttctttgttctagttgcaattataatacataaagaatttgataaaaacaaaacaaaacacaattgaataagagattagagatatatgttatgttaaatgtatcagtacaagtggcagactcccacgaaataattgtgttgtttcttaatttcatcaaaactttttttatttttatttcaattaaaaaagactcagctggtatgttgggtcattttccttttaactatttttagattgaaattccactacaaccactatagtgtgtgtgtatatatatatatatatatatgttggattaacaagaatgaataacacatgtgatgagctttcttaatttcctctgttttcacatctcagctaacttttttaatgacatatagtacagctacaagaatagtcaactaatccaccctctcctctactctaccctttaatataatcatctgcataattcatttctaattaagaaaaacaccacattatgtcactgtaatttgtatataccaaaaaatttcataatttcaaaaaagcttgtcctaaatatatttacaacatttccctttaaagcattttcttttggtctactaacaatatctccatttactggtttcaactattgtaactcagtcccatgttcttcggtcttcatcaaacactgtattatacacatatttagaacaagaagccccaatgcttgtaatgtatgacaaaatctaaatctatatcaatgggagaaaaataagaagaaagagtaagtaatctgtcaagattttggtggggattataatataaagcaaaagatactttggaatgaagtgttgattgtcatgtagataatttggtgtgaagtgttgattatcatgtagataatttggtttggttggagataagcaatagattttttcaagatgttgggagtcctttcaaatcactgtaggaacagatcacgtcctaggttgctgtgtcgcttaaaaaagtatgaatgtcacttctctttctctctttctgatctcccaagagaatgggtaactaatgtggggtttgagtttgtattatgaatatcttatataaagaatgaacagataatgtttttatatagacaccaattcaaaggccatataactacttgatattcaaaaatttataccatctatagattgaataaaaagctgtgaactagaaaaaatagtagttaagaagaataaggctcgattacatacagattcaccaattagattcatataggtttgaggctttgcaaggaaaagaggagtgtcaccaacaaaacctaacaaaaaaagcaaacacctatcaaacataaaactaatacaaaaaagtataatgaataagtgaatagaaacataccctgtccaaaaatagctttacaatgaactgtgttcatttcaatgccttgtgattgagcaaaagtatcaatcatctcaaaccccacctgttttcaaaaccaaaacacacacaaaattcaagtaaaaacaacaccatctcaaattttatttttattttggttgaaaaaatgaatttgagaagcataattagttcattacattatgtctagttcctttgtatttatcacctgggtttcccaaacccacaaaaagccatggtcttggaccaccaacagtgcaaaaagaccgcctacttaatctgctaagcatcttctctccaccaccaatgtcctcctcctactacactcactaatcttcagtaaacccaaatcagagaaaactttttctttgtaatcaagatacatatagataaaggtagagtctttgagaaaataattacaacaaaaaggagagaataatattaatgctgccttgctggagctcaagctagatgatgatgatgatgatgatgatgatgatgatgataaaggagtttaggttggtgttctgtgaccccaaaatttagggatcaatgattgtaaacaagtgattaattaattctaataatgtgaatcacttcattctctatctcagattaaaaataacagtcaaaaacatacataaagaatcatctcattctcagtctcgtattaaaataatgattcaggtgaagtgaattcttcccattacatcactgaaattgttctcaaaatcgaaataaaaatacctgaactggaacagaacagaggaagagctctccggtgaccggaagagaagcagctctgtaggtctgggtggtcggtcgtcgtggagaagtggccggagagagacaaagaagagagaggaagaaggttaaaaatggttttcagttttaaaaacagaatagaaaacatgttgttttctattttcaaattttttttttttctaacatactttttttatattttttctcatatatttggattaagacctagtctcgacccgaggacttgggggcttgaaaccccaatcaagactcaaactcgggacacaaactcagacttggacctggaacacaaactcgggctcgacctcaggaccgggacccgagacacagacccaacctcgggaccaagacccggacacagactgaccccaacctcaagacttggacccaagacacaaacccggtcgggactctggacacagacttggtcccaacctcaggatcgaaacacatactcaaacctaggatttgaactcgaacccaatcccaaacctaggacacggacatggttccggacctaggacctatgactcggacaatcaaacagccttataatttggcattacacttttagttgaattttaatttcagttcaatttttctccagacgtcatatttttacaagaaatataataagcgatttggtagctagttggcatgaaatgtgaatgaactcattttgaagagtttattaaactatttattctttatggaagcaacacaaaaacgcattaagcattcgagcaagttgagccattgagcatcccaaagcatataataaaaaattgccaacaatgccaaattttggtaaccttctcatttatagatacaaatcttacatgccacatcaaccaaaatgagcaacaaacaactattttgacactcctatttttt

SEQ ID NO: 17301 - DNA, 4486 bp, Cannabis sativa
aaaatgaaatacaacattgtgtaaaaatgtgtaatttgattatgcttgtaatattagtctaatgctaaaggatgccaagtgtgcttagtatcactaatctgtcctatcgttatattatatttaaatattgagttctacacattttaatttaataactatagctgactcaaacattgggcaatttggttattgcacaagacctatttttttttttttttatcattcttttataataaatagtttctttatatgtatatataataaatattcataacaacaaataataaaatttgtagtcgaatacttatttgttaatagaagacccaattttattttttggctgcctaagattcccaaaccacttgggccaaacttattaataaatattataaaaaactgttaattattgacacgaagttatctcatattggtatcgagcacaatagtgctatttcaaattgagtaatgattgaaggtcgtgttagagcctgtaaatctcatctcaagtaaaagtgattggttgaaacaaattactacatataattggtgcacatatcattactcaattcaatatgaagataaataatacatatttagttaaatcttgaaccaagatgaattgagtataatttcagcaccgtagaaattaatcctccaaaacaataacaaacataattaactattggttaagttagttggaattgagctatttagctcttttagcttcagtcataacagtttgttatttgcatgagctatagttataagtactaattattaaatagctcttgtcccatttcatttcagatgtaacttgtactataaatgttagagagagtgagagagagttcaagttctttgtgactaagaactcgaagtgtgtactcagggttgagaagatggtataagtacaaagagcactttagatctctgccattgtagtttgtacaagttcaacattttcatattgaattagtgatgatggctcttagttggagtatggtcagaaattagttcgatctctaggactagaacgggataaatttgtgtttgatttgggtaagtgttggatgaatttggttgttgtgtatgaatttcgggatccgattattgtccatccttatatacccatagtctttctcatttctaaccaatgtgaaattttagttacacactcaacaagcacaatgacaactaaaatgttacttattaatattattatattattcttcacttttataagagataaaactcttaacaattttcgtactaatgcatacaaccagagttatttacacgatgaaagttgtatcttataaacctcacaatctaacaaaacaaagaatttattaacatcaagtacagtagaaacagcagtagtcttattagccataaccaaaactagcaaagcaaaatttgaaacaaacccatccatatatataaaatatgatatgatatgaggtttttttgttttgtttccttactagttctaaaaatttacacaaaaccacactgactgacttctctttcgactttcaacttgaaaaagaggtaaaaaaaaattgaaacaatagaaaacaacccaagcaagcaagcatttatagcaacataataataaaaatttaccaagaatgaacaataaacataagagagaaccaaccaaccaatcaactaggctgccctttggcctctcaacgtcgtcgttttggacatagcttccttgagataatcatatctgcttctgtgataatcaatccaaacacagagttgtcttatggcttctctcttctcttctcccaaacccataattcctttgtttttctcttccatcattttctctaactctcccactttactaaccaaattctccttttctctttctccctttatctttattacctctaatttctccaccttgtttgataactccaactcttgtcgtttcgactcttgaagttgcccactaaggtaattcacttccttcttcagcttctccttttcttcgtttgtttctctgatccaattctttgttaaatcaacgtcgtacgacactactgagattgattcaagatgggttttgtattcctcttcgaatttatgtatcactgtttggagtccaatcatggtgttgtttgctttctcggatatttctttgatcattgtttgatgagctgttatggctttggacaatgtagatactctttcttcaaggtctttcttctcttcaagatatttcttttctgcatttctgaaactctcttctttttcagttaataactgttctgtgattctgagtttttggtttgagagacgtagtttgacttcgatgtttctaatgttatcttgtaaagtacgatgttcatcttctttaacttccaattctcctctcaagtcttcaatcatcatttccatatcaactactctttcatctttggattcgaatttttgactgaactcttccgccattgtttcaatcttcctttctgcaacttcaagttttgctttgcaatcatgaaaccaaccatggacttgagtgtgttcctcctctaacttgttatgtgattcttctctttctttcagcatcctctggtgttccgcgattgagctcgataattcgagcttgtgattctccatttcggttaatctttctgaaagctcttgcttgtgagcttggatagaatccaactccttttgcagatcactaatttgggctgtcaaggctgttatctgagctgaagcttcattctctttctctaccaaagttgtctccaattccgaaactctgtcctttagtcccacgagttgttctctcaactcaccattctcatggattttgcttcttacttgctcctcaatttcatcattctgtttctgaactgattcaatcttcacctccaaattctgactttcagcaattaaaccttctttctcttccaaaattctctgctgatccagactcttgcttgtgatctcttctttcaaattttgtatctgtatcaaaaactctgatatctcctgagtcttgctttcgagttccgatgccaaatcgcttttctgtctgtggagggactccagttctttctgcaatgaattcacctgatccaataatccagtgacttgaattgatgcttcatcacctttacataggatctgctgttccagttcaactttatgagcacgcaaagaatccatatctgttagcagattattgatctgtgttgttaaatctgctgttctagacgttgattcattgttgttgtcctcaagtttcttcgtgagagttaaaagctcatcttctctctctttcgacatcgactccagtttcgaaatttgagattgcagctccatatttccatctcttagttgagttgcttcagcttccttactctctatcttcacttccaaatctctgttttcacctctcacagtttccagctccagttccaagcgtgtcacctgagcctccaattctttaatttgagctgatttttcatttccgtacaactcgtgcttctcagagagacttgaatactccctttccttttcacccaatttctcttccaattgattcttttcaactgacagtacttcaattctctcctgtgcctgttggatttcatttgaaatttctgaaatttggacctgctgcttctcattgtcctctcttagttgctttgcttcagtttctttactctctatctgcatatcagcatcgcttttctgacttttcacggattcgagctcaataactagacctgccacctgtgcctccaactccttaattctgttcaaagtctcatttcgatgagtgtcgtgagtctctgacagagttaaatattccctctgtttcacaccacattcctccttcagctgacttgattctgccactacttctttaactttttcctgggcctgttgaatttcatttgaaagtcctgaaatctgagcttgtaatgctacattttcttctctcagttttgttgcatcagtctctttattctgcagctccagttccaggcctgtcacttgtgcctctagttccttaattcgagccaatgtttcattccgatgcgtgtcatgagtctctgaaagagttgagtattccctttccttcacaccacattcctccttcagctgactagattctgcctctagttcttttatgttgtcctgagcttgttggatctcacttgaaagtgctgaaatttgggcttgtagcactacattttcctctctcagttgtgttgcatcagtttctttactctgcagctctagttccaggcctgagacttttgcctctagttcctgtatacgagttgatgtttcattccgatgtgtctcatgcgtctcagagagagttgaatgttccctttccttcacactaaatacctctttcaactgactacattccgccaatagctcttttattgtgtcctgagcctgctgaacctcaattgaaagacctgagatttgggcttggagtcct

SEQ ID NO: 17302 - DNA, 4118 bp, Cannabis sativa
  modified_base (3760)..(3761): a, c, t, g, unknown or other
catatatatcaaaacatatcttcattttcccatatttttgtaaatagcccttataaaaatactaatttttatatttatttaggttcaatatgtgaaggctcagtatgaagcccactaattattgtattgttgaaacttgattttttttcatatttattttcaagtcttattgtatttttgaccagtgttgctcaagttttgttgtatttgtgatagtttaattatttagtgatagtctaaaccgcaagaatcgcaccgcactgcaccattttttgcggtgcaatttctgtgattttttagtttcgcggtgcgagtgcaatttgagaaattaaaaaaacgcatgtgtgggttgattcaaaaaaatagtcaaaacccgcaccacccgcacgcaaacaaccctactattaactgtcaaataagataaatgtcatatacaaaatatacatatgtcatattattactcgtttgcatgattttaattattacaattttaaataaattattctaaaatagaaaaattaattaaaagtattttttttcttttttttttttttaattttttctcatttttttatagtttctcttaggggtatacgttggtcggtttggtcaatttataccacattttattcagcccaatgtaaagattgggttaaaaaatctaagtacaacctgtctaattaagaaaaaagaaaatagtaacccgtccaatgttacggttgaaagtattagcagtaatcattttttaaataagttttcgaatgtcacttatcgtcgaaaggttttggcggggggtccgtggcttcttgaaaatctgttacttgttcttgaggcacctactagggtaggaaattatactaatgtgactttttaaatagttaaattttgaatccaatttcatctcatcttaattttctgtatgagtgaagacatgggtagtgccattaggcgacttattgaactagttactaagatagaggttaattcaacgggagactgcttggcattttatttgagttcgggctggagtaagcatcactaaatcactcctcaaatttcttaaaaatagtttgattagtggtaaagaaaagtctcccattcctcttaagtatgaacgactttcaaatctacatttttgttgtggtatcattggccattctattagagaatgtctttttagtggctagtgtttacctaaaaactgactctaatgatgtggacatcaatatttgacacgtggcaagaagaaaaacattcatggagttaagtgtcctgagtcatagtagtcaactctaggaaggggtccctagctctacgctaaggttggcttcgagaactctaaaatggatatttggatcctgctaaattgttttcaagtcaccatcattcagttttatgaacccttaagtcaaaaatactccaattccaaagcctgggaactaaaatacgttgattcgacatcatagaagtcaacccaggcgcctaggttttcactctatgcccaagttgacatcccaatctaaggttttagttttcaggtccatcttagtgcagattgctcaaaaattttacttatacatgaataagacatgtaacaagtagtatgctagaggcaccagaatcaaaatcagaacacttcccatttgagacacctggcacccagagcccaggttaacctagtgatgcacccaccgctaggtttattgtcaacctagggcatttcatataacgtttctgaagatgtttcttaagcattttctttgtcttcacccaaaattaggaaaaaagtacttttgggaaataaacgaatcaacttggaggccaaacaagtgacctactgcccaggttgacactaagcctggtcaccagcgcgtaggttgaaattttttcaacctgggccatttccaatagcaactctggcaaagtcttttggacatattcttcaggaaacaaatgaagctatctactagcgtaaaagaggacccaactattaattttatggtactaaatcaggtacgcagcgaatgagttttgtattatttgattattattgtaccataacccaatggatctccatatgtgtatactgctaacgcaaagttttgttaatcaaatatgagcctaacagtgataatatcacaaaaaaaaaataaaaacagtaaaggaaaaagtatagacataaaggattttttacgtagttttgcagttaaaactctgcattgtccacgagtcaatcttattagatttttgatagtttttcagggcctttttcctcttatgatttttttgtccccttttttaatctaacttgcctctatttataagtacatagtaggcagttattacatagttgaccataatctttacaacgtttatcccctgaaattgtggggtttgattacatatcacgtagtataaatgcggttaatatttgaaaatcacatagctgtgagttatccgcttttattgagtcaaaatgatcgtgtatttaaacacgttttaaatcacaatattctaagatgtctcgacaggaactcaacatcattgatagcgagctggaatgtttcccctatcttttcgagatttatgatgtacgccttgttgtttctttgcttgaaggcataacactttattttgacaatcacagttctttatgaaaaaaatagtacttcagcagccatcattctaatgtcagcttctaactcgtcaaaactataagtttcactgaatgatgtctaaagttgattggtgaaagtaacaggagtgctccttcctatagcgagataggcgcctcacttattaggtcttgagtccacccaactgatatacttagtttgtatattatacgctaagtgtcttcacaatcgatatgcatcgctttcatcttccaaggtgtaatgaagttgatgtctcgctttatgcatccaatgacgtatggtttctcattaatacacaaggcaacattttgtatatttttatctcgcataagaccttatagtcagcgagttgcaagtataatctattacttacgcaattaatgagttattccattaaaagtgatttcatcgatccatatttcccttaacttgacacgtgtcctctattgaattggcaacataattttgggtataacaattgccccttaaaaagttctttattaataaaaagtgttttttgataattacagagggcattttcttcataatcccttctatggaaaaatgcatcctttgattttggcggttgtactgtttcgaaggtcattatgaaccgtcttttcatcttttgcctcacttccaaccgttagattttccaacctttggcctttccatttattggcttctgagtataaaatggtggcttaggcttgccatgttccatacgctcctagttttcgatgagtttcatcttgaaattggattgttattcttttgctaagatgtcccatccgagttcagaaacttatccctccaaattcgtagcaccagaatgcactaaccacttttcctctccgtacgttcccaaggatttcaaacctcaatttaaattggaaacgaaggattccaaggctgaggagcttccgatcaatccaaaccatggagatgtcgttgatcgttacgggtgatcctcacaagagattttcgagggtaagtatcatccctcgtgaatggtgcatccctcgtgaatggtggtttgaacgagattatatatatttgtttttttttttttttgttgctccattgatcttttatctctgtcnnacaggaatggacatagattttgagagcaagtttagaggtcctccttaggctgacaaggaatccaggaagaaggtagtcccaattggcgtggtcatggattctactaaagaacccaaccagcccaagacccaagcttgcacaagaagacctttgggccagccagtctctggtgttgaaaaatttcctaaggctgggaatgaggtctcgactgtaggaaatggaatcttctgatgcaaaaaatgaggtctatgcagatgtcgagaccttttacgtgtagacagtctttctcgggctacgtgtaaacggtctttctcgagatatgtgtagacgatctttctcgagctatgtgtagacggt

SEQ ID NO: 17303 - DNA, 8267 bp, Cannabis sativa
attatctatgttcttttattttcttgaccgatcttatatttctagcatatgttgccttcggtttgctaaaatcgtcttgcttccgtcaatgattcattaattgaattacgcaagcaagtgctctctcgatttgtttttgttatgtagattgctgattactgtttattgatattagcctttgctcaggtgctgagtacctattgcagatagtgcgtagtgctgttcctcaactattttgcgactctaattcttctgttccagcagctgacatagcagttcatatccttgattatctttacaagaaactggatgaagtgtgtcttgtgcaaggtggcgaggttgtgactagtttcatggcacggcattatgcttttagctatgttctcttaattaagcaatcaaagttaataatttttaacaatttcaggaggaaagatatcagatgctactttacatgtttattggtagtctgttgccttatattgaaggtcttgattcatggctttttgaaggaacacttgatgatccttatgaagaggtaattgtattaaaactttttttttgtcctaaagttataacaatgtcattttgttttgggcatttgaaggtaaatttctctcataatgtagcacaaaaaagaagtatataaatgagtaattcttttttgagtcctgtgagtgtgtgtttggttatattgattacacattttttttattagatgaatgctttctgccttgtaatatatctgtacaatgtaaagattttatttcatctgtgtggacagggtatagttggagatgttctctgttttaagaattttgttttataattatatactccctatactttggtgatcttgttttcttctagcagatgttcttctttgctaatagaaccacatctgttgatgaggctgacttctgggaaaggagctatctatttaggcaaacacagtgtccagagttagattctaatatgactactttaatttcttcctgtggccttggtactatggttaatgaaaagaaggaagttggccaaagggaacccatctctatttatatttctaaagggaaggaccggaacaatgcggaccttctagcatgccctttgtttatcaaggacatagctagggaaattgtttctgctggaaagtcattgcagctgattcggcatatcccaatagcatccccagtagtagctggcagaggatatgagtatgatgttcatgccagttttagcaatttaaaagatgattgttgtcacagtcaaagcattgctggtttaacattgtcagaagttttttgtgtgtcattatcgggtcttataggtcatggtgatcacatcttccggtatctttgtcaagatgactggcataagaacaatattattcggtcacttggatattctatgaacaaagaaaaaattggaggcgatgaacataaacttttgcctgaggcttgctctgaaaaaatttggtataaatatttggttgatacactatctgagaagaaactgagtaatgttgaaactaatgtagctatcacaagtggagagaaaatggctgaatttgatgcaaataaatcacatcttttgagagccttctctcctgaaaatcctgttattactgtgtgccaagaaatcctttctaggaataaggagtcctggacagtgttaaatttatccagagatttctatctgccccctctaaatgatgatgtcttacgaaaggcgatatttagtgagagtgacacattttctgcagtggaaaaaacagactatatttttggtttccagtttggtgaatctgagtatcttcgtacacaggatgactctaagatgttggaaacgttgtttccttttcctactgttcttccttcctctaaggtaccactttttttttttgtagatttcctttgtggattttcataattgtttttattgtttcttggaaacaggatagttctcgtatgtcagagctcttacctttccagaaaaatagcaccctaccatcaacagttcttagctgggttcagaatttcaggcctaaaaataatgtacttcctgtggttattatgcaagagtgctttactgtgtatatcaagaagcaggtaaaactggcacactgagccagacttggtgcctttttgggtttgttattcatggatttaaaattcacatgttgtacttgtaggtggactgtattggccaacatatattgtcaaaattaatgaatgattggaggttaatggaggagctagctgttttgcgtgccatttttttgttaggatcaggtatctcttaaattgaaattctctttttctttgtctcctaatagacattgactcgttcctttatctctgtaggtgatctgttacagcactttttgactgtgattttcaataagctggataaaggagaaacatgggatgatgattttgagttgaactctattttacaggtgcagtgacatatttctaacaattattgtgtgctgttagaagtaggtttaatggaagagttatttacagaagtgcaagaatgtttctgataattgttatgacattgcttttgtttatttatacatattatttttatttttaaatttcaccattgttataatattttgttattatgtatattatacagctatgtttgaaaggaaatagagtaaggactgttgatgttaaactactgaccctaagggaatacatgtgtactgtgtcatcttagagaatcactgtctaaaattttcatataatataattttagggactagtaaataacttgggatgaaggtgttcactattgtatgtcactatgttaattgaattagatcatgtgacagtgcttgtagtttttttttcttactctggcagatcttatatgttctggctgtttttccatttctttcactccttttagtgacaataactgtacttagtactgcaggaatccataagaaactcttctgatagtgtgctactaagtgctccggattcattaattgtgtccctgaccaaacatcaggatgtatatggcgatcagcaatctagttcccttccatcaactcctcacaaaaggcgtgcacacacctttggaatcgatggccttgattcagttaactttacatataaggtctactctattgattgttatgctctttcttgtaatccattcatgtttattaaatcagtatgtatttacattgcaacaggtgtcgtggccgcttgaactcattgcaaataccgaggcaataaagaagtataaccaggtattgtttccaaatttatttttagtacctatttttatgatcgaattctgttccagtcaataatgttttaaatacaatgtaggtgatggggttcttgttgaaggtcaagagaacaaaatttctactcgataaagctcggaactggatgtggaaggtttatttctacttgcctgttttcttgttcacactgtattatcaaggtgtattagcatggattttgtagttcttttatgacattagtatatcaactactattagaatgtaaggaataattgtgcttgggtttttccttcactaaatatcagctgtctgatgtcatttggctttttcattgatgtttttctccttatatgcagtgtaaaggtgctccaacgaatcaccataagcatcactggttggtggagcaaaaacttctccattttgtggatgcttttcaccaatatgtgatggacagagtaagcttttgtgaaattaacttgaaacttggacttttttagttgcaatctatggcctgtaggagtgtacaagatcgtcgtattttttctctttcgggctcgtcccacatttatgcttgtcgttttgttcacactatggcatgtaatgtatgttctagctttttgaacttttaaacttgtagttaaaaaaggaaaggttccagcttacctcttactattttctccaataactgttgtttgtcaaacttctactgatgtacctgtttgggtgcattatattttgagtatgtttgataaaaggttaaaatgttaaatttttaataggatgtagtaatcaggtatatcacagtgcatggcaagaactctgtgaagatatggcagctgctcgttctctggatgaagcgatagaagtacatgaatcctacttattgtcaattcggcgccagtgctttttagtcccagataagctggtgggtagcttagatactctctctctaaatgcctggatcttgtattgagtctaattttcatattttattgtttttcttttgcactcagtgggctctcattgcgagtagaatcaacatcattcttggattagcgttaaatttctattccacacagcagacactgagtggtggaccagtttctgcaattaaggccaaatgtgaaatggaagttgatcgtattgagaaacaattcgatgattgcattgctttcctcctaagagtaaccttctttcgttttccttgttacgcctctacaggtttttactttgcaaaatagaaaataaaagaatgtgcttctcacatgtggtgttaatgcaggtcctttctttcaagctgaacgtgggtaactttccccatttgacagatttggttactagaatcaactataatcacttctacatgtccgatagcggtaacttgatgaatgccccaaactctgaaaatgctgcaagaggaagaaagtcatttgttggcagaacagagtgatttggttagtattcatattagtgtcttattcaaattaatgtgaagaaagatctcatgagcctgagcttgagcgaaacagtttgctcaactccgatttgtaagctttaaaaaagaaaagctcaagtaaataatcagtgttattgattttcaataatgaaaatgaattgttgttacacactgataaatagatcagccttttacatactacacaagagactaagaattagttatagaaataggttggttagttacagatgataacttgcaactaacactaacaaaatgctaaagatcctataactaactctaagataggggaaccgtgtgcttgaaatggccgttgtaggactatctgcgagttggtcgatagcaagaacatgtttcacttgcagctgagcttgtagaaccttgttcctaccaaaataaaggtcaatataaatgtgtttggttctaggatggagaataggatttgttgcaagcatagtgcttagattatcgcaccagatggttggagttgtgtgcaaaggaaagttagacagtagtggttggagccaagtgatctcagtcacaacatcagctagattgtgaaattcagcttcaattgaggattttgagattgttgcttcttagacctccaagccacaaaagatttgatccttggaagacactatagccattggtggatcttcggtcatcagggtctgaaatccaatcagcatcacaaaatgcttcaatgtcaaagtgagaagacatggatgaaagccatagtcaagggaaccaaccatatatcgtaagattctcttaacaacaacctagtgagacttaagggtgcttccatagattgagataccttgttaacacaaaatgctatatcaggccgagtgatggtagcatattggagagctctcacaactcacctgtacaaagagggatctagaataggattgctcccataatgtgacagctttagaccagtagtcactctgttggacttgcaccttgcatttttgttttgtataaaagatcttgtaagtattttgtgtgagatggatgcacaccatcaatagtgtggagaaccgaaataccaaggaaatagctacgttccccaagatcttttaaggcaagaacaataatattatcaagaacaataatattatcaacttacactaacatagaggcaacatgggtagaagtaatgtcaatgaagagtgaagtattagttttggcataatttaactcaaacgtgactaagatcatctccaatgcaaaatataaaatttgtgctaaatttggcacaaaatttgagtttgtattatatttagcctactatttataatcgtactccaatgtaaaaatgtaaaaaaaaaaaacataattatattgatcatcatattgtattgaaaatatacaaacattattattttttacttttttattgcttaaataatggtaatatagtaaataaagaagataaagttatgtaaaagtctatgaatcataataattagtggcactacagtaaataaaaaaaaggtagaatttattgtaggttaaatttggcacaatataatattttgtggcaattctagatagtatatatgacattgtgtattgggattacctaatattattggaaggaattagaatgtatttcttgtgtatctcaaagaaaaggttcaaaatataattcaacgttaggatggcaaattgtaatcgcgagtgggaaaagagatttggctgaaattcgttgctcaatcattgcctaattatgctattagtgttttgttattgcccttggagatgggtaaggacacgaagagaatggtacaaattttggtggcaatcatccccgaagaaagaaaaaaagtatccattggataagttatgaaagaatgtttgagccccaattttgattctctacatatccttacattatttcaacaaaaaccccaaaaccaaaatgtaatctaattgagttttgaattgcttgcacatctacaagacaatcccattccaaaacaagaccattgattttgttttatccaactaaatgttgaagctagtacttacttaatgcatgttattgttttgcaaaataacaatctaaatgaagacttatatctattctataacaatgtcatatatattgtctagaaaactttgaattccacctcatcatcaaaaacttcagtaatatctatagtttatctccaactccaatcacttcatgatccctgcctattacttaatctgagtgtaaactgtatactatgtgctcagagtttttttctgttgcactcattggtgaacaaattaccaacttccaatccagtatatgcagctaagcacaagtacaattgcctgaaaaaagaaataccataggtattctttatttctttgtgaagttcaggtaggaaaatgatttttctatgagtgtctctagaaaccttaaaggtgttctagtgatcataagttgattcaagtagtagaagccagttagtagatgcttaaatgattcccaaccataagtcattgggctgatctcttgactagattcacccttttggtatgagactgtgtgagtaggccacgagtacaatatacaaacactatataaaacaaattgagatataatattagaaagagcattattattaggtgtcataaggtgttcaatactatactgatgtgatgtgttataagtggttagtagttttttatattatttattaaattaaaatatatgagacccgatattaagttcactaataacaatatgtcacttcttgtgatgtttggcaccttaagatatcctaaatatttcttttcttaattaataatgctcatacaatatgtaaatgatgtccctgccaaaaaaatctctatttatttttttatatatatatcaattacttgcaaatttccacatattaacaaataattaaaccatcattcaaaataatgaagaaaacaaaaaagttaaaacgttttcttctatatttaggaggttagaggctagaatattacaatctctaaatactataaattttcataccattaaaagtattattcttatatgcataaaataaagtttataaaataagtttggagaattgcactcatttgggatctttactttttagtagctatattggctatcatttcaattataaaactacgaaaatattttcatatatttgatatcggcgattcagcggagtattaaataaactaacattattttaatgagaaatgctaaagaatatttatagtgcctaatatttttatgaggtgtaaattcactgttagtgtaatctaatattgaatcgcaaaaagccactaaggctagcttagtggtgagggagggatggaaaaaagggaaatgtgatgggttcgaactgaagacctttaagctattaagctaatatatgatgaggagtgctaagagcatctccaatggtaatattttagagaatgcttgatgaggtggaaagcttatgtggcaaaatatagagatgatataccactggagataaaagaatg

SEQ ID NO: 17304 - DNA, 4926 bp, Cannabis sativa
  modified_base (46)..(60): a, c, t, g, unknown or other
attacaggttaaagaaaaatgtaaccatatagttacaataaaaatnnnnnnnnnnnnnnntcacccatatatatatatttatatcatataatagaacaaactttatagtagttttgtaccatcggttggatggattagcattcgattaattaactcatgtatttaagaaaaatatgtactcacgatatatattgaatataatatattaggctagtgtggaaattatatatgaataatttagttgcaacatgtacaaaatgtgtgcatcatgatatatctgttttccaaattaagacctcaatttatattaatatacatatgtatatataaatgttttttaatgtatatacaagacgagtacaaattctccaagcatcaaaagctttgtttaataatcaattgacccttattagatgccaacacatagtttaagcttgacaagtaattcttaatccatttcattcaaagcagaatactaagctctcagtaatgattgggtggggagttttggccaccacaaaaatcatcgcaaatattcggtctctctaaaaaacaattgcatgcatatataagagtgcaatgtttgtctttattatgtaatgtcactatatttgaattaccaacttatttaattagctttccacaggtttgggtataagtttctctcagctaattaaactattatagctggtgtttggtatgaaatttaaacttgatagaaatgagaatgtaaaacttaaattaaatttgaataataaaatagatttgtattttcaagtatgtctcactttttaaattaattaaaatagtggtaatattaatccatcaaataagtttcatattccctctaaccctactctctccaacttagactcacataaaaaaaataccccattaggtggcgtttagttaaaaggaataaaaacatagctagaataagaatgatattctaatattttaaaataaaactaaacgaaagaatagaataaaatttattttctttctatttcatttcctccaatcaaatgccactgtataatttttgtagggagagttcttaagttaggagtattattgcacctatcctgtgagtccaagaatagaagcaaaccattaattatggagccaccaaagtacaaaacaaaccacctaaagagggacaaatataactttgttaaggaaaaaaaataaagattatgaaaaattcgccattattatttctttataaataaaaaatgactctcatcactatacacatacgcctccgtcccttcaccctacctatatctcatatactataaaggaatcacaaatgaatttatgttagaacccgttcatatccaccttgttgggtcgctatcttaccttgattttcacgttagtatgatattgtttgctttaggcctaagccttgacgattttatttttgagcaccttctgaaaaggcctcatatactaattatcaagtaggtagaactcttatattcaagtaaactcttgtgtattcttacaatatgggactttggttggtaccccaataatcctccctaaaaccaaggatcacgtactcgtggcattctctccagcaaaatcatcttgtacggctgctatcactaacagaactcgccgcctgacgttcaacattgtcaggaagaccttcgacacaagggactgtatatagatctctatcttgtaccgctgtaatctaacgggacacactgtgtgaccaccataatatcaaatagactttcgatacaaggcacaattcttcaatcgtgaggtcataacattgagagcttctctcatgcatcgcaaatgcatcccactattccagcgcgcgctcccgaatatttggctctgataccacttattggaatccattctttcaccttgttgagttgctatacctcaccttaactctcatattagtataatattatctgctttgaacttaaattctcacagttttttttataagtaccttccaaaaaaaccttacactaataaagtaagtgaaacccttatatttcaggcaactctttcacctctattcttccaatatagaacattgatgataccccaacaaatttaaagagtgagttgcatgtataaaatatttgcatgaatttaaccgacttaaattctatatttttatgtaaattatttaaaaaatttaaaaaatgaataagataactgttaagaccatcagacaccatctatatttatttttttacactttcttaaatctttatatacctaagatacttctcatttctaacaatataaaattttagttgtacatccaacaataattactataatatacgttatataaaaaaaatgatacaatttaactactgaaatagaaaatatccatatagcaagagcaaaagtgatatgtcttatatgtataatattcctaattgttattattagatgggataaagtatacttaattaaaatgcaaagtatgaaacaaaacaaaaaacaattgcttaatgaataaattatctataatatgggtatctaaagcacatggtaacattattattattaattccttacttccatgctatacaccttcgttttttgtgttgtcttatatagtgaaaagaaaaaaaaaataattaaaaataatcaaagacaccatccagtccccatggtttggcagagaattttcttcattgtgaaattccaaaacatgctaatgttttgctttggccaatatgtcctttagtccttgtatctaaaagtttaggaatccacctcaaaattctacatgggattattaaaatgaactctcttaacttacttgattctccttatatgcttcccttggattcttcttattatactcttcttcagttgttgcatgtgttttgatgaaaaagctagcctagaagtaagataaataatcgaagtatataattattacctattattagtaatatacatatctttattatacatatataggttttgtttctatataataatatttctgaggattgttacatgtacatatgcatatatataggctatgtgtgttatataaaatatatatagcctgtatatatatatcttttttcctaaagtagctaactagggttttaccaatatgtttgtccatccatatattgatcaagcggggcccagctaaccgatatagaacgttttgaaatctcacaaactaattttaaggataagtactgttcatattactattagtactatagtttttaattgatgatgaataatataaaaatttaaagagacagttttagtcccatttcacatgcaactaactttaaggataagtactgttcatattattaggactacagttttttttttaatataagaattagtactagctatatatagtttgtgatgaataataatgttgtggatcatattcgaaatgatatattctttttggaaaatatattcctttgttaaataataaattgtggtaataaaaaagaaagataattaatgtattataatttgttgacgatttatgtaagggttacaatatatattgatcgatatgtacgcttatcaattgagaaatactcatctgtttatttatgataacggtactaacaaataacaatgaaagagaaatgctaaataatatagaaaaattatgaaatttaatttatatattgctgttgtacactttgaatgccaaataataggaatgctttttttttttttttgttatatttataataaataaattgattatacggttgtcatggttgagtagtctatttattagagtgtggtggggtagaaagtatataaggaaaatgcagtccttcaataagggaacaaaagaaagtagatcacgtgtgagattttttacacatacatacattatacatattatacaatttaggatagaaatataactacatgaaagcttttatatgtatatattatatatgcgtgtacataggtgtgtatggacctgttccaactggacgtacccttcacatgatcatatttgagctatatatatatatatataaatatagctcatatatttagattcctttctacatgctacacataaaagcttgcagtgaaaatccaaaactggtccctgggttactgaatattaacattggataagatctgtagctcataaatttggatacgcaatatttcattgagagaaaaaaaaaaaaaaaggagacaataaggagggagagggatacgtcacattaattagggtatatatgtacgtagaacgatataatggtgctataaaaaagtgagtattcccagagagcatcacaccaccaccatgcattattatatatatatatatatatataaatttattagaaagagaaaatatatatgagtgtgtatatgtgtcagtaaataatataaattgtgacagacattattagttaacgtacataatattattaaaaactagctagagggggtttgtaagtatatgtttaaaaatagttagtttggatttatgttgaataatttttaaagacgtaattattaggtttttcgactgcttttttgcaataatttaattatcgcagtgagcttttttttgtcgattgttttctttgtaatatatatatatatattatattgttgttggtagactcgatcgagtagtcaatacacatatatatgtgcatgcgttattggatcttaattaatatatataatatatatgtccggttttgttggttatacaattgaaacctctatggtactactggaatggttttgggcttttggctattttttttttttttttgagctttaaaaataataagagagagagaaagagaagctagaaagggtccctcagatgagtcatggcagccaaaatttcttacaagcatcgatgagagacaaaggaatggtcattgtcggagccgatga

SEQ ID NO: 17305 - DNA, 2286 bp, Cannabis sativa
tggctaatcataatctattatgaagacgtaatatgcataaatagcctttctaagctttatatcccctctgagaagatttccatctgaattgagagtttacacgaaactgatctctatagcttgtgacgattgacaatgtgaaagcacattgccagttgcctgagataatttcaggctgatttgaaacgtgacaccaacattgttgcgttgcaattgaggcagtccttgttgaccttagccgatacaatagtttgctgaaaagtgaaaaagaaaagacagaaaaagagaagaaatcgataagagtgttaatcaaaaaacccttcttttttttcttaaaaaagttgttaattacaccatacaatcttagctaaagcgctttttgaacaaagagattaatcacaaattcacatgatacgcatactaagatcacataggccatacaaccccaaacatataggccagcagccccaccttcagcgggggaaataacaaaagcatctttgattctcttcttttgtacaaatcactaacattaatactcaaaaatctgtgataagacagccaaaagataactaattagtcataactaagagtttttaatgaaagctaatataaaagctcttcctttgtggtcactcctcacaactcacaattggcttttcttattgccacagcaaaagtagtacacatccccacatgccattactccaaagccagacagccagagataaaccccctttatcaacagttgaccagtccttacttactcctttacaccttaccccttaccctgtataaataaatatcaataaaccaatttcattccaccacctttttgctgcttcttctcagtctcactcactacaactctacttccatggaagagaacttatctctaaaatgctttcgccggccggaatacaatacccacctaccggagagtccaagagctccaatggagtttctatctaggtcatggagtgcctcagctctccaagtctcgaaagccttgctgacaccaaacaacaacaataataataacaatcacagtaacccttcttgtatgacctccaaatcttccaatagctcctcttcttgtactaatacatctatatctgaagatgtcatagaagaatccgaggagctccccatattggccggacaccagttttcttttgcttcctctgttacttcccaactcgtcctcgaccgtataatgtcccagtctatgagagaggtttctttctttctttctctttttcctttttcataatatatatatgataaatttcagtccttgtacatgttctgagaaagaaaagttcaaagctttgaatcaaaattcttctactccttgttttatttttttttggcttgaaatgcatattgtgtgtgtgtgtgtttttttaaacaggaagtatcaccattaacatcgggtagactctcccacagcagtggacccttgaatggaggttctctgacagagacagacagccctccagtatctccttcagaagaatatgacgacgtcgtcaaggtcttttatttatttatttatgtttttcaaattctagtagaaatataaagtaataaaatataagaagcaccaaccaaccacactttattatccaaaaagtaaacaaagtgaatcagtgtctcaggtctagtttgtctctctctgttccccatatttttctttactcgttttataaaaattcttgacacaaaaaacaaaacagcgttcttctttcattcaaatactaaaccccccagtaggagtgctgcaacattaaaaccaacatggattccagttaatattgactttatatccccttagtcaggcttgacttgtgttgtcatttcatttgatacaataatgaatgctatgcttgcctaagaaagatgtccttcctccaataatgttgacaacgttaattcattaaaagaaaagaaacataaattatggagtgaaataaaccagtttctaggcctagtttctccactaaaaacatcactacttttctttactcattactctgtagactgagcttacttagtttacattaattttatgtactatgcagttctttcgttccaacaacagcatacaacacctattcaatggtggacgaacaagcgcaggaaatgtcaataatgcccccaccacaggcggagccaagactgtagggaggtggctcaaggacaggaaagaaaagaagaaagaggaaagcagagcccaaaatgctcagatccacgctgcagtctcggtggccggtgtggctgggg

SEQ ID NO: 17306 - DNA, 5026 bp, Cannabis sativa
  modified_base (4955)..(4969): a, c, t, g, unknown or other
gaagtgcggctttgttcactagtacccttatataactaagattattttaagtactacaaaataataaagatcattagctattaaatttcactaaaaaaaaataaataaaagaccatttactactatttcctttgaaaatactcttggcatctaaacattaaaatgccacgtagcgcagagtggaaaagagccattggctgaaataatttcttgttatatcgtgtagctcaaatcaatcccatattttatatttatttaatataaaatatggataattgggaccaaataaaataaaaaataataaacaaaaaatcccatcctccttctcggtcttggtgtctctcctctccaccactcagctgagcttcatgagacactcggactaagactctctgattccgtctgaccttcaaaatccgtacatctttctcgactcgtccatggcgaaaactctaatctcttcacctccacccttcttcggcacgccactgccttttctctctcgcaacggcacttgttgccttcctcatcgtaagctattagcggcaagagtaagagttagcctcaatgaaattcctcctattcattccttcgattccactgtcgatttcagcgctattgctacacgagcggagagcctactttacactctcgcagacgccgcagtcgccggggacgcggcctccggtgcttctaccgacgctgccgcagctcagaagagtggtggctggtttggcttcatttccgacggcatggaatttgttctcaaggtaatttcgacttcacatgtcgaatattggtggatttttttttgtgaaaattagatggttttgctggttcaggctattggtaaccgttgtgttttaattgaattatggtaattggtgtgcttgagttgtgtcagattttaaaggatggactttcagctgttcatgtgccatatgcatacggatttgctattatattgctgactgttattgtaaaagttgccacacttcccctgacaaaacagcaggtgggttgtttattcagaatctcagattatgattaatcgagcatttaattgttttcactgttatgataaggtggtaaatggtttaacatgcaggtggaatcgacgttagcaatgcaaaaccttcaaccaaagcttaaagctattcaagaaagatacaaaggcaaccaagtgaggctatagctttgtgtctacatttatttccaaactcttacaagtgtatattttatcgttttcaagtaaactttctttttctcttatgtatctattcgtttttactaattcaaggaaagaatacaactcgagacctcacggttatacaggcaggctggggttaacccattagcaggtattcaatttgtttatttatgttggtgtatatatatctatctgcacatgtttagtttcactctcaaacataagaaacggatatcactcagggagctaatttctatttaagttaatgtatacgggtctctgcttatgttgaaaatggtttgagtcttcttgtgtcagtttgttgccaattcaaaagaaccactgtctccttatttcaactgaaattctgagagttctgtttctatcagaaattttctaattgtcactctcattatgtttgcttaacttattgcatcttcaaaaattggtacactggtttatgcttaccaaaattttaaccactcaagtcatactttatcatataggttgcttgccgactttggccactataccagtctggattggtctttaccaagctctttccaatgtagccaatgaggtaccacctattttaagtgatgttgatgtatttgttatttaaatgttgaaatttgaacctggctgattttttgcattccattgttttattagggagtgttgacggaaggtttcttttggattccatcattgggtggccctacaacaatagctgctagacagagtggatccggcatttcttggcttattccatttgtggtaataaatctcatgttttgactcttaatgccaaatgatcccagaatcatattcttgtctagggagaaagtgattatagaaacacaatagaccaagtatatgtgggtgacttgggtgttgatgatgatatgctatgcatgctccttacaatgcttgttcgtttataataatgattgctctgtaatctataagtagtaggaaattaatcttttgtcatggtttcttatatacttgtttccctcgacaaatctgattccccttttcgttttcagaatattttctggaagttttctgaagtttgacaaatcaatttctttttctgttcttttttgaaaccccattgtttttttaaatttttttttttatggaagcattcttagccttgtatcaaaaattttaagttctccataatttgtatcaccaaagtttaacctaagcctttgcgtttctttgtgaagaatggaggttaggctctttttttttcctacagaattcaatgtaaatactcttacaacatgtttcttgctgaacttgtttaggacaactcttctaatttatgtttaactggtgcgtgttgaagacaacaagcttatatgtgccatatctgtctcataatacttggtctgtcatgcaggatggtcatccaccactgggttggcatgacacagcagcatacctagttttaccagtcctccttgttgcttctcagtacgtttctatggagatcatgaagcctcctcaggtatagacatgtctttctgatcattatctgtcttttcctccccccccttttaatgtttaaaaatctcaaatattacttggcagactaatgatccagctcaaaaaaacactctacttgtattcaagtttcttccgctcttgattggttatttctccttgtctgtaccctccgggctatcaatttactggttggttcttctgaacacactctttttaaatttgtgtaagctaatatgaatgcatgcaagtagtacattagttgtttttcctactgagagtactaataaatttaaggttgatctctcaacttttttaaatttctcattgttttaactaaggatgaaaacaaatttggaatttgtttcaactatgagactacaattgtatagttgctatagttagggattaggagcatgaaggaatttgtgcatttatgttagttgggagtttgcaataaaaagcgaattaccgacatttggtaacacttttacttctgaaattttttaacacaaaaatggaagtagaatttatgtcttttaaattttgttttcaaaaacaaaaatatgttatgtaattacttttgttttttaattttaaaaacaaaaagcaaaactgtattttgtaaatgtctgggctatgagtccaggttcgggttcgggtcagatcgcgttcgggctgggttggggtccggctctgggttcgggccgggtcgaggtctgggttcggggccattgctggggtctggatccggggctgtggcggctgggttcggggtgtaaaatattgattaaagaaaatacatgtagattacaattaaaaaaattgtttaaaaaatttttgaaagtgacatatttttgttctgaaatttcaagtttttgattctcatttttcaaattaaaaagtaaaaacagttttataaaatatgtattctgaaaatattttcacttttttaattagaaaaacaaaaaattgattaaaaaagtgttacagaagacactctaagaatttagttagtgaagttagattttaagtagtagcacgacaatatttatatgactaaaattatcacgttactttaccttccatttgttgtaaactttaatttctacagttattgtatggcatttttccaagaatgccaaattaaatctccgtggcagcaatatattgtgaaccttgaattagataaacacaaatgccattataattatttacatgaagcaattctctttttatgatgatttataaaatttaaccatcatttgttaggtttacaaacaatgttctgagcaccgcgcaacaggtatggctgcgcaaattaggaggtgcaaagcctgttgtgagtgaaaatgcaagtggaattataacagcaggtcgtgcaaaacggtctggctctcagccagaccggtcgggtgataggtttgtatcttgccacaatgcatgctaaaatttataactcctgcaaaagtttcttacttggaaagatggtgctcaacagattcaaacagttgaaagaagaagacaaaaagaaaaaacttaacaaagctttaccagtagaagttcagacctctgctttgacttatgattctgaggatggttcagatgaagagaacaatgacaaggtaatatgaaactactgctactcgtttaattaacctttttacagttattttttttttgtttttaagatttgttttctgctatgataagctatttacatgtgctgatcttcataatgtatatgtatctgtgtctgcgtctgcatacaagtatttggttgtgcataaaagaatacattttgcattttcaatctttgttaagtcgtgcatttgatcgtgaatcctccaaattacatagttgctgaatgcaaaagagaggactacttattttttattttattttattttttgaatggagaggactacttatttatgatcaagaataggaaaatttcatttatgaatagtatacttctatttttagttgtgactggtaagctgcttgccaatatatatatatatgtatatatattaataaatttaattcagtcattgttgcaaattgaatgaatttgaaaaatattttctctactactaaacagagggagccacatatggatttctcacataatgaagcatttgtttgaggaagtatcactatttgtctcatcaagatactaagagtaaatattattgtttgtctgtgtgttgtggacattgtcccacannnnnnnnnnnnnnnagaattgagccatatataagaacatgggctactccactcattaccaattggttttga

SEQ ID NO: 17307 - DNA, 4488 bp, Cannabis sativa
  modified_base (46)..(50): a, c, t, g, unknown or other
ttcatatttaggatgttaataagcatacttgtgagtagatctaagnnnnnggtaaaataatttccaatagatagaactagaagacagattcaccctccaacaaggtttgcgaaagcagacttaatagcatttgcagtggcagcagtacaacaaactaaaattgaagatcccaaaagctacaaagaggcaattttaggtggaaccaagtcaaaatagctccaggccatggatgaggagatggttcactccgaaagagcaagacttgggtagttgtaccgaatttggagaataaaaagattgtggagtgcaaatggattctcaaggtgaaagaggaaattaatgagaatgaactaatttggttcaaagctaggttagtggctaaaggctttactcaggtggaagaaattgactacagtgaaattttctcacttgtggtaaagtacaagatgataagattgatgttgtctttggcaactcaaatggagtttgaagttgaacaacttgatgttaaaactgtctttctaaatggattcttagatgaagagatctacatgatgcaacccctagttttcatgtggaagggaaaggagttgaattagtatgcaaactcaagaagtccttatatggtttgaaatagtccccaagataatagaatataagatttgatacttatatgcaacaaatcaggttcaattgatccgcatatgatcactatttatattttaagaatctagagcaatctacaactatattcttattgctaaatgtggatgatatgctcaccatgagcaaggataagtatgtgatcaaaagtatcaaagccaagctcaaaagagaatttgagatgaaggagctttgaccagttcaaaaaatacttggtattgaagtttcaaagaactggcaggaagggacaattaacttaaagtagtccaggtatatcgagaacattatttaaaagtttaacatggaagatgcaaagagtacatccattccgttaggtggacaatttattttattaaaggaacaatgtctgaatagtgcgaaagagaaagaggaaatgaaggttgtatcctatgatgtggttttaggatgtccaatgtatgtaatggtgagaaccagaccagacatagctcatgctctaagcatcgtgagtcagttcatttccaatttgggtattgaacattggaaggccctcaaatggttattaaggtacttgaaggacacttgggattattgtctgaactatgagaaagaaaaagaagaattggagttgaaagggtttgtggacgcagactatgctccaaatagagatactagaaaattgatcacttcctgcttattcatgagaaactagaactgtatatgctagaaggccctgttacactttgtggttgctctttccacaacagaagcaaaatttatggctatgatagaagcattcaaggaagctctatgactttggggatttttgtttgaattgaaattattaagaggaggagtgactatgtacccggatagccagtcatccatccatatttgcaagagcccgacttatcatgaaaggagaagatacatagatataagactctactagattagagagaatatagaaaaagaactagttgaattagagaaggtcaaatcagaagataatcctattgatgttgggactatggtcttaacagtaaacaagttcaaacattgcttgaacttgataaatctcaaaagttagtatactgagattttcgagaacaccaactatagtggctgcattttttcttcatcactgtcatattttaatttgaacgaactaagtggagtttgtggtatagtttctctaaatgaaaagatctacaaaagctattttagttatggaaagataggtgtcatccgaaagggcgttcccagatgtctatcagttttacccataaggattctcaggaaagctagtctttctcttgaaaggagttttagatggctagttgttccctcctagaagggagtcccggatagtcgactctaactgtgcttttcctattcaggaagtcctattagcatgcactttggcctttagtcccagaagcgtatgtctcatccggaagcacgtttcttgtgctgaagtgaagaatatgtttagaggagtttattatgtcctaaccaacttaacaacttagcacgtacaaccaccgactttaggatctatatcctgaacctataaacagcaccaaacacttattaattgaggaaaagagttcagacgagtttcgagaggtgatttcgaagagagagattgagaggtagagagaaaagtaagagattgggtttgtattttgtatgaagaatcttctatagatgaagaagatttttaagtaagagtgtgagagataaacactttgagagaattcgacaaagaatccatctcgactgtattgtacttggttcttgctcaatcaataaagaaaatttggtagtgtcccagaactgaaatagagctatagatcacatcgatctataagacttgaaccagtatatatcttggtgttgattttattattttactgctttaattgttcttagttttaatactctattcaatcctgttttaatctctgtttgttgcgtgtgatttgttaattttattattgtttaattaattttaattctgcacattagttgtaatatttctacaattaaaaaaaatgactaatgtttatgtgtgcttaacattattctcatttataaattgaattcatcattgtatgttataaatgatcttaataaatggggtatcatttagttgtagttgtacaaggtcatcttgagttgatgtttcttcaaatttattttctttcaattacttatttttgtgaatggtataattacaacgatgatacataaatatgggtgtggttgacatatatgataatgcattcaaagcatccaaaagtataaagaattatagaatttatagtaatagtaattgagtaaacaaaacgcatataaatgagtgatgttcaaaagttttgctttctttcacattaacgcctaattatgtagcatttttatttctttatagtgtagttgacttagacaacaacaccaatataattatgcatttggtagatttttatcacacattttcaatactatttaatttggcttatggtttgtcaatgtttaatgtttgttaaatttgttcttctatgattttaataaccctaaccgagcccccaagagagtgattagaatctatgttgataatattggtgttgctagaaatgatcaaggtaaattaattaatacaaaatcaacatttttgaagcaaccaattgatgttactacaaatgagctatatgctataagaggtgccaatttggctgctgaaaagagattcttgagttttgtgattgaatttcattgctgctttgccataacttttattaataggcaaggtagccattggctcaatttagtttttaatgttagtttattgaatagcgagtcaattttaaattttaaaatacaatcaagttggaatgagaaaattatctttgttgttggttctgtattgaatgtgacttttcattgtaattcttttgtttgagtataaaacatcttcaatttttttaattaaaaagtaaaaaaaaaaaaaaattgatcactatgctttttgttaatttttcctactcattgtaaaaccgactcaaaatattacagctcattttcttgcacatttaactttatctcttcactcttctcgaatttaggggctgattgaccgccttgcctttaatccttaactattttgtattgagcttttgtttttaactttttgccttttaatggaattctccttcccttgaaaaaaacatgtaaaaccacataaggtggaaaatttatgtagctattgagaatagttgggtagagtatgagcaaatgttttgttttgttttttctttttattttttattttaaaaaaaaactataaatgtgacaatgtaaattaataataataataataataataataaaaataaaaaatattattactattattacagtataaactgtaatttgctctaattgcaatgtgtcacgcctagaaaacattttaactctccttgctttgcaattgaattgaaagaagaaaacaaaggcctttaaagtaaaggtagaaaggatggcaaaggcaaaatgataaccccaataaatggtacaaggggacaatgcaatcaacttattaaccccaccaaatataaacaaataatgccaaaatgtgaaataaacatgagtattaggcatacattcttgtttctgccgattgtttttgttttttaatgactaactaaatgccacacagtgaaacacacattaatagatttgccaacggatatttaaacattcatgttctagaattatttaatataggctaattaagatttttgtcccctgaatttttaaggtcgttaaaaatgccccctgaacttt

SEQ ID NO: 17308 - DNA, 2569 bp, Cannabis sativa
ttgcacgtggcatagagatatggacacgtgctaattgagtacacgtggtagacatgctgtaatcctgatcatttccactactatttactactcatataaatacatatatatgctcatcacttcctcctctcatatacatcaatatcatatatttatatattaatagtaataattaagtattaaaatcaaatattaattatggagagtactaggaaagtaataagctctggaatgttgttgttgttgctctttgttcttttggcctccagtaagtacttaattagctagttaggatcatatatgtcccaataataaattatatatatgctgatctaatatatattttaatttattaaaaaataaagactcaatataataaaaacatatattaataaattaaggtatttaattgaattaacatattaattatattattttaaaaatgaataatgcagattatgaagtggtagagggaagagtatgtgaaagtcgtagtgaacgtttctttgggaaatgcacaactgacagtggttgcacctccacttgccggaccgaaggattcgccggtggacgatgtaccggactccgtcgtcgatgtttctgttccaaaatatgctagcctgcttaattaattattataattaaatatcatatcatgtactactacgtactatcgatcatgaataaatataataaataattaaattatatatcttgcttttttttttcattcatttcattttattctttatgcttaataaaaaaaaagatctttttctcagaaaaataaaaaatgtgaacttgaggttatttgttagaaaaaagttgtgtgatcattcaattaataaaataataaccaacaaaagtaatgcgaagataataacaataatggattaagaacaataattgatcaaataattttacaatattattgttacaccttaagataattaagagtatgtaaagagatgaatatagaagctgagcaataactattattagtggttaaaatataatatttacatttaaattattattaatttaattttaattatagtataagtatattgacactgaaaaagtatatttaatcacaaataattattgtgattaatataatatctttaattataagaatcttttaattataatataaaaataatactttataattaattatatattttttctaattttcagtcacatcacgtgataattttgaggccgaataacatagattgataaactttattacttatacgtgtaaacttatttgcacgaaactaattaagttgacaagtattagaaggtattattagtggtatcatcatcagctgctctttaattttaaatcttggaatgatgctcaaaaaagttctctaattcacctaatgatttcggtcaacaggagagatttcatgagcattggacaaaactaattttactttttattatagttaataatgttgatggtgctattttttcgaaagatattcgttacgggtttggaatggttgcaagggagctctggcgttgttttagaagcagtgaataagtttaatttgtaaacatggtgcttagaggccgctaatggtagaagcaatggaactcaaagaagcgttgagttagataaaagagaaaggttggcatcatgttgctgtggaaattaattgtcttacgctcataaatgatatcaagaatactaaaactttaacttctccttatagttttgttttacaagaatgtagaggtttgttaatttgattgttgttttgtaaaatggtatgcaagtttctctttatgaggttgatcgtgttttttagtagaaattctttacctgcttgctattcttccatagttttataaaaaatttaattgaataaaactactttattttcaaaaaaaaaaaaaaaatttcttaattaaaagaatcattaatcaatgtaaacgtaacttttagagcataatggtaattttttttaaaagtgttaaaaattatttaagaatataatattttattttatatctctttcacattatttttaacacttgtaattttaaacgctctaatagtatattattttttaaaaatactataattataatttcatatattatttattttaaatttttaattatatatattatcacattatttatttatatttaattttttattatttttaaaaagagattgcatcaatatcatcaatataattttttatattagtatttatttatctccaatagtataatatttttatattttgccaaataaacaatatccacatgagtaccaatcctctaaaatttaatcatttgaatgctgaattaatttgagcactattattgggcaccaatggtgtctaaaaccttctatatataagtgtcactctatgattggttagcgatattccataaaacttattttcttaaattatattagaccgacactaaaaaaaatagaggagtgctaagtaaactctcttttgcactctcttttacactctcttcttaattgagtgacatgtgtaacaatctaaattatatttaaaaatagttacaatta

SEQ ID NO: 17309 - DNA, 4624 bp, Cannabis sativa
tatccattgagatactttttcaggtggttaatgaaccaaatgatatccattatcctattgttgatatgcccacgcgatgtaagcttatttgcttgagctggaataagcacacaaaaaaccagattgcaagcagtgactacgaaggaattgtaacagtttgggatgtaactactggccaggtgttactctcttcacatttcctcccacttccatgttcactttgtcatgcacttatgctgtcatgatttgctgcaggccaatcaaatattgtcagagttctttcctttaaccatagtctttcttcttgcagagtgtgatggagtatgaggagcatgaaaagcgagcttggagtgtagatttttcactttctgaaccctcaatgcttgtatccggcggtgatgactgtaaggtacctagaactagagtaggtcttatgtatgctatctattggacgttatgttatgtccaacatattgtgattgatgcaatttagtattgtgttgaaacttgaagaacctaatagttaattacactaatgatggtatatactttgaacaccataggatatgccttataacaacaccctttgtttagtcagttgtgcctgaattatgtgcttactgaagagtgatggtaatcgatatttgataagttatagcttataggcaatgatggaaatgtcactagtccattcttataaattttacaagtatgtgtctataaaaatgatttattttaaaataaatatttaaaatgtagaaacgtattcaataatgaacgagatagttgaaaggaaaaaaaaaaagggggtactaaattaagaaatcatcccaactataattactcataaaaaattgaaaatgtatgaatataattttaatttcaaagttcttgtcttacttgaagatttctcagcatgtatttgatatgaacaggtgaaagtttggtgcactaataaagaatcaagtgttcttaacattgacatgaaagcaaaaatttgttctgtcaagtataatcctggatccagcttccacgtagctgtacgtctctgttctaattcttctctctcaataaatgtgcacatattttggcagtgctgatgataccactgatcatgttctcagaatctaatgaagctgttagtgtcgaatcaacaagaacattttaactgctaatttgcaatatactttctcacaattttgcaggtgggttgtgcggatcatcaaacacactactacgacttgagaaatacaagccagccattacatgtctttagtggacacacgaaggctgtttcatatgtaaaattcttgtctaacaacgaacttgcttcagcatcaactgacagcacattgcgcttgtgggatgtcaagaacaatttaccagtgagttgccataccatctccatggcattttcaactttgaaatccaccatttttttcttttttctttttcttgccatgtttttcattatcttttcttttacttccacagcttcgcacttatagaggccacacaaacgaaaagaatttcgttggtttaaccgtgaacagagaatacctagcttgtggcagcgagacaaatgaaatcttcatttatcacaaggtgattatagttatacaaattactcagtcttggtaattaccatccaacattatattatctgtctacaatctgacaacaatttttttggttgcaggcgatatctaaacccatggctagtcacaaattcacttcttcggagtcaaatgacaatgaagatgttgcagggtcatattttattagtgccgtctgttggaaaagcgatagccccacattgttaacagcaactagtggaggagcaattaaagttttagtgctttctccctgaataaacagaactaaactcttataaagttatctcatgacattgccgattgccttttggtgattgataaataaataagaaagagaagaagagcaacggggttttgtgtttgtttaatcgtgacgaacagacaactataattttcttttctaaaagtccaaaacatcctcagtatgagattgcttagtcgatagtcataacgggattgttaaaagttttttacactaagctaaaccaaacaaaccagggaccaacaaccaacgcctttgctcgtgattccaacatatacccaccggtattcacatccaaacaagtctttacatttggatttatttatttagatatgaatttttcttttatttttgaatttggatccagacaaaatggagagacattattaaatgtcatatcgaagccgaaggtaagcaatcaattttttttttaaaaaaaaaaagtgaaaagaggaaagtcacacctctccgtatccatgtaatccagccaaagatcttctcaaattcatcttgaatgtcagtctgaataaggatatagatattagatattcgttattgtagattgattgagtctcggaatcccatctgtctcatattaaccaaaccaaattacacgcaaaaatccagatttccctttccaacctgttcctaacctttttcgaaaatttggcgcgaaaatagccatgaaggtcgaaaatttggatcacgcgaacaccaatctctcgacatcggccggcaaggctccggtgactggagatgatattaatcataaagcagaggaggaggtgtttgtgccgcctctgaatttcaccatggtcgattgtggtgtctttaggtctggatttcctggctccgccaatttcagctttttgcaatccttagaaattcgatcaattgtgtaagtggatcgcttccgtttaaaatttgttcgataatttcttaattttgattttaccgatctccctctatttagataattgtgcccagaaccctatccagaagcgaacaatgagtttgttaaggcaaatgggattaaactttgccagttcgcgatcgaaggctaccaggttctgctactgcttttacttgattctcaaaactgttttggaaataattaagccaaatttatttgtatatacatatgtgatcgattatatgatagaattatttcatcgattaaagagccaaattcctttcaagttctaagaaacctaggttttttatatgccataaactgttggaaaaatgaaatatataatcatatacgtttaactgatttgatttgacatgatgcatgaatatgcaaggaaatcaatttgttcaacgattataaatgtgtcattgaatgtaaccctcgtttacctggaaaacttttgactttatgtgcatatagaaatagttttttggtttagacattgattctgggtaatttgctgcccacaggagccttttgtaaacattccagaggaaacaattgtggaagccttgaaagtagttctttcttggtataactaacacttaataatgtttaatccatatcatagctttcgcattcttatttacttaggtaaaatctctctcacctttattaagtttcacttattctttcttcaaattgtatgctaatcttattgcaaattgcagcaccgaacgggttgtctcgtgggttgcttaaggagaatgcaaaaaatggtgtctttcatctattttcgatgaataccagagatttgctgcagccaaagccagagtttcagatcagaggttcatagaaatgttcgatatttctagccttaaccagttaacattcccattttcttgttcaaagagagaaaaacagatgccatagaaaaagtgatagaaagattatcatcctaccataaagggacgagaagcatacatttatagtcctttggggtatgagtttgttgtgtttgcttgttcagttttagtatatacatttaggcaattctatataccagcaaattttagacttgcatttacataaatatcagattatttctacttaactggcttgaagttaagaccaaaaaaatcagatattctaatataaacatatcatataaggcaggttcataaagattttgataataatggaaaattccccataaatatttaacaccccatcttagtcaaaacaccataggaaaaagaaaatgtaaaatgtataaatatggacgagcaacaatcaaatcgtcaacccaataaatgacgactgaaacgatatctcggcctatttgctatacctccatgttcatctaaacaaagacacataaatagtctccgcttattaattttaaagaacagaggcgtttcgttttaaaaacttacattaaaagaataggaaatgattcataaacaaaaaatcgatgtcattgtaaaacaacaagatccccaaccctaaaaaccagaagagatagacaaaaaaattaaattaaaaagacgaaccaggcgaagatattaggaagagtgactgctacgatatgtataagaacttgggggaatttatagacatcatctgttgctggtttggtgccctagttcagtagctacttccttttaccagattaacccttataattttcggaactttaaatggggtatacacgtaattttacaaaagagacattatccgtgggctaagagctattaaaggcccacatttctcttttttaataagaaggcccaactactgttgtcctagaataccaatgagaaaggggaagtt

SEQ ID NO: 17310 - DNA, 5455 bp, Cannabis sativa
aaatcatgtatatacttctcacatgtaattttttagatttaaattcaatagaactttcaaaaaagaaaaaaaaaaaaaaaaaaaaaaactagttgacaagaaaattcatgggccattctaaagatgaaaaggcatacacctttactcttgtgtgcatgtgtttgttttgcatgagcctattttgtctacacatgacatacatcatatatttatattttaaaaatgcatccaaaataaatataacattgaagtaaagtaaatcaccaaagcaacaagcattacggcccaataatatattatttagattactaaacttaataactacatttcagtaacaaacaaaataaatgctaaacatacaatttcaacagcccaaacacataaattttttaccactacaatgtcgtttgaaaattataataagtacaatttctgcagtgagtggtgaaaggatataattcttaggctctgaagacaatttgtgaaacattttcaataaagcaaaatatatttagaactaaaacagtttttatcaagtcatactgacatgtgaaagcactctgggtcagtaggatttatgggaggtatgcatctattgattacaccaatagcaccatttattgcagcatcaacaaagtctgaagttactttgtagagagctcgatcccgcaaaattctgcagaatataatcttttaagttaaaaacaattacacaaaagaaatgaaaaaaaaaaaagtactttgatattatctgtaatcacaacattgggaaagcttagccaaatcaagccttttacaggttgcatacctctcttgagaagtagtatggggaaattcccggcatgattgcaactcctcattccaatctcgttgcataccaatcagctcacttccatatgaaagaacaagtgcatcctctgctctggccgcatcacgtttgtgatctgacaaagacgttatatttttttcacaagtgagcagacataagacaaaaactacaaggttgcaaatcctacaaccctagcgtaaaatggatttgtattaattgccaagcaaaaacttcaaatgcagttgaatacatggttgttaaatagaatctgggatgacgatgcaaccaaccaccccttacatagactttcaatcaaaacctcaatattataccaaaacagaatcagactattaaatctctagattgcaacttcaaattttatgctaatgcataacacatttcaattggcgcagctttgttgtatggggttagtttggtgtggatttttgttccagacaaacctatttaggtataaccagttgagatgtcaactcatatagatcaaggcaacattactagaatcagtacagccaaaatccacaaatgagatacataaccgcaaactacaaataaccacattttgcctctacttgagaaaacttagtactaataaaatgaaaaatcaaaccaataggagggtgcaactcaccagaaacaggatgcgatccaagccaagagttcggaggcaacaaagattgaacattttcaaaaggatgtgcagaagctctccgctccaaaatttcacgaaaagcttcacaattaggaatgaaaaaaaaacaattagatttttttaaatataatccaaagtgacaacctaattttattaccttttttaaacttagagctgattttttgcaagagtcccacaagtgtggttgcttcataattagctttacttgcccgagggtcaagtgtgttccctgtgcttgaattgacataaaacagctttgtagttccagtgatacaaaatttatttccttccaaggttacaacatccaaatatatcaaatctccaacaagcctggaatcaccaatacccaagagcacatcaacatataatcaacaaaaacatattatttcaaaagaaaatcaatcaacatgttgaaaaaaaataaaaagcaatctcaccttctatagcttggaggaggattgagagatgaaaaaacaatactttccacacatttgatctcttttgtgggtgatgataataaattactgagtgaaccagaaacatcctccatgaaacccaaaccgtcaagctctgggacctctgctttcaaggtattggatcgtaaaataaataagaaattctaataaagttgttattttacatattataaacattgaaatgtcaaacatagctgaaaagtcaacaaaaactgatattaatttcaacattcctaacctccaggacttgttttgttttgcgtcgtttcatgttgcaatgcaagtgacgtcgaaagtgatgcatgaagtgatgaaagagaaagcagttctcttgttctatagacatgagctctcacagatctatcatcatatagagctgcaagaacaatgtacctattagagcccaagagacattgaatcaaaagaaaaagagaaaaatatgtattaagatataccaggcaccatctccaacgagcatccaccagtagttatgtcagctacctcagaaatctcattaaaatcttcaagctgatgggtggagccatcttttgtgtgcagcaacaaatcgtagcaggtgaagaaacatgtttccggagcatcaagaagaaattgtcttacatccatcacagaatctcctgggttcaacttcacataaatttaaaaaaaaaaaaaaaatcagtagaattcaagttacctaattcaacaaaatgatgaaaattttttaaataagggcgcgcataggaaacaaattgctgaaccaccaaaatgttaggattagtagttgatggttctaacttctaattaacaagagaaagtgttagcttaaattgcttgcacttgccattttggaagtaatttaaatagaataaaaattaaatcaaataaaacaatttcgatagagaatcatctcacctgaagctcaagcttctcgccactttgtgttttgacagatacaggaaacagatggaggtcacctgcactcacaaggaaatgaagtaaacactttcaacttggaatttaatgagaagttctcaatgttaaaacatctagaccgtctgacaactttttaatttgccaggaatcatcaatgttgaattgacatgatatatccgtagtcaaacaatgtatggcttctgaaatgaacaatgcctgccaattctcaaaatctatcaatagacaaagtaactgcaaacgggatggcatattgcttttattatttttaagataaaacagctacatacaagaattacaaaagtcaagagttgtacaaatgaaaggattacattcaaatctcaacatttagggtccataagggtagcaatgttaagagcatcatgcagttttgccttgctaagccaatggatgttgtaaaaacagagttacacatctcgtataagtttacaacaatgacagagggaaaaaaaagtaagctgaaaagttgtaaaaagagggtgtacaattctcaactcttcttttttgtgacttggaatgaagaagggggcaatagtttaatttgtatcaaaacatgcgaacctaactgtatgtatagactaatattctaacttcctgccatctctccatatttgcattcaattctcactactaagaaaatgatacatattgttagaccaatatttatcatatatattttttggtaaagaaaataatacatatctatttagtttattcctttgatatatacagattcatttccttgaccgccattggtcatgcaaataagtatcagcacaaacaccaaaggtaaaaaaaaatgtataaaaataaaatggagtaacatgattttaccttgcttcgattggctggttgaattatctgtttcagattcatgctccggcttggcatcagttgattcaactacaacaggaatctcattagcatcggttagggaagattccaaggcagttgaaacaggagcatcactggaaacatctttagcactaggaatatctttagtcggagcatcactagaaatatctttggcaggagcatcagttggaaccacggtctcagtagatgttacgccaatattggatcccttccgattcttccctctgtttgattttccagccatttcaccttctattctaagaattaaagttatcaggaagtaaaacggagaagaaaaaaaactttaagaaacccaaattgatataaaacttacctcttatcttacctcttacctataaaataaatacctatttaacagaatttcttatggcttaacagaaaatttttaaaaattctgttaaaactgaacaaaacatgccaaatataacaacaacgctgaagagatgcaaatgaatgaaccataattgttcacaaattctctaaacaggttactcattagtaactattcagtgaagtgttgctttgcttctcctattaataaaccggataaaatttgaaacaactacaaattatttctccagtcaacaacccaacattattccaggcaacttattggtcactgtgagtagttaaaataattacaattcgaattgcctagaccataaattagattttatttggagtaaagtttctctatgttaccaaatacttcaccaacactaagacatagaattatcccaaacttaaacacagtaatgaaataaaatatatgcaggaacaaataccatacaaattggattcacatgaagaaacagaactttttttattgaaccaaaatcaaaaaaaaaaaaaaaaagtttcttttgtcctcgcccttacctttcaaatggaaaaagattaactaaacattgtaaactaactatgacaaacctaactaaagaagaaaacaaaacgagaatttgataatagctagagcttatccctgtagaatgccaatgtagaactctatacaaaacacatagaatcacttgagaaaactcaaaccacaaccagataaagtttcaatcgactctctgtatttaatcctcattagcagcaacgaaactgtaagtaaagtacctgttgtgagtgaaggagttgtttatccggccaatgagtgaaacggaataactcgtgtctgatctccgatcaggtggtaaaggaggtagatgatatttctagggtacggctgctgagttagtgacagaaccgatagagggatgagtaacagagagacagagccaagaagttgtgcttcactttgaaaggatggaaatgaaacctactttggtttgtaattgggcttctcatattgggctaactcaaacaataccacaattttttttcacaattgtcataacaatttcattctcattttctaattcatcacttgttatatttgtagggattatttcacaaaaacataaaaacaaccaaaatattacaaaaatacagtttcacagaattttaaatatttttacaatttttttgattttattttacggaaaatacagtatttttatgttgtaatcttgttaatttattgttgat

SEQ ID NO: 17311 - DNA, 2587 bp, Cannabis sativa
tattttgacaaaaattcagttcaatgtactggttttgacattttaaaaaatacataatctaatttatcatttaataaaattaatgttctaatcaataatttttacaaaagatacaatccaaaataaaatttatcctattacctaatcattccatctaagttttaatattactaaacaaattaaagttaaatactactaaataataatgacaaatattgttgtcatagcctagtctaacaattttacacttctactcacaaaaaaaattacaagttcaaatcccccttctaaaagaaaaaaaaatctcttattcataaaatatatggtttgaaaaaaaaatcacctttttcatttttattttgaaattaagtgataatcaaatttcttaacaagatattttacttcctataccctgttaagaaagagtacaactttttttgaaggaaaaaaaactggatttttttttcaccttatgtttcatgaataagagattttttttttctccatattccttaaaaaaaaataatttccatattttaaaaaataaattatttttagaataatcaaatcaaacaacaaaatttctttttagaggcttatttggattaggtggtccactaagtaacaccgtgtacaatccgtgttaatcaagtggcctattccttgccagagttagtatattctcatttcttctcttgaattaaaattattatttaccatattcaactctatcatactcattatttagttttaaaatgatattaccaaaaggaaaaaaaaaaaaccgacacgtggcagttacaattccattaaaaaaaccatccaggaacgtctttcaggtcatcttacttgctctgcttaatacctaagctaattctcttctcttccctcccgagtattatcttccccagttgttaacaatctttgactaaattaccctttcaccatatacactttccccagataaaataaggctaatttcgtcattcattatctcccccaaaaagttacctataaataccagactcaactcgaacactgaactcaacaccaccagactggtagttctctctaattctaaaccaacaaccctttctctaattttaccattttacccttccaatggcttctcgttacgaagttgaggtgaagctcacctccgccaaagatttgaagaacgtgaactggcgttacggtccagtgaggccatacgtcgtcgtttgggtcgacccaaaaaacaagtgttcaagccgggtcgacgaagagggcgacacgaacccgatttgggatgagactttgaagattcccttgcccggtcggatcgaagacgaggagtattcaactctctacgtcgacgtagtccacgccgggtccgaacccgataccaagaaactgatcgggtcggccaaactcaggctcggagaaatcgtcgatgaggtgggtttcggagaacgcgccacgcgtaccttgaagctcaaacgaccttctggaagaccccacgggaagctagacttgaaggtctcaatcaaagacccttactatcgtgcgccggatgcctacaacgcacccccttacggggtcccaccacctggttcaagggattacaacgctgctccttacggtggaccttacggtgctccgccaccgttgcctcgtgatccttactacgttgctccgccttctggatacccacacagttcgtacaatgcgccatcctatggccaagcctacgatcagccgagttacgggcaagcgcctcagtacggtcagccgagttacgggcaggctccggcgtacggtgcgagcgggtacgggcaaggggaggagaagaagagcaagtttggaggaatggggacgggattggctgtgggtgcggtcgcaggagtgctcggtggactcgctttggcggagggggctgattacgtggaagacaagattgctgatgacgtggaggatcgagtggaagatgatcttgggtacgacggcgacgatttctagagaagtattttgttgtgtgcttggattggttgggccccactatttggttttggttatttagagtggttggatgaaacggtgcattttgttgacgtgaaaatgaaatgtgttttgtagtttcaagataataattgataaatttggaagttttcgtttgatttgtcctaaaatacttatttaataataaaaataataatgttaaattgacgaaacaaaattgataataaataaatctatattctttcttttaaaaatgacgtacgtgaccgtgtccaatgaaatgtgatttgattcatgtgttattttatttattattaatattaaaatttatatcttgttgacttgtgactgaaaatttagtttgttttaatgaaagtcatgcaccatcacgcagtcgtggaaattgccctaatatttagagaaaaagagttgcatagcactaaaaatatttaaatgactagtggtttaatctttggaaaagaatacttctacactccctttcaaataaaataaaataaaatacttccacgacttaataagctaaaaataaaatatcataataaggttgtgcagaagtttattgtaaaat

SEQ ID NO: 17312 - DNA, 5230 bp, Cannabis sativa
tatatattttttaagtctcatattaataaaatatatctctatatataagaataattacattttaataaaaatatatataaatattatattgtttccttaaaaaaaaataattgtttattgttattattattatattgatattttattgtgttttattttttttaaatataattttatttagttataaccaattaattaaaatataatatagttaattggtattggttattattttccaattttgttttatacgtttatcccagcagctacacggacgacctgccgaaaatcttgttttaaggaattttcattcgaaatagctttcctttccgatcgattagtcattgggttggaatttggaagccatggatgagaagatggagttggctagtaccgaaggccctaagaagaagatatcagcttgcgatgttgaagccctaaagaaatgcttacaagagaacaatggagactatttcaagtgtcagccacacgtagaggccttcaaatcttcatgtactttcaagaaacccacccaatctccacaatcttcatctaacctcaataaccctgcttgatctttgatttttttacctgttcatgttctattattcttgatcaattttgaacttttaatccattaagatcttctgattttgttgacccatgtattattgtatgtatggagttaaagctgaaacttagatatggattttagattattatatcaattatgatatgagaataaagatttaagctttaagctttcacatttttaagtatgtgcaaatgccattagatcaattatgattttgattcaatttctagtaattatttatgattttgatactcttttgtgatgctttcagttgatattattatgctataaaatataacacaaaaacacatttataatggaataataactatctatattctgcttacatgtttcacttgagtaatatctatttagctcacctgagacaagtgttactagatcagttgctaaaaagtaaaagaaaaaatgatgagaattgaagtttattgtggaggttccatccatcattaacatgcattacaactcttcctacatgttccatagtaatccaaggagccaatcatgaagacagcatttttcttacattctcccatggcagcccacgtagaacaattgtcatcttcatcggtgcagtcttcgtagctcgacaactcagacgacgagagcttttcttcagcagttatttttacctgaaagaatttgatggcaaaccacatttctccctctaagacagggcatctagcatgagagctgctagtgtcagtagttgagttaggatagatgttgaagaacaaaattgcattgccttttttcggtttcatgatgtcactactaccactactctttgtacaatcagaccaaatgttgcccttcacctgagacattttcatgttttactggtgaaaaaaaaactatttgagtgtgataattgtaatatgaattaagataatgagagttgttctaatctgacctttgattttgggaatataatctgaccaccatttttggcatcagagagatacaagacaactgttgcaatcaaaggcttactttggtctagtaatgaactgttaccaaaataatcaaaattcttttcggaatcctcattctcgtatcgaaatatttgcaaatcctttccattttctgaagagaaacaataatgcagagcaataatacaaaatactgaatcagaaggtgcacaaaataagccaggaaattctcaaaaagtaaggtaagaaacaccattagtactggcattattagaaaatatacctttgggaaggaaggtccaagctgaaattctttcctcaatccttgaaactacatcatcctgaaacaattaaaagaaaccattacaagtgaagccgtgtctggttaataacacaacatgggtgagctgcaatctcagtattttagcatgaacaacctaaacagtacaatatagatctcttaaaaatcagctcattcaaattaggacagatccagaatatgagaaagagagaaaaatttactttaaccagttggggagtctctgaacttttcatcaattttttctttatggtgtttcctgaagcatcatcctcccttgaagtctaagcaaaaaatgtacatgttttaaaaattatacaagatttaaggatagatatacaatatgaagacaaaacaggaagggtttaccaaggaaattaggtgatcacattcctcatctgaaaggaaaccttcatataagaagaccctattccaagtcgaagaaaaaatattcagaattaacaaacataatgacattattcagaccaatcattcttcaaaaagactgaactgaaatctcatatgatacaagcaaaatacagaaaatgacttgacactattttgtatataaaacttgaaaaaacataatgataaatccttaatcaatgtcatcttccattgaagtaaaacaaccaccaaagcttatggttgtacctgaccttggtcgccaagagagttggaccacccttgatgggtcaatcctgttggaatgaacagagctaggaaattgtatcaccatttcctgcttaaactcttcatcccttaattccttcctgctactgaaaaaatacaatgacagatataaattaagctaataaaaaataaacaaagaatcactgtcaaaggcataagaattagattacagcaaaaaaaaaagaaaatcctcagccaatagaaacgacactgtccaaacagtacaagctaccaaaaaaaaaaaaagtaatatgaaacattcatgataaatttcaaggcattgtaaaaaaggcccagatcaagaacattacgaaaatattcaattcaaggatacataagaaaaaagctgaaacaaagaacaaatgacaaaacgggcaaatgtgagagataataagaaatgggtttcttacatttgggaagaagaacagaggagaaaagttagaagaagcaagattgagagaagagaagccattgttgtggttgttgattacagaggagtgtgaagagaaatgcagaaaacgcggcttaaaaaaaacgaaaaactgatttaaaaaggttagatacaagttaggaaggaggtcctaactgcctttcgtcgtgattttttatttttcaatcaataaattactaaaaaattatatagaaatttcttgttgttaatttattttcagaaaaaaattataaaaaaaaattgttgttacagtaaaacgttatatgtgttctccttagttatattttacatattattattatttttattattgaaatggaatttttgttgtaaaatatatagttagaattagaaataatgatcaattaagataacagaaagtgcgatcaaacagatatttacccttaaaattattaatacgcaactggacaacttttattattttaaatcaaaaaagtggaaatttcaaggttatgccgatagaacaactttattattttatctattaaatacacagaaaacacctcaaaatcaatacaaataaataaataaatacaaaaatgaatcaatgaatataattatccgcaaacttattactctttttttctcatatatttttaatttaaacctcaataacaaataacatttttctcatctataagagtcttctttggcagaatattcatcaaaagtttctgtgcttctggttcttctaacagaaccaaaagatgattccccagctgacccaggtgagctctctgcttcctcatcaaaagttccatactgggaaggtgtaaaagcatgaggcacagaaagtgttactgctctctgcaatgcagccttgtactcctctttcttctctttcgccaatgtttcttgccgttccattctttgtttcgtcggaatttccatgatgggatctttctttaacatcaactgtacagagtcaggataacataatgtacaatgagacgacgatattggattttcgaacacttgtagacaaagtcttttgctttttcttgttcgtctccaggaaggagaaaagaatcaatgcttttttaaaaaaacacatgtagagcatgtaatatagacaatcaacaataggagataagaatgagattgaaatcgaaatgtggctaaccgaagagactgaaaacatacttctagagctcttcgggcttctctttctatccaaacaatggcatggtcagaagtggcattacatgaaagtactatgtgctcaaatcttccatccactggcactgctgtccttacttctggaggaaaccttcccatcctatatagacaagtgtttacaaaacacaggcaattttcaactcataattggcaagaacacaagaaactttcacatagtaccactcatggatagaattggtcccaggtcaagaaacattttaatttgtcttgattgcattcaactgaagcaatagactatgaactaacaccactaagactagaattggcttaatgtaactaaaatgacaattttttatttcaatttaacatggatgcaagatttgacaactataatgagaaattagcaaagagaaaaataagtgggaggacaagacttgtttggattttcatttttaagattggtaactaaaacataaactcgacttctgaaaaaaatttacatgttaatgtttaatttgttacttcttttcctttttaaaatgcacagggctggtgagacagtccaaacaagcaccattaacttttgcaatcccatgaacccaaatatctaatacataaatgttataccagaaaattgatcaattcagagagttggtataaagataaagttcagcaatcagttgagcatttgaaagattatcaacatatgtctacacacctgaaaggttttctctccacaatgtgatagagacggccaggtgcatatagcctccttggatctttaatcatcttctcttctggtatacatgtatctctcatgcatctcaggcatagtatgcacggcaaactgttaagtgaaaagaacccagctttattaacaggttgagatgaaatccgacgatgcagtgtgtactatcgaatacttgagaactattcaaacttgatgatactatcaaatattctttcaggagagaagatgattaagcctctcatttgcataaaggtttctgtactttaatccatttaaatttatagaattttgttactaaatgagatgagtc

SEQ ID NO: 17313 - DNA, 6657 bp, Cannabis sativa
agagtttgctattaaaacatttgaagtaaagatctagcattctttgtgcttttttgatgcttcaacgttagcaacttattagtattttaattgaatttgctattagagttttcatttgtatttttgtaagcggcatcgtttatctatcttgttgattatgctattatgtaatggaaattttcattttactctttaaaataaaataaattataaataaaactatgcggccaatcataaaactaggcaaatacctaaaccaatgattcatatttgtaataaattataaaatgcagtaagaacaccaacttgaagaatcttaggaatagtagagaggtgaacacaagtaagccattatccagatagggtgagggtaacttaagtttcgcttcaattttctttcttcctccaaaacaagtgaaatatgcaaagttacaagaacaaagagatgatcaccccattaaccgtctccaaagccattgatactgcattgacaaagcttggaattaagatgaaattgtcatctttctagaactgaatgattttcctgcaaaagtaagaattgtctctttgtcccaccaatgaatctgtcgaaaagatttaaccccataagatgatatcacgtttcatggttcgctatgaagctgctaaactaaatataaaccatatttggattggatattttatacaagtgacaatggaaacacaccagagtcaagatcagcaaataaggaaaaaagaaaaagaagaagctgatttctttctgtgaagtacttaacaatcccaagtatgtatgaaatgttaaagttatacagtatattttctgagttgttttcttcacaacaatgtacaaacttacaaggcaatgtcagccacttctatttctcccatccccctaatcgtgtcccaggatcatagtttgtgaacacccgaaactcgtttccaagtttgctggagtgtcgaggcttgaaaccacaaggctgcaagcccatcagctcagctgctctatctttttgcacctctcctgcaaatcgataataaaacaaatttaagaaccaaaaatcaattgtagtgtgttacatgaccctgatgaacataataaaacaaatttaataaccaaaaatctgtacctgtaagtagaagcaaatgagactccttacttcttgcaagaaaagatatactatcagcaactttctccaggcactccttgctctgtcaccaacattgagatttacttaatacccatcaacttcttcaaacgttataaatagttaaatactttgctaactaataagttaaaagatttaatcaaaacgctataaaaggtaaacaaagatatcaaagcattgaaatagtgcacaaactgcaaaatcttgtgaggcagtcacaatcaaattgcttggtaactctttaattttatttttctcaaagtgaatgaaagatttttatacaaaaacatgttattcaaggaaagcctcaccattctttcacctttggaaaccaaaagaaaataaattgaagtgctttaaaaccaaaatgaaagtgtaagcaaccaagccataaacccattaatttaatcaatttataacagatcatcttgaagttgttaagatcaatccgtgttcatcatagtaactaaagcaaataagacccttctaaaaaaagctttctcaaatttccaaaccacataatttaaatgctgtaagttgaaacctaagcaagaagtgtataaactttctcaccaggtaaggagggtctgcaacaaccacatgaaaagcatgcttaagctccaatggcaattcttcaggttggttataatcatagaacgtaaaatcactaccatattgctcaaaacgcttgtcgaattcaagaagttgcactctcaaattcgaatcaatattctgaacacattacaattaagttaagaatataaaataaaaagcagacccaaaatcaaaaggaaaaaaaggcaatagcttgggaaataaagcattactttgagataagcatagagcgtggggcaagcaatacaagcgattcgaggcgatcccaagtccgagtcagacgaacccaattggcagagagtgagaacctctcgagccagggtctcggcagtgtcaggctcgtaccagaactggctgagcctccagtcctcggagactagagccactgaagaaccaccctgaccatcgttctcgttggtgggttcggcgacagactggctttgctcagctaagaactctcttagagcagccatggcttgggagctaagtgttggtgggtcatcgtcggtgtcttcgttggaagggttggtgtggttgcttagagagttggggttggtgggaagctcaacttcgtcttccattgttgttgcggtgcagcgccggaaattggtcactctctcgttacctaacaagtctgaactgagttaacgaagcatctgtaatttgttcagtttgcctttaaaagtttcatgtcgtttaccacaaataccttcgtttacactacgtgtttgtacaacgacatatcgtttagttgaaggaaggaaaatccatctagggatgtaaacgggcggggattgctccccatctcgaacccgtttcaatacccgtttaaattaaagcgagaacggaatgagaattattagatacccattacatatatatattttttttaaaaaaataatgtcttaaagagattaaaaaaaatatatcataaaaattcattaaaacaacaaacataagtagaatagtgtatatagtaaatgaaattagtaaatacaaaattagtaattgaaaatacgtgattaagtgtcattttttaaagtcgttaagtgtgattattaatatgcatcaccgcagatattttcatgaaaaactgaaaaattttcattaatgcaatcaataaaaagcctaaagcatgaagttattttaattgtattagtgatgattttaaaacttaaatatatacatacatcatattggggcgtgttcacggtggatatctattccctgtccctacctaattctaactcgggtatgaacatttaaactcatacacgctcacaccctgccccattaaaagcatgtactcgaataattaacatccctatatctatccactcttctaataaataaagcttctcttagaacatctcaaatggagaagcaaatgatgcaaaattaaaatataactcatttataaagaaaaaaaatgtgctcgtgtaccgtgatgcaaatgtattatataacaaatattgtgtaaaatttaacacaatatttgctatgatgcaaaatttgttggactactttgctatgatgcactactttttcatttgctttatgtcatttgtattattttattaatatatttaattataacattaaatatgatgaactatttatatttttttagagtattactatgtgtaccaatgtacttatcatgacgtcttataattagtttggtagttttttttataatttttattaatttaaaataaataaaagtcgatatgagttgcattaatattgagattacatcttataaaagtgttagacatcatgaatgcctttcgtatttacataataacattaacgaaaattattatttttatattttattaaatatattaataaaatattataatgtcattttttttatcaaataaaacataacttataatgggagatggtctaagtgtaattaatattacttttcagtttaattccgctcaattactgaaataattcagtctcttcctcatttttggtctctaatattaaagaatacaaatatgtccaatatgtatagttagtagtcttagtctctgaaaaacatagtagtgttgagagcatcactatactttattggtcaaaatgagagtcctcttacgaagaagacatgtataatccgaacattcaactgcacaccatttcaacttcaagtaagccattttttttggctaaataattttcactttaacccataaaacttgatttgaatacaagctaatttgtttccacattaaagtattttacaaagtaatacaatttcacaagtagtaccaattcctctatttccttccatccttctgtccttgcatatctttaagtaattttctgttcttggttacccttcttttatctttttcaacatccattgccgaaacttcagacacaacaaaccccttgtgcttaagtagcctaataatttcttctgctccctcgatatctccttttcctttcaagaattctaaacacgcaaccaaattatccttgcttggcttctgcctaggttcagcaaccaaaatttcttctttgagtgcttcaactgccttgtcaatttggttatgcataatgtaacctgttgtgaaatgattccaagtttttgcatttggtttctcattcgctgatatgactcgatcaaccaaggttttagcctccactagaagacctttcctgcagtaaccaccaattaaggagtttgggattcgaatgtcatattttgccttcttggattcccattcgtcaaagatcttattggcactttcaatatcatcaagcttcaacagtgaggttatcatgcttaagtatcccttattataaacctcatgctttattttaaaatgttcccatagtcttaatacttcttctttcttccctatggctgcatattgtgtgaggaggcactcaaatgctgaactcagtttcttggcagttaacataagttcctcagattttttcagcattgccaaagatttttccacaagcccagctttaatgtatccatttgctgcgacggaatatattagccagtcaacagtaacttccgaatcagatgacatctttttgagaacattgtcaattcctgtcacattggtatctgctacatatgaactgagccagatgctgtatgtaaatttgttataacggatgccctttttgtccatttctttcatcagggaatcaattttttcacgattctcagtttgataatacaaattaagcaatacattatagggcaatgctgtactggcaaatcccaaacccttcatttgctgcatagttgcctctgcttccaccacctgttttgcataagcatagcagttgagtagagcactataaacctcagcaactttcaattgcattggaatgtcattaaaataattctcagcttcttttatcccatgaactttcgagattaggtccagccgaattgcaacatcagtgtatgtaattggatagtatctattgtcagacatccacatacatacctgccaacaaaataaagaaaccaaaatcactttctcatacatgcttttaaaaataaaaaataagcaacaagaacatctgtttaaataagtcaaaggctgaaatgtctagttccttacgatctagttatgtaaatgtaatcaacagattcaaaatgtacacacccagaacaatatagatgcttaccataaagggcttaaatcattgtacagaataggctacttacaagtcaagttccctttctctttcatatactatggtaatactaccgagaaaattgagtgttagtgttaaaacttttaaccctacaattacagtttacagactcaaaaaaaaagccataaagtttttagtcaccaccaacaagaacaagatttcaaagaacctatttaattaattcaacatgcaatgcaagagattctccaaaacaagaagtagagctatatgtttcattatcagagaaatcacaacagaaagcaaatcccatcaaacttactttctcaaaaatcactctccaagcattacttcagaagagggaacagaaaattattcaaaaacttatctatcgaattacacagaggaaattaaatatgagcagcgtaacaatctcaaacaagtgaaactatatattataatttcgatatctggttcttcagagcctgttgtacttgtatacaagtaaaactttaacataatcttgaaccttaaggaaactaagcgcagagctacaaataccacaatgtaaaaaaatcaagataaaagccaaaacccatcactaatgcattatcataatcactccactttacaagcatatgaagctcaatcgattaattcatcaaagaaaacaagtaaagcatttaactttccggcaattacaaagcaaacaaacacaatacaaaaacaaagaaagagactctaagctggtacctcacctcaagagcgtgattatagcgtttgtaatgcctgagttcgttgatgataccaactaggtcaaacctattgaccttttgaccttcttcgatccactggtcgagaaccggaagaatggaaaccgaatgtagattaggagatattctacggtacagagaacgcattttaccatcgcggaaacgatcgtcaatagttgcagctgtggtggtggcggtagagtagagagaaagagttaaaacgtttcgagttctgaaacgggagtgccatttcagtgcagagttgaggtcagaggcaaagctcttcattggtgactgacgagtgacgacgacggcggaagaagaaagatcatgggccggtgcggacaacagaacaaactcttgccaacaaacgaattaaaaagaataattagcttttttagtccctgtacttatgacactatactattatgccccttaat

SEQ ID NO: 17314 - DNA, 5812 bp, Cannabis sativa
gtgtaaatatattatatgattctttgtgaaagaaaattgaaataaagacattaggcaaacagaatctttacttttcagacaaaaagcaatgatagtattgcaatgttttggaaacttattaattaaaaaaaggagaatatgtttatttggtagagaaatactaaaagaaatgccatatcacttttaggtcatgtttggtttatggtttgagaattgttaaaatgtattatttctgttaagcacttttctcggtgttatatgtaattaagtattggatcttatgtaatttaaacaaatatttttttgaagaatatcgttaactaatcataaggcgttacctacaaaaaatgttgggtactactggtgaccaataacaatgcttttattataatagtaatagaattatgattactattacattgtttggtttgcaatactattacgattcttattaccattcttatctcattatattactattaccactacattccaccaaaccaaaaggtcttatataatttaatttaataattattatataatatcattaatcatttataaaatatcatatcaacactatattagtggtggcttgtaacaatgttttcattttgtatatgtgttttgagtaatgctagacacatctaggtacatgtatataatgtgtgtaatttaagtgtgtcacaattattattcaacagatttaaaaaaataaattagtactttgtgtttttaacattacttatcttgataccatgtattgcaatttacaatttataaaagaaaagaagctaatactttatatttttctcaagcaacactcacaaaagaatcgctaaattgtcattgtaaaactactagctcagactaacatgtaattggcaaactaaataagatttgattttcttaacaagttgttcactcattcgaaaaatatgcttagctaattcatgtgtagctataataaccgtccgacaaatataaattatggacactcttaaaaatgagcattgttattgggcactagtggtgcctagcacccttaagacgtgtcgttttacgattggctatcgatactccctaaaagctattatattaaattatatgagactcaatactaaattatagcgatattgacacgtaggaaggtgcttgacaccactggtaccttttagcatttctccttaaaaatctagataacaagcttgttacaacatctaacaataatccaaagtcatctttatctattgattgacttgtaaaaatatttaatatttccagttcaaactagaacatattgatcaacaaataattatgtataagaaatcgttacatctcattgaaatatattgtttctagtgatccttttttctgaaaagattttaatcattaataacaattaagcataaattacataaaaacataaattaataagtatgaatactaagaaaagaaaaatatgaaaaggtgttaatcccatccaaatgtatgatttctattttcagaatcacaataaaatagagtcaaaacacttatataataaaaaagaaacaaaaattaatggaaattaaaaaaaaaaaagatgaagagaaagaaccataaagcttcaaactttaagcactaatctgaaagaaaactaaccaatttcaggctcagtagctctgcaaatgatgaaatggggttgaatggaaaagagaataagaggaactgtaatgaggaagatgaagctcaagaagcccatttcttaattagtcaagtttaagaaaagagaatagaagagaagtgttagtagtactagtaatatacatatatttatagataactctcttcatccaattcatataataaaaaagagaattgttaaaaagtaccacaggtacttaacaccctcctcgatgtcatgtattattggtgtcaagtattttttttggtatcgtactgttattagtgtaattaagtactgaacctatataactttaaaaaatagcttttagaaaatattgataaccaattgtagggtgtcacctatagaaggtgggcaccactggtgttcaatagcaatatttgtgtaattaagtatcgggtctcatataatttaagaaaatagttttaggaatatcactaacaattgtgaaataccacttatagaaagtgttgagtaccattagtgtcccctaacaactattaataaaaaaaccttggtcatttatttgtgatgtttcgtttaaaaggtttatttctttggctttaattactaaatatgttacttgaggcaacatattaatttattttcctaattaaagacagatataataacatgttcacttaaaattaattgtatggtattaattgttatttatttgtgtgaaaatattattttggataatgtattttgtaaaagatataaattagattatttatttggttaaataagaaattaaaccttgtattttttaaaaatggtataaaatagtatcatgaactaattttttttttatcaaactaagccttaataataagctgatatagatgtattaagataagactagttatattttctgcatctattcatactatattataaaaaatattcgaaaattgaattagggtactattttgtactattttaaaaaaatatattgcctatttttttatttagttgaaatagggtttgatcgataacttttgtaaaatacaaccaaaatggtattaagagtttacaaaatctatatctatatatttgtataaaattaagtcatgaggcgataatatgacagtctaaaattacttcaaatacatttatctcttttcttattaattctctcctttatttaatttttattcaaaaaaaattatattatatatacatatataatatagccgaaagtgtatacttataaataatttttttaatatatatacataattattcattgttgagttttttttatttttttaatatatataaaaatcattaattgattattaattttaggagttattgattttttggttttgaatataaattaaaactattaaaatttaatcgagtatccttaatacacatataagaatgtggtctatttcattatagatatagtttagtaatttcacatatctccttataaagagggagtcccaaattcaaatctcgttactcctccccattataaaaattcctcccaattataaaaaaatgcggaaaaaataatagctttatgtgctttaatcaatctctacgtatactatgaatctttttaagcttcctaaaaattttgtgaataacatccatatgtgtcctcatttctggtagggtaattctgatattcagagaaatatgcattgatgcactgagaacacctttgttggcaaaatgcattgatgtacacgggtcgagttttcgggtttttggatagtcgggttcgggttttcgaacttcgagtgtttaaaatgtgtaaccgaactcgatttttgagcggtcgagtcccacgggtttagagtcgggtatgacgggtttactgcggtcgggttcggattaacacccgatcaatatttacataaaaaaaaattatatagagttgtatacagtttaaaaatttctggacagcactgtaaacgaaaagtaaaataaaaagttgtgtctatttcactctgatatagaaagtacaagtaataacattttgtttttatgaaagtaaaataaaaaaaaataaaaaataaaacaaactaatgaagcttgtttgttaagtaaaacaatttgaataggcatatcaaccacgtggcatgagaagcatgacctactttgtaggtggcagaggtaaagacaacctctctctcacactttcttttcttattttataataaataaaaaatctgtacttttgttttgactttcgtagcagtaaaatttgtgttgtgcctaatttttcgtgtttcgaattaacacctgaaataatatttggcttattttaaaatccgaacccgaaacccgtgtggaatattttcgggttggacccaacccgaccacacgggtttttaatttttcggtttttttcggcaatgggtcggggcgggttgccgggttttcgtgtttgcgggtctaaatgttcagccctatttaaaagggctagatttccctaggaacgagtttggaaagtggtttcttccaaaaaaaaaaaaagttccattatgtaatattttatggaaaaggaattgtttgatgttggattagtttggtgggtggttaatggtgcggatattgctatctataaacaatgttggttgcctaaagttttggtccctatgattaccttgcctcaatctctagagatgaggcaatggttgctagtcttcttgcttcaatgtggggttagggtagagagttggttcaaagtaattttttggtggaggaggtaaactcaattatggcctttatgtggccattgcttcctacccatgacaaattgttgtgaagccatgagaatacgagtttttatttggttaaaagtggttattggcttgctatcaaaaaattgagtttgagtggctcttcgtcttctcaaggtccttcaaaatggtagaaaaatttgtagtcttcatatttctccaaaggtaaaagtttttgcttggaaggcttctttaagttagattcccactatgactaatcttaataagcacagaattgatagttatgacacaatgtcatgcttttggttacgatgatgtttaacttgaatttgattgccaaagggcaagttttttaattcttctttgggtcttatgttacaagacattacttctcaatgtagtagttccataatgcttgtttttaataatatttgcataagaatactaatgttgtagctcacaccttagctaattttggtctgttaaatttggttagttctatatggtggtcgggttaccctctttgtattaagaacttaattttggttgatgcctagttttaatgaatattttccttggtcccttcctttgttttgcacaagaaggtggttctaaggtgtttcttctaaaaaaatggtggcttttatgtggagaatgtgtagcaatctatgttcttcaaaaatagtgtgattcaaaaatggtgggtttcataaaaagaatttacttttctacaaaaagtcccattcggggaggtaatcttggactcaaagcttactccaatggtgtctctgataaaggcaactctagaaatagaatacacaatgaaaaacatgaacttctgaattgagtgctagaaacactgaatcttgaacgacttatctcattagaagatcataaataacgaatgttaggtctctttttgtgttgttttagagtctgttttagtatgtgtttttagtagttttatacattgttcagttatacacttgttttcttcttgtttcaagttttaatgttcaagtacatcatatgagttgaaatgggagaaaacatgctcaataaaagaattttatggatttagcataaattttggagttgtaagatacaatgggtgaaaaattctatgttgtagatgctcaacacactccgtttgtgatcgaaaatcaagtctgaagattaaagccaatttttgattatgattcattcactttcatgaaaaatattgtgaacaaaagttctatatctttcttttagctttctaacacatctaaaatcgtctaattttgagcaatattgagagtgttatgtgttgtagttaagtacgttaaaattaaacttctacttctatttggttgagtaaaaattaagaaaagattaaaattagaaaataaaaatagtgcaagaa

SEQ ID NO: 17315 - DNA, 6616 bp, Cannabis sativa
ttcacatccaattacgtgactttctaaacgcaccctaaacattatttattttaatacaaattattctacaatcaattaataaataaatggattaaatatatgcctataaataaacataaaaaataatatttatattatattgtattattacaatatataattatatatatagataccttgaatacttcatcctttcacgataattttaataataataataaaatattgtcaacttaaaaattaaatttgtggaccagacttgttaatgttattattataccacaacttgaaatatatataataaaatataatgtaaaggagattatgcagttggttttataatataattaattaactaatatataatataactactcatttcttgttaattataatttcttgctaaaagatgtttttggaaaaaattgtgataaaaaatatgtttggtaagcagttaaaaaataattttttgaaatttttttgaagaagctacagttaaaagctaaagctgctccaacccaacttttagaataagctgttttgattaaaaggctataataatttttttttttactaaaatcatatttacttatttattatatattaaaaaaatttaaaagatgaaataaataattattaaatctcttattttttttaaaaaataatttatattttattttatattaacaagcaacatcaacctagaatttttcttatacatttgagtttttaatattttttacatttgataaaacataataaaaagtactataatttatttttattaaatgccctataaatttatatttgaaaaaaaattaaaaatatatagaaaataaaatattatataaaataaaattttatatttattataataaactagattataacattatcattattattataatagattttaacaacttacagtactttgaaatttataatttaccaaacaattagcttaatttttttttcatagttttgctacaactatttttttccacagcacagttgtgccaaactggccctgagtacgaccacacatatataataatttatatttcaactttcatcaataatttatttacttttcatttgattccacaattactgatgttactattttatatatatatataaattcaaggaaggagattcgaacttatgatctcttttttgtgtcgattaataaattactttgcaatcatgtaaaaataagctaaaaaaaattagtaagtccataacaattgaaccaagtaatataaaaatgatgacaattgtgagaaagtaattttttaaaattaaacaaataattaaaaataaaatgtgatgaaaaagtgaaaaaagaaaaagaaaagtatactcattatgtatattttatatttcatcaaaatatatttggtattgtatgctttcattaatatctatatggtgtcatacattttaaaattgcacattaataaaattttatcatataatcaaactattttcaattatataaaatcagaatttattatttataatttgatatattacatataaatgagaaaagtatggtcaaattgcttaaatttgagtttaaataaaaaggcaaatgatcaaatatggtaacaattaaaattaagtaatgaaaagctttaacaattaaacgaaagacatattttttcgtgttgggtcgtattcgtatcgtgtcaaaaagtgtcaaaaagcctgacctatatttataacactagctgaagccacttattacaatacagtagtccattttatgtaaatttttaaatttacacctttcaaaaaaaattctcaaactttaaatctacacccaatatcatgaagattttcttggtccaccactacccacacaaacatccattttaataaattaactctttaacctttccctttcaatcacattgtattgtagtagctttttgttaggtttccaatttatagtgcatatgttttgggttttgttatggttatgtatttatgatgtttttgtatataattattatatagttattaatggtaggtgagcttgcatttatttaattgataatttgtttgtttatttagttattataaatgttttccatagatttatgatagctatttgattaatgataaaaaataatggcatatctatactaagccaaataaattttaaatgaaaactcctttttattttaaaaataccattcatttttgtgttgataaaaattggttcaaagctttgaaaatgcactctcacttcacttgtattgtatctagtcatgactcatgtcgatttgtctagcacaatttggtcattcttattatgacattcattcgattataataagcactaagtcacttataatgaatgaataattaaagtccaagaaaagaaattgatttgagatttcttaaagtacaagttttatgggtcccaatataaataattatgtgaatctcatataaacagaaaacaacacccataagcaacacccataagcaaaataaggtgtataaacagaaaacaaatggatctgtatgataattttgaaaaatattataaaaatatttgtaaatattttgggttttttattttataaaaaagttatcaaatagatcttctgttttattaaatgacaaattggactatatgttatctaaaatggtacaaaataatattttaagcttaattttcatcaattttttttttaacataatcaaccaaagccagtttgtagtacaaacaaatgcagtcataaacacctccaaaatagatttttattaaattttattaccatgaaaattgagctcagtattttattttttattattttaaaaaatataaaatctaattcgtcatttaataaaataaataatctaataaaaattacaatatcttaaataatatttactatttttttttttttgctctgaacaagtagattctaagctcagacctagtctattttaactcaaagtcgaccatgcaatcaattatgactttagacataggtaggctatgtttgtgtctaggatcccaacttaatgaggccactaattttgataaatactacatacaaaaaataaaacccaacatactattttacatacaaaaattagaaagataaaaaatttaatcatttaaacaactgagaataaatccttccacctaaaaagagaaaaaaaaaatacttcactaggcaaatgtatcaccattctattaaaaaattaatccaacattgtacttcttttgtctaaactattttcccaactttgacactttgattggaataacatgaatattgtaatggtatgcttcttttgctattgtttcctattgactcaaaatgaaaaaaaaaatgacaaaaatgatttaaatattttctactagagaaaaatctacaacaatacaagtagaatgaaacaaatccaatttttctatatacaaaaaccaaagacttcttcttcttattcttctctaccctgcagccaaaagccaaagcatgattagagaagaggtagctatggtgatccaacttagataggctaaaccaactgacatttggtacttttggcattcatttccaaaattacatcttcccaaatcactaaagtacaatacacttatgccggccgacgaagaagcagctgcaagagacagtgttgctgtaacctgttgtacatttcattcattgttttaatgttaacaaaggttgaaaacaaatcacaaatacatttttttgagtaaagtttgtgactttttaagtgttcattacctaatctcaaaagggtagagactagtttttcgaaatgaagggaaaaatttaaggatagtgaatagagtctaatccaataatgacaacatttgtttttttggactaaagattgtgactttttaagtgtttattagctaatctcaaaagggtaaagactagttttttgaaatgaataaaagaaaggatagagaatatagagttctaacccaatctccaactacaaagaggctaaccaaaacagggttatgaaaggccttctttctcactaaggcatatgcatctaataaagcaagaacaaaactccatatcacttgaagacccattgaagcaatgagatagctgaaaaaatgaaacaaaaacaagatgagtcaatgtcaacaatggttttcagtttgacatggtctaacactctaacatgagaaacattatgttgttaacactacgatctgtatcttaatatcaattgtagattagacttagagagcttcaagaaaaaggatagctaatcgcgcccctaatacctaatcaccgagagtaattaaacaaaacaaaagaacaaccgatcgcacacaaagtttatagtggttcagctgtccaaattgcaatccttggttagacagctatgtttcaaaaccgatttttagatcatatcgtgattttaagaccatgttcatcaagattagatttttattttagctttactcgaaattattcatttaccattattccatggaaccatgttttgggatccaaaacaaggaataaagagaaaacagaaaagataagaagccaaacaactagttgtggtctggtcctcataatcacagagtggtttatatcaacatgagaatatccctaattcaatctatatcacaaacatgttaattttaccaatatataccacattggaacaagttacaagcatctttctagttttattcttatactttccaacaactagggctactactagccattcttggctgaaaagaactaataatgctaacaataaaagtaccaaatcgtgtcccccgaactttcttctagtaacattcaacgactttgaaagctcggtgacaaaaatcctaattagctaactaataagacataagtgaaatgcaatgaacctgaagccaaatcaagtaaacaataatttgattctctttacaaaaatcccaagtcatgttttttttgaggtgataggtaataaaactcaactaaaatatgatctttacaccaatctaagaacaattagagaatattattatgtactgcaactacaaaattagctcatatgatctaatcaaactttcccaacattttattataccagagtatatttcaaaccccaaaaccaatcaaatctagcaataaaaatatgatctttaaaaatataaaagaagaaaggaaagtattaaagtcataccagaaagcagtgaaattgaaaaagcttgaagtagtagccatggaagcaattgacccagctgcaaaaacacattgtgaaatcctaagaagaagcccagtcaaagtccctggtgtaccaggaaaatccttcattttttttttgttaagggttttcaaataaaaatgaggaagtttcagttttagattcttaatgggtctaataaagttcccatctttacaagcaaaaatgataaaaagagtgagaaaataaaccaaatcatgaagataaaaaacacccaattcccactttttgcttttatttaagaattattattaattaatgaattattaaaataaataattaattaaataattaaaatgaagaagaagaacagggaaagctcagatttttattttaaatcagaaaataaaaaattgaagtgagatttagaaagtggatagcttgaaatttgtgttagaaaagctcagattacaataaagaaagagagagagagagagaaaatagaagaaatattaatattaataataataataataattaagaacaaaacaaagacagctaaactgacatttagtgttctaatcaaagtcattaaccaacacagttatcaacttggcaggtttttaacaaacattatagaaatagaaatactcacgcgccttttagtggcgcgtaaatggcactcctataatttacaaaagtttctcttagtgttcgcggtgcgggtggtgtagttttttactattttctcaaattaatctgcacatgtggtttatctaattttccaaattgcacttgcactgcgaaactaaaaactgtactgcataaaatagtgtgatgcagtacgttcttttgcggtttttatggtttggactatcactaataattaaactatcacaaatacaacaaagtttgagcaacacttgtcaaaaataccataaggcttaaaaataaatatgaaaaaaaattcaagtttcagtaatataataattagtgggctttaggtttaaatcgtattaacaattcaaaactgcaaatgcattttatcacgcagtttaggaaacattcaaactgtaactacactataaaaaatttcaatctctattttttttttacaatacgagcaatttgagcgatttaatgaacactcctaaaattgtctgatgctatgatttattggcacgtgaggtagtgagagtgggtttggtaaaggtctttatcaactaagaaacgagaatctgaatgtgatgctttgttttgaagaaataaataattaattcaaaactttcctttattgttaacgaaaacaataataattaaaattatgtcatttatgttaaaaaaaaattatgtcagttttttgtgcacgcttttttttttttttttttttttttttttcattttttcttttttt

SEQ ID NO: 17316 - DNA, 2918 bp, Cannabis sativa
acaatccttgtcattgctctgttctccggttccagctctgcaactcgtccggggaaaacattcacggtgggaagagagggttcgacagaatccggcatcgactgcaacatgctccgaccgaagaacatgacagcttttcggtttcgagggcagacattcaatttcttccccaaaggagctccgattcctccctcgggtccctccaagaggcataactctgtacctgagaattgagtaggccaacacttctctggttatttagatctttatttatatcatttttttgtttttttgttttttttatttgatagatttgtattgggtatacaattgatcattacagagttaatttagttcttgggattttgtataaagccattgatgaggatcatatcataaaaaaaaaagatgatccttttctccttttgggctttgtaatttttggctatatactgtatagaaactatagtcttttcttttgttattattattattattaacatgtttgtattcaattcaatatgaactaaaagtatagaaactatagtcttttctttcgttattattattattaacatgtttgtattcaattcaatatgaactaaacgtatagaaactgttattatcatacatataacgctttatagaaaatatcaaatccaatattttgttgttaatttgttgttcttttcgtaaatctaccttttcattcttcttttttttctgggctgatatcattttctagagcagttaattttggtgtcactctctcaaatattgacttggtgtgaaaaaccgaccttcttaatttttcttttttttctttttcttttatgtttaaaataaataatattaaatatacaaactaaagagtcaacaaatggtagcaaaaaataacatcagttgggctcaattgtatagagcaatagagaattaggtgatttggcccactgtttatgggtcttctcttccccaatagagaaccaaccaatcgaatttttcgatctaaaccaaatatgactttttattgttttcatcaatggatggggtttggttaaatgactttgaaaggcctaattaaagcgaatgagaccagttcataaaggatcttaatgtttgattgtatattaggctaacctgcctaataaaaattattattattttgaaaaaacaaaatactacatatttacaacttcaaaaaaattattaggagaataaaatatagaattttgaagctgccacaagacttgaaaatttataaataagtccaaatttggtcataaatgtcaaactatatcattcaaaatattgtcatctgtttccagctccgttatcagttatctccattccctttttattttattaatatttcatttatcaaaggttttatttgtcacctctcaccattattaaaaatggagcaggtaaaccaaaataataataattgtgtgtagagaccaataacaacaacaacaagaagaaagaaaacagcaagagaaattatatttatatatatatatatatattagataataatagcatgctttgcatatttgattagagttattatgtaattagtaattacaataataatagtaaacttcgtataattaattaattaaataaataattcaaattaaaattgatgtaagaaaaataattattaaatacttttaaatttagatacataaaattattttttaaaaaaactaataaattaattaatttaacagtattaattttaactcttaactttaacgaaaataaaaatcggaattatatatatactgctatatgcatgaaaacgaaatttataattttactgaggcttcaaatggattatgtcatgtgagatcatataattgttatgacattgattcaatgaattatacactgtcaaatcaaaaagaagaaaagttcaaagaagtctcataactttgggcaagattttaaactaaaattagaaaaaaaggagtggcttcctataagaacactgtaaagcctttgagtgttttaagcctacactctttttggtgtgcttatcaaatcgataattgtcaatatacttttatatatattatactagattgtagttacgtataattgcacataatacttaattatatgcttaattttttttaattatattaaatttaaattattatagaatttgatatatgattgaattaaatatacaaaaaagtaatatttaatataaaacattaaacaaaaaattgccactaacttttccttaatatataagagaattcagtttaatatgagaatccaaaaatgtcactaacaatcacataatatcaatgacattaatacacaaatcattttctgaattttcgaatataaaatctaacttcaaattcaaatagataaaaaagaaagaaaaaatgtatgcatataactatctgatatgagggaattgtcaaaagatttccctattatatctttgtattaattatgcctaacacttggtattcctctaattcagcctagggatcaatcatattaaagaaaataatcattagaacatactcaaaaaaaaaaaaaaattataagacaacactacaaatatataaatgaaatcacatattcagaccatatcaaaattggtaaaaacccaaatcatgaatgaaagtcaagcaagtactctttcaatcataaactacatataaaaactgaaagaaataaagaaggaatttaaaaatcaaatgaaagacgcattgctcgtctcatcaaaatcaaatcggattccacctctaactggttttggaagtttaaattaagattgcctagctataatagttgaaatcaataatttgctcattcaaattctaaaaacattggtattgaaggattcaaattttaaaatacagataaatttttcattggtattaataagttca

SEQ ID NO: 17317 - DNA, 3038 bp, Cannabis sativa
  modified_base (2535)..(2543): a, c, t, g, unknown or other
ttttttacatggtttttttagaaacaaaaacaagcatctagtgggaaaaaaggtaagagttcgcctaaagttgaagaagaagagattgatgataaggctgaatcttcagatgcacagcatgattctcatgaagaagatgatggagatgatgcaatgcacgaggcaagcaatcatgaggaaaaatctggtgatgaggaagataaaccgaaggagcagttgtcaagtcccaaaaaatcttcaaaaaaggtgaaggagggctcaaaagataaaagtggggacaaagctacacctgttaaaaagagcccacctgtaaaatctgctaagaaatcagcagactctacaaagaaatctagatcttcctcgaagaaaagtgtgagtgatgctgatgagacctctggttctctaaccaagtcaaaggggtctgcatctaagaaacagaaggttgaaaaggaaagttcgaagggtgataaggtgaaaagtgcaagcaagaaatcatctagcaaatcctctggaaaggtttcagctaaggatcaaggtactttgcatatcattattaccatactttaaaatacctctgcaattagtcttaattcttatgtgtcttggttgattagatgttcacaatgttgggatgtagcctcattgcttgttcttttgatttattggttttgtttgtagtgtttgattttgatgttgagtaataagtattgctgctaagcattatattcacatattgctaatctggttatgtttataggattgtgcataagttaaaattgtacatttctcctaatgcatttacatttatgtctgaactaggaaaagttaaaagtagcaagaaggccaaaggagagccctctaaagcagatgtgcatgcagtaattgttgatattctgaaagaagttgatttcaatactgtaagtaatttttgtggaattactgacattatatggcttggtttatattttcacggccactattaattttcaatttgtttttttgtattctaaactgatgcaggctactctatcagatattctaaggcaactcggtaagagtcatctttacttgtttcaacaacgtatatgatttactgtatctttagctcactttacacatgtaatgtttgttaggtacccactttggtgtggatttaatgcatagaaaagcagaggtgaaggacataattaccgatgtgataaatagcatgactgatgaggaagatgatgagggggatgatggagaagaagacaatgctgaagctggtaatgacgacgatggagaagagaaagatggagacaagggtgacgatgacgaagacgaagcttagtgttagtgcatccaggacccaaacaatttgtatatttggaactcccatgtgcatgtggtggtacattcattcaagtagtaggacaactttctacagaggttacatcagtggattttgatggtagactacattggttagttgaatcttgtgaccctttccagataaatttacccaactgggtatgtttgtaccatattattgacctccccctgtagtattgagctgatcttaatttacttagctttacctttttatatatatttttgaagctttccttgtcctataaatttatttaggtgtagctgtttaacttcaactcttctttcaatgagcagtgagctatcttttgtttccttctgtttatgagtacattttattataactggtttaggcctatgttgttatatccatttatatttgggttgtatttatcaagaagagttttgtgatatctgcattattctgaggaaataatactgcccattttatctacctttactctactatttttcaattcaataaataggatttttccaatcatcactattatttttgtattgtggggctagtacgagttctcaaatatcattaggtttgatataagttcattggccatgttaatgtacatttaccattacccaaaatctctaggggtaattgttatatgagttgggtttgggaggagtagaatatagtgggtgttatgttaagtgaatgtgaagctaaatgttaaaaaggtttaagattattagttattatcaaataaaattaaagagtgggaagctaataaaatttgatttattagacatttgttgaatttgatattctggttgccaccaaaacgctccttattaactcgaacaaaattgttattaaattgttacggctatgtgtacatgatttttttgtgttttttaatataatttttcgatgtttattgatgtgcatttcaaaacctttatgaaaaatttaattgggtaaatactattttggacccttattacaaaagttattaattgaaccatctatttttgttaaataacaaaatagattctgtattttccaaaatggtgaaaatagaatcctaagcttaatttttgataacttttttttttaatataaccagcttgaaggcaattcttaacacaaactcatactgaaaatataaacagttttgtcataacacctttagatcggattattannnnnnnnnattttgacaaaaaatcagttcaaagtcttatttgtaccattttgaaaaaaacagaatctattttgtcatttaacaaaataaagagtctaattgataacttttgcaaaacatagagtacaaaatagtatttacccaatttaatttgatacatttgtgatagtgttttaaattttaaaacacttgcaagaagttgtttcaactctattttcgtagttgtaaacacttacaagaatctatttaaattatacttttaccgctgtaaattatttaaaaaaaattaaaactgtaaataaaaaaaaaataagaaaaaagaaaatagattttgcaagcttacttaggtattgagcatttttcgaactaaattttgggcataatttgattgttgaatttttttttttaaaaaaactaaattggtaaattttaacttatatagaagagaaaattaaaaattttataagtttttatattttttgtgcaaaaatatatatatatttt

SEQ ID NO: 17318 - DNA, 3607 bp, Cannabis sativa
caaaaagtaaaggactttacctggaatgccaccgacggagatatagcctgagctttcggcgccagtggaggctgaagctgttgtttggggaggttgaggttagctttggagtttcacaactccggcatcgcaatcgctgtcaacgaagaagaaacaccgaaggaagggagtcttcattgcacccctaggttcgatatgagatttctttttacctttttttgtaagtaaatttacacccattctagaccatacaactgtataaaaaaacaaaaaaactctacattttcaccctcagttgttattttcgtaaatattgaatctaagaatgaacctacactttcccatgccatacttgtctaaattcaaaaataaatttgtttcgattttgagttactactgatgtagtgaacgatcctttcaattcacctgtgaagatttacatagccacctataaagatttggtgttggcattcatcactttgtcaacaactgcactattgaatatcctgcaaataaatagcccatgcatattaagaccagccaaaatggaaaaagacatgaattattcaaatgctatataacattataactcttgttggttttcccttacatgcatgcaagtaaagatgttagctttgaccaaggattacccaaacctctttatcatcatcttcgcaatacatattgaaattaatgacactattcatcatcttcccaaatattgaatctaagaatgaacctatacttcctcatacttgtctaaattcaaaaataaactcaatgtttgatggttatggtactttctcttataagcaatcgtttttgaagatgcaaccgccaagtcaaatcttctaactgcttctcgagtttatgcttttaccatccgaaaattgaaaagtgtcataaccatcaaacattgatcacaagagcttatgcttttacttgcccactttcttttaagataaatcctgagattttgatgaaatgtgttaataaagttgaaacactcttatctaattaaaccttacatacaagtcatatgttataacttataacaattgatgggaaatgaagccaattcagccactccaaagctccattcagctcaagtcaagcatagtaatataactctagattgaataggacacatgtgatgttaatttactcccgcaatcctaattaaaaataacataatgatctttattcaaactctcacttcatgttacaaagtgcccaaacttttgcactagtctttttttatgaagagaaaggaatgggaagaaggtctatcagtgtggctacctcttaaggtgtttggcataatgaaattggtggatttcaatatcaggtcccacacattttgttttaataaataatatgaaaaatcgctaactaataataggatgtcaagttagtgtagtattaagcaccttaaggtaccaaataactagtctttttttatgaaagagaaaaagaatgggaagaaggactagctacccttcctacccataaccagaaatgttaaggggcatcttaaggtgccaaaccacaatatgtggcataacgttattggtggatttcaatatcgagtcccacatattttgttttaataaataatatgaaaaaccgctaactaatagtaggatatcaagtcggtgtagtattgaacacttaaaaatgccaaataacaaaactcatttaagaatgttcaacaaaaccttataggcaggggcaacgagtagcaggacggagatgacggggggccggggccgctaggttcccactactctaagtctttctttgggcaatagattgtcatgtttttgttttgttaggtgagttttgttttcttgttgaattcactaaaaggagtgaaataagattccttaccttatcaaaactcataaacttaaataaagatctacttctccaaacaaatctctgagcaaatatcttattcagttcatgaaatctacagtcaaactctttgccaacacgctcaagccaaccatactattatagcttatagaccaatatcataatagatctctctctcactcacgtgcagaacagagtgaaacaccaataacaaaagcattactgaaatgtttatcttaataattctaacaaaatcaacttagaataaaaaccacctatctcattctatctcacaaactgattataacaattaacaagcacaaaagataggtaaattggtagttatactaactcgtaccctgaacttttcatgccgttaaaaaaatttctcgaactattgagatcattaggttcaaagactttcgtacgcttcacgtgaggattgttcatgtaccgaattgtaccgccccgacttccatccacgtcaggtgcctgttattaaaactgaacgaaaataatctcaataattctggagaaattttgaacggtataaaaagttcgggaacactatttaatacctaacctgtatactatcaatatagggagtatttcattcacacatgtattggagacaaaaaattcaattcataaacaaattaaaaccattatttcaaggctttgatattgtctaagtcaaatcaatttttacttttatacattttgaggaaaaaaacaaataattcaacaaaagaaaaaactgataagtaaacttatctcagacaagggtagggttctcctaaaggtagaagacaagtttggtttctttatataaatatatatatataaaaaaggacaatagaaaatctaccaaatttttatagttgaaagattatgaaatgactaatcaaaaaaacacaaaagcagagtttggagtacaattgtgtcaccataaaacttgttaccattttttgaggactgactcactcattacttggtacaacagagaatgtactactggtttcagattttggaaattattttgtgtaatttatgataagaaagtttgaatcttttttctagggttttcttagcaggcaaacataaagttgtaatgtcatggatgttggtttaaacaaatgaaattagggtttagggtaagagaaagagattgagaaagtaatgtacctgagctgagtatgaggttttggtgatgagtaggattagcgtttagggtttagccatggcttcttcttctgcttcagtaacagctctgtaatgcacagtgacaaaagcattttccttcctataaatttgcagaactcaaagggtaaatacttgtttggctatattttcaatttttagtttttaaaattgtgtttttaaaagtgagaataaaaaacagttttttgtcattttaaaaatttaatggtgtttgacacaaatttttaaaaactatttttagatttttttcttaagaaaaaataatcaatattttaacaacataccatgacattaacccattcgggtctaaattcgggtattatttcaggtctaggatccgattatgtgagcaaaatataaaatataatatgttagacaaaaaaaaattgtttttgaaaattgaaaacaacattttgatgttttctgttttctactcaatttttaaaaaactgtttttaaaatttttttccaaacaacccctataaatttttaaaaactgttttcagtt

SEQ ID NO: 17319 - DNA, 1594 bp, Cannabis sativa
  modified_base (1025)..(1028): a, c, t, g, unknown or other
aaatttattgatcttgttacctatctccaagtcactatcagaatccacaatctcaaaattgatcaaccttggtatgttgatgtacttctttttctttgtagtaatgtgataaaaaattgtgatatatcatgccttctccttaattcttccaagaatgcatgttaaactagtaaatatttgtttaactaatttgatttgtttggtctattagaaaattgttactcctcagtattcttgtttcagtctttcttttttgccctctattttctgtagaaatcatggccagtgaaggagattacaaagaaccagtaaatgaacaagcagtagccaacatgtatgcttctctgaggtctgaactgaaccaaatctactcaaaaatcactgaactggagatggaagtaagtgaacactcactagtgatgaatgcaattcagcctctagacccatctaggcggtgctatcgcatgattggaggtgtcctggtggagagaaccattaaagaggttttgcctgcagtgcagcgcaacaaagagggccttgaggaggttattgccaggttgaacgaagctttggaaaggaagaaaagggaaatctctgacctcgaggccaaatacaaaattaggatacaaaagccagatggcaacgaggcaaaggacgaaagtggtcggaaggaaggttctgctcagggagtgcttgtgggtcctgctggtgctagtgaatgattttgttggtagtgttgcatcttacctgattttgtttatttggtcaacttagttgaactgttatttagcatatgttgccatgtagtaggcgttatgagagttttgggtatttgattgtgtgaaagatacacttgtttaggttcttgagaccttttacatgcaaagcagtggaatgaacaaaagtggtctatgaatgttgtatccccaattatctttgtttgctaatctatacttctccatgtatggttcataggacatgtcttctcttctctctcacacatgtttatttatatatatatatannnntatatatatatatatgataaattatgcgcttgtgtatgggctggggtgaaaagtgacggattcaatctgtatctgcctatacatatgtgtataccatataggtatggtacgggatgagctttagaaggttgttagcggtcctgtggtgccggtttagaagaagctttggcagttgaagatccctctgaaagttaaaaatctggtctaacgggctgcagcaggctgcttaccactaaccaccaactttgcttgaagcatgttgatcttcttgtggtgtgtcttcagtggggtcgaaatcatgattaatgttgatttcttgtttgttggcgagggggtgctgggatagattaggactgcttcatttggtgggtgtctagtctagctttacggagtggctttcgagtgcttgtgatgttttggataaagtgcagcgtgctaagttggcgatggtgtgttgggtgatttggacggcaaggaacgattgtgttgatcaatgtgtgctcaagacagtaaaatggattcgtgggtgagttttatgactcatgaaaactaagtagagtactgga

SEQ ID NO: 17320 - DNA, 6545 bp, Cannabis sativa
attttaatatgctttccccttttggttctattgtggcagattgtaggtttttttttttcaaagttttacctcaagtttcatgtatttttgtcaaacgatctgcaaacaagacgaccaattattttgctcgttctacttttttttttctctaagtcgtaattatagtgggaggcttgtcgttactgatttgaaagctattcttttagctgatttgcagtattaaagtttacaatttttttttttaaaaaaaaagagttgtaaatgtattaaacttgtcaaaaataagttaatttgaccaaaattaaacttatctttttcattaatatcatttataaatagatcatatttgagttttaattttaatgagtgacgttttagtttaatatttagttgtaataagagacttttaatttattttattttatatatatttgtacggaaaacaacttaaaaataacatagtgtaaatctagcaacaagtaaaaccaagagtaattagtacaaaattctccaaactttcatttgcttaacaataaaccttccattctttatttttggtggcaaaacctagcaatctcaagtttgtgctgtccatataaaaaaacaaacagtaaattcgtaaaaatgtaaaaaaaatttgccatttttgtataaatatatatatttttattattttgaactatatgagcccaaaagattgatttaatgaagcgaatggggaacaaaataggcccaatacaaaaggaattgccactccggtaactctcaccatttccgttgatacccaaagtggaaaacacgagatacactcagaagcgatgcagcaacctcaggcgacggcgactggagccacggcggccactcaggctcactccacggaggctcctcctaagcaggtggcgctggcaatggatcgtttgtctcacgcggctcggctcatagccgacattcggctcggcgctgatcgcctccttgaagctctcttcgtcgctgcgcagcctcaccaaagcaataaacctgtgcacttcttccagaacgaagatgattctatgcgtcaacatttccaggatcttcgctctgttggtacgaacacaaagctctttactgcctcttctagggcttggttattttattcagtttagctgtaagcatatcaagaaatattaccccgttcatgatattctaattctttttattagggtttttagttctataattcagtatggtttaagcaattgaaagaaatagtttctgaactttgaattcttttgccttggaattttcatcaggaaagctgctagaagagtctggggttcttagcgaatcgcttcggtcgcgaagtaattcatgggggctgcacatgcccttggtttgcccagacggtgcagtggttgcttacgcctggaaacgtcaactcgccggtcaggctggcgcttctgccgttgatcgaaccaggttggtgcatatctcatgaatattatctttgttgggttcaggtactccatattagcttgtaatttacttcgtcattgagtttttgattagcgggaatttctaatttattgtgggtaattaggagccagagttctcagaaccatcagataataatgaaaaacaactttaggttttgaaagacccaggtttagaatgaattatgctttgagtgagattcttaacaagtttacgatgaatagcataatgctactttaattgtattgtagcatgtcgtttgttagcatagttgaatctgtgagttttgatgaaatcctggcagttgaattcaatccaacaaagcccctaattggtgttataaagcctccttttttaatctggccaaagctcttagtttgatcaggggttgtaaggccgtgtgggttggtaggaattctaatgttcaagcacatatgcttgcggcttgggaattttcaaactgtatttttggtttcttaagtagagaggagatggaacttcttgtttccatcacaaactttgttgcttgagctgtggctttaataaaggtttcatttaaacaaaataagagaatgccttaatttttgtggtttagcaaattttcaatgaatgttcgactctacaccagatttagagttctgagaaagcagaaaatgtaggtctaagttttgcaggacttgaatgaagttttgaaagacttgggttagagtgaactatgcctcaagtaggatcgtaggaacaagtttacgtgatgaataattagtatgctactaggtgtggtacatatgttggcttccactgtgttttgtctaccgaaaccatttctcttattattattgaccaaaaaaatattgttgtctgttttgtgtaggttggctcttaaggccttcactgatcagaagaggcgatttttccctcaccttgatgatgagggtcaaaatggtcaggatactgaaccgaatccaaagaaacatcgtggtccacaagtagttccacctattcatcaggaagagcttagtgattgtaaaacactatcagacattctgactcgtttggaaaaagaagtgccgaatttaaaaattctaacctatgaacgaatggactggttgaaaagagcttcttccctgccaaatgagggtcccatagaaaaactgaaggaacacaattttcatagttcaaatagattaaaaccaggtcctctgagtgatgttgatgtagataaggttgctgtaattgaattgtcatttccttctgtcttcagagctgtagtatctttgcatcctgctggttctatcgatccagatgcagtagctttcttttctccagatgaggtatatcaagatgaatttttgttgcctggtttcaatcttattgtgtctcacttatattttactactagaaaactgactcatatgatgtcttgtccactcaaatgtcggctcaaaatccattatacaattggccgatgtctcaaactcagtatgagacgtcggttcagttgctctgcagataaccaataaaatggatacttggatagttaggtttctcataataatccaatgtggtattcttttcccctagttgagcaattcttgttttgattgaagttaattgctctttgttggtgaaaatatgaggtggaattttaggtgtgtttctgttcttttctttcttccatagatgcactaaatatctattaagttttaattattatgtgggaaagtgttcgttttgtgattcacgtcagtccattagaattaagatagagtgtttataagccaaaatcataatactaatctttaatagtgctgagtttttataagctttccccgatcagtgcaatgtttttccttaggttggttcattgtatttatgtgcctaaaattacgtactacatttatgtgccgtattgactagagaaagagaactgagtcttagtatggactacatttatgtttgacttttagtatatatttaaggataatctttgcttttctcttctctctttaaaaaaaatatgtcttcatgagcttttccgctgctgatgtgagtcccgtagataccccttttgctcttaattgctgcacttttaccttatttcattttaacagggaggcagctatatgcatgcaagaggtgtttcagtttatcatgtatttagacatataacggtaatgttcctttatcctttatttgttatttatttttaactaaagacaattggagccctctaaatgttgaatcatttttttaatgcaggagcatgctgcgatggctttgcagtattttcttggagttgaagctgaaacagctctatattcccttttggtatcatctttgtctaaatggggtgttaatgtctatttctctccttgacatatgatttcctttataattttttgttgttttttgtttcaccagcattggatatgcagctaccaaaatctattctcaaaagtttgcaggtgccacatctcattaaatcttttgaaattctgtgttagttaaactttggagttacttattatttgtcattggtacagtaagtgtgggcgattgctttctatggatcggcaatcagctttattgctacctgctatttaccacccttaccagcaacagttcttccatttaaaactttcatctacccaacctaattcctcggtgaaggatcaaatctcaaatcttgatcgggtttatcacattgggtgcttttcagaggatacttaatttgtatattttgctaggtaagctcctttatcttgtagctaactaattagatagatctgattaaatttccttaaagcttcgaatatcaattttgttaacatgctgatgtaatctgattaaatgttttgattgcttcattaatatcgatttggttaacagctgatgtatttgttgtctccatttttttcacttttttctagtctatcacagtttccagatagatagcatttaggtggcatttggttcggtgtaataaaattgcaatagtaatattgctgataattggttgtaataggaatagtattaataggaatgatattatgatgtttggttcattttttgataggtaataggaatgaggggagtattgacataaatatctacactttaaatatgtgtttggaagtagttgtgtaattactaagtagtataattactagggtggtaattacatagtctagtaattacactatattttaaaatacaagatttatttggatataaggtggtaattacatatgaattcctaatattttgtttgacaaaatagttaataattacacggaaaaattatatattttagtaattaatgtttaaaatgggggccatgagaattggagagtgtaattggaaccttttaaatacctccaattacataattacagtgtaattatttgccaaattgtgtaattacttccaattacacaaattcaattacaccgtgactttctaaacgtactataaatttttgtttggtaatggaagggtgtaagggtaaatttatttttatataaatgatgctatggtgattgtataaggtgtaatagtgactacattgtaaaaccaaaccaaacaaagtaagtgtaatggtgattccattgtttggcctttccaaaggcccaccatttcttgtggtagttattcattaaagtctagagccttagtaaaaaaacggctcctcttgggttttcattatttcttcatttgttcgtagtcatatatataataaatgctagaatgtctgttttaatttccaggtattatttgctggctgattctcggccatatgaccatgccactgcgaattgcatgtgtggtgttgcgaatagccttggccttattataattatttgctttgtccataattctcagttagttttcctttttactccatacacattgataatacaatcttttgacattgaggcctcattttgatagtggcattggattggattatttttataatgtaactttgttatcaaattagagagacgctgcaaagattaaatccccttagttagggataacttaatccaattttcttggtaagagaataggataactttaatatttgggataaatttatccaattcaatccccaattccatgtatttccttggtattttcttttttgcaaagtcaattccatgtatttccttggtaaagaaaaaagaattgatactttgcattcaacccaacctattttcttttaattttggtaaaatatcagctcatcaacttttctacatttttttttcttttttcttttttcttttgtaattcctgagagattaagcccataattttaggtttaaccttttttcatttaggcatcaattctccattatctgtgcattagctgtgtggatcttttaaatctgagaatagtagtaaacaattacttttaacttcggcctctaattaaagcttttttagtccaaggcaaagcaaagcaagtgaaaaagaacctttactaaacttagtgccatttcttcttttaagttaattttaaatatcaaagtggaaatgcttctggttagttaactaaccatctttttaaaaggcagctttaatagtatagtaatcactaatcaatgagtttaattacttttaccaagccttaaccttattatccggaaatagaatcgtaacaacaatttttatatctgatttttccaaaagatatgaaatgaattatgaaccctcaaatcttaaatcctaaaaagtaaatggcttaaaatattcgttaatatttcttaattttttatttgcaacttagattttactatgaaattttaagggaaaaaacactatgatttacgaatattctcttaaaattctttagaaatgttgttcgtgttgtaaaataatataaaataaagaaaaaattaagaagggagaaatagagaatgagtaagatttttttagttgtttattttaatggggtgaatttttatttatacaagaataagactaaaagaatagaaaaataaatcaatataataaatgaaattacaatcaaacataaataatgatttttttttttgggtaactaattgatt

SEQ ID NO: 17321 - DNA, 2712 bp, Cannabis sativa
ttcagatctaggtccgggtcccaagttcgggttcgggtcggagattggtgttgacccgaaatcctttgtaaatattataatacaagctaatacatactatttgttatgtattaaataatacaacatacactatattaaaaaatttagtctaaataattaatacaataaattaattaataggataatattgtggtatatataggttgtataacattacttttttttttcaatgaagaaaaaaaaataataatgttataatatcatttaaaaataataataaaaaatattgccttaaaaaaataaaaaatattaattgttttcaaaattcttttattattttatataattatttgacatgtaaacttaatggatatttcttctttttttttatgtatatttctttttaaacaaaattatatattttaaagaataaaatatccaaaatataattggagcatttaattaaaaaaaaagtatggaaaagagaaaaaaaacaaaggacaatttaatagcatgtttattaataaacaataagaatcaatgataaggaggtcaatcccttatatacaaaagaaagagagaacttctctcatcactaatcttcttataggaatatcattaagggtaatagattttatttatttttattttattttttatattaaatttataatgacaattttatcttttaaaatatatattacaaaataactactatataatatagtttaacgcaaaagattaatttagttaatttaagcattccgattacgtttcttaataaagtaaacaagataaattactatcattctatttccaaacaattagtaactaacatatattacaaattaattctgattattttttatttattttattatatttttctattattttattctaattctgaatactgtgcagcaaacttctcaattgataatatcataatttataaacaatatatataaggaacgacttgggttttttatttttattcaactcgtatatttgtcacttagaataatttgattgtgatcaattaataatcagtcttatttaattgacaaagaaaacgatcagcattgcatgggagggattaacattaatattttcaaactatttgatacagaattaatattggtcattaattaatggtgacgtaatgaattaatgttggaaatggcagtaggtgattagagtgaagattgatacgtaccgttttgagtttttatggatattaattatatctatatatatgtatgctgatgttaatttcgtagctgtgttcatctctgtccccatactggtaaaaatttattatgaccacacatatatttatctaagtgatataagtaacagtagttaataatgtgagtttattcatgaactggagttagagtgagtgagaggaataaacaataaatagagaagtaaaattaattgttccgtatctaatttaagctttgaaaaatgatcaggattaagttggttttagaggaagatatatatatataatatatatatatatatgtactttcatgagtgaaaggtaactataaaggcctatccaaactcaaacaaacacaacaaattaactaataatttataagaaaatgtttcttcatcaatttctttactttattttactttttttttttaaaaaaaaaaacaataaatatgcgtttgtttgccaaaagtcggtaaaaattaaattggcacaccatgtgagagatgtggcgccctttaaattttatttttatacacacaacaaattccagctaaattagaaaaatggctgcatatgttataaacttgatgtatatatatactctcacatatttattgagtcttttaccccacattaatttgtataattgtacgaacgacaattataaataaatatactttccaaataatatagaagatataatgctgtaatagcaactagcaaaagtaaaaaagaaagttatggttagagaaatactaaaattagacataagtagtgtctagcatcattattttatatttcaagtgttatattattattaatataattaagtattgaataatatattttaataactattataaaacatcgctaatcatttataaaatgtcatctttaaatggtgctagccaatgataccttacaacaatgctttaatgaaaatgcaatgtttaaaaagtaaagtatatatttagaaaattttaagatgtgcattccctaaaatgagtagatatatatttaaaatattttgtaaaattttaaaaaatttaatatactttaatgtgtttaaaataagatttgaattttgaacagttttgttgcaagtttatttatttagttttatacactcataaacatttccttaaatctcttaatacattggatttacatattaataattttataactaattttttacaataattttatgagattcctatactcaactataataattaattaacattaatttaacaaaatatttttttacacaaccaaacacagctatttttcactttaacaatctaattaatcaataaattattatgaacttaattcccgtaccaaatgcccctaaaggaataaatttagtgtagtttaatgtcataatgtggagtaagagacatgaagattaattacgaaacaagggactgttcactagtctcttcactggactataaatgtccttttattaaaattgttaa

SEQ ID NO: 17322 - DNA, 2626 bp, Cannabis sativa
tcttgttttcatattcttttttatggtacttgaaattactattaataaaaaaattaaaaaaaatacaaaaatacaaagacaaaggcagagtattatttctcataggtattgaaaaaaaataacaaaaaaattgacccttatgcgtatgaaaatggctatccttggagacaagatctttatcaagttttaaaaaaataaaaattaaataatttaccagtgaatatatatatataaaattaaaaaaataaaaaaataaaagtaattttcgtccatctatacatttttgtttaattaattaagttttaacttttcttaaaaaaaatctaaatattttgtttgaatatgagacaatgaaactctttagaattaatcatttttttctcccacctttttttttaaaaaaaaatgtacattattttatattagggtattttttttaacaatttaaaatgtgtataattaaccttgattattatagggctatttaccaagaagaagatgagaaaagacaaaaaggtctaaaaataagcaaagacataatggaaataggaggtgatgccatcaaaaccaacatcacaacattgggcccactagtccttcctttatcggaacaactcctcttttttgccactctcctttggacccaccttttcggcggtagggctaccacatccgccgaaaagggtagctctcctcatccccgaccatcgctatctcctgccacaactaagaaaccgtacatcccagactacaaactcgcgtttgagcacttttgtgtgcatgctgcgagcaaacatgtgctcgacgagctacaaaaaaatttagggcttagctcgggccatgtggaggcatcgagaatgaccctccaccgatttgggaacacatcgagtagtagcatatggtacgaattgtcctatctcgaggccaaggaaaaagtcaaaagaggagaccgtgtttggatgttgtcgttcggatctggttttaagtgcaatagccttgtttggaggtcgcttaagcgtattcgaaagcctttgaggaataatccttggcttgattgcattgataggtatccaatcaataactaattttcttaattgactaattaattaaggaaattaataatagtatgttataattattaataattattattagatcatgcatgcagggaattaatagtacttatcaacaagattgtgatatagatataatatattatattttgtgtgaggttggattttgaacatatatactacatagttatatgtagaacatatattttattattttaagtatgttatatatacatagatgatttggattataatgtaatatgcaatattttcagatttaatttatatttctttcatcatcaatagtgatgaattttttgctatatcaagctacatatttgtggaaatgataatgattaattattgttgatttttgtttaaagtacttgtggatattgatcagaatattattctcaaacaaagatacgattggttgaaattagttaccacgtgttaagtttgtgtgttcacatatttaggcccgattttgaacataagtgggcaaagttcgtgcttagagttcatttagcctatgggcccaataaaactccctttttaaaaatacacatatattttttttttactaattttaaaaatattatatttccttctaaatgaaggtccaatttaattttttcatatcacacactaaaattcaaggccggcgctatatatatcaatactcatctttaaaagataattcataactgtagttgtgtatttatttggaagttgaatatgattttaccattatattctcgtctatatttaatttgttatacaattataattagatttgtggtgcctctaacatagaagaagaaacaaaaattagtgaaaaatcctatgggataccgtaaggtgtcaagtcatataagatattttatattgttatttaagggtattcgtcaaaccgctcaaactgttcataccgcaccacacatcaagcaataaggggatcttgtcttcccatagcattgattgtgacagtcagtagtcctgtgatccgtaaaggaaaatatcgagtaagatatacaatcccacatcgatcgcttggggaaggtcaagtaggatgattttaagactgtgtaggtatgagactacatagttgaagagggcataaatagattgattagtactacctatatcaacaagatgcatcttgtttttcagtagcctatcacgaaagaactacacggttaagtgtgcttgatcaggggcaatttcaagatgggtgacctcccagaaaattttcttaagaagcgtgcgagtaaggacaaagcatgttgaaaacactcgtgttggtctgtaggatcaatcgtcaatccaggaagcagccagggtggcgtactcttgattaaaattatcattgcgtgggtgtaatgacctaataaaggctgaagcgggaacgttacataaaaaataaataaaaaaccataaaagattaaaaaaatagtaaataatataaagatcattcataaaaaattactagctaattatttaccaataataataataataaatatcgtcatacagaaaaaaaaaaaaaaaaa

SEQ ID NO: 17323 - DNA, 3315 bp, Cannabis sativa
tcttgttactatcaaaacttcactgaccatgtttaatgcaaaaagaataggatagatttagattaccaatacattcatcttcttcaatgagatgctttcttggcagaactagagtagcagagatgaaggcagaaagatcatggtgccataacaaaaagttttaattatccaatttggccaagagcttgtgtgagaagatgatctaagctgatggagcaattacagtcccctgaaatggagctaccattgaataaacaaagatcgactaatcgaaatagaacagaacgataaatcagcaagatcgagatgaaaaatacttcaattaaagcaagaatggtcagaaagaaagagaaactctgataccatgttaaacaaatgaaatgggaatgaattaaattgacttcattagtttagagtgagctattataatagtgtatttatagtagaaattagttacaaaattagttagagttagttgcaacaagttagttgattgggctgaatacaatagttaaaactaactccaactaactgaaagtatctgtaaactgttgctcattaacaattaattataacaaaaatatttaaatatggagtacgagtttgagcacgtatgaaaaatgggcccatttatttaagaaaaattggtagatccgagtgaagcacattacaaatttaagcatgacatgaaaataccaggcctatagaatatgtcaagcttaccttataaaattattggcacaacacaatacgtactatatttttttatggtccagcataacacgacacgactcgatccatatttttgcaagctagcttttcaaaatatgggtcagctaggatgttacacatgtatttgcatcaccgctcacaaagttctaactacacaacaagttaatcatatgctctctattaatagagttgtcactctcattaaaatatagatgagaaccataaaaccttagatgttactaatgttaaattggatgtttatggacttcaatgagtgatttttaaattatgagagttgttagaatgaacacaacatttataaaaacgttcaaaaacacatgctaaaaatttggcatggcgcaatcgtacctactcttgctacctttaacttttcaccatttacaattttaattggaaaagtgtcacacttgaatttgtaccacttatttacactataaatcatacaattaaatctcttgtcaactatattttaaacagttatcctttaatcacattcacttacatttgctaatttaatttactaatttaagactaagtattaagaagaggagagttacaatgtttgcaatactaattattatcttttgaatgattcacaactagggatgcacacggggcggggagtgctcccctcgtccccattctcgttaagaattttaatctccatcatcgcttattctccattgcagatggggcggagaatctccttatgggggcggtaacgggacggggaatcccctaatagaaaaataaagtttataataaaaattttaataaataaaaatattaaactacataaaaattaaaatattatacattaataattattcaataaaaaaattattatccaaaacacaacttaaaattcataaaaaagtactcatatattaaaaaaatgcaaacataaattataaattataaaatattactagaaatataagataaaatactaaacgggtccccgtcgatgcgggaagtgtgattctcgtccccgccccgtttaatattcggggacaaaaagtaatctccatccccactccgtttcccatttaaacagggaatctccaccccgggcgggtccccgcaggactattcccgtagagaaaatgtgaatccatacacaactgtttttctataattaatattcaattcaagctatgtaactttttattgcatattactttttgacaaaactatcaatgtgtcacacaattatttttcacagccttatctaatcaaatattttattaatttgatattatagttttttttttttttttttacttttattttctccttcgtttcaaagatgtaatggtaattacgattttatgaacaaacaatatccacatgacattgaatttcaggaaaaagaaaaaaaaacagtaaaacttaaagagtaaaatattattcaattaaaaaatgtctcgaagcaacgcctaatcattcacacctccaaaattatgattgaggctagaaacattaatttattcaataatttgtccacaccaaaatgacataccaattattttaatcttcatactaattttcaaagcgatatttaaatatgatgatgatcatatatatagttattatatatatgatcaaatcttcttaggtgtataaaattaaaatcacaaatactttaccactccaacaaagaatcttttttattggaccaactaaagggtcccattacatatttttggaagtatcttttaacatttatatttatttttatttaattttcttttttttttaattggtaagttaatcttgtcttgacacatatagttgcactatggaaaatgatcaaacccatcaatttttgtcgatatagtaataaataaaaattgtacaacgtgtttaatgttagaatcaactaaatttttgtgcttatcgaataattgcttatagaaaattatttaaattgtatatgtattatgtttctatggttatttaaggtctaattacctagataattaactttatttgagtgtttcttttttcttgataatgtaacattaatttgattgaaaaatatcatcatgtttcatttgattgatttcttctccacataaataaatgacattaattgaagatttccttttatttcgtattttgattttttttttacttataatttttccatgtcataatattattaaatggttgattcatattaatttactaggttattttatttttttttaaaaaaattaatatttaaagttttaaaaatttaagaaaaataaatataaaatttaagaatattaaaattaaacatgctaatattaaaaataataatattacaaataatatattaatatttatagatttatatttgtggtgatagacatagcttagtagtttgtcacttctactcacaaagaggaagtccatgttcgaatccccctccccgaagtaaataaaaatatttatatgtatttaaatgaatttaaaattagtataagttcaatcaatctaaacaaataatattaatatttgtatatatatttaaattaatttaaaataaataatattaatatcatatatatttat

SEQ ID NO: 17324 - DNA, 4215 bp, Cannabis sativa
  modified_base (537)..(546): a, c, t, g, unknown or other
gctgatcttttatctattgtaatggttgaaagttcattctaataaagtttaccattttctttcaaaaaaaaaaaaacaaagatggtctaacaagaataatagttgaggggtaatatttaaaaaaaaagttacttaattgtcttttcttagttaataaagtgttatatatatgtacgtaagtagtaatagtaataaaagctgcatggtggagtttcacgtgaacatttttgttggacctgcacgaatgctatgaaacctaagtgtacctctctagaaattaatgtatgaaaataaaaggacaatatatataataattaacccatctatatccaaccgttacttaatatttttcacaaaattatcatcacctcaatatctatattacttattaacacttgaaaatagttatttttattattaggcactgcagagttggaaaatagttatatggacttggaataaaaatatacatacatatgatcgaagttagctagagaaaaacaaaatggattgagttgatatatatatatatatatnnnnnnnnnnatatatatatatatatataaacgagaccaaatcatatatattatgttaatgaatgacaggtgctgtaacaccaattgctactgtgctctgctgtacaagattgcagcccaaatgttaggtagaatatcactcgtgcgtatattgtatttggtgtgctgtcaccttttgttattagtcattatctttgtaatgattaggaaatcattctgttagaatattcacctatgtattgctaacagctgtaaggaatagctgtttgggactgtatttcattgtactggttttacaccagaatttatatataaataccatgactctggctcatattgaaatgagctgagatttcattacccaaaattactctgtttttgcttggtatcagagccaacaaaaggccttagccatgtcgaccccccaaaatcctggaaacaatactccagctcccacagcagcctctgaaggatctgatgtgcatgactcaacaacaaacagaaataacactcaacccttaccttcacaaactaccagtccctaccatcagccactcactaccctgaatcaaccatttagcctaaaattagacagaaacaactacactctatggaaaaccatggtttccacaatcgtccgtggccatagattacatggccatctccttgatacacaaccatgccctatcaaatttctgcctgtccaaatcaccactgtcgatggagaaatcagagaagaaattcaagttaatcctgagtttgaacaatggattatcaatgaccaactccttatgggatggctctacagttctatgaccgaaagtattgcaactaaggtaatggggtctgccttagctggcaatttgtggcgtgcgttggaaagtctttatggagcctactccaaatcgaaaatggatgacactcgcaccttgattcaaaccgtgagaaaaggatcaacacccatgacagagtatcttcgacaaaagaagaattgggctgacatactcgcgcttgccggtgacccgtatcctgaagcacacttaattgctaacgctctttcgggtcttgatgttgaatatttgtctattgctgttcagattgaagctaggccctagaccacttggcaggagcttcaagatatgctcctcaacttcgatagcaaaatcgagaggcttcaaactctcaacactggaaacaaagcttcaggtgctgttcctcaagccaatgttgcagccaaatccaactctggtggtcgcggacgtggggctcaacatcaaagtcacagctacaatggtggtggcagattcaccaacaatcgtggtggcgctggaagatcgagaggaagaggacgaactaatggtctgaaacccacttgccaagtctgtgggaagtacggacactctgctgctgtctgctacaaccgctttgatgagagttttatgggaactgaccccaacaatcctcagcagaaaggaaaacctggacataatagccacaatgccttcatagctacccctgaaatccttgagagtgatgcgtggtttgccgatagcggagccagcaaccacatcacttctgaaggatctaatctcagccggaaacaagaatattctggtaaggaaatagttgttgtgggcaatggtaacaagcttcgaatctctcacattggtaatggtattttgaatgctcaaaatggtgattatttgaaattaaaggagatgttgcttgtgcctaaaatctcaaaaaatttaattagtgtatcaaaactgactgcggataatgatgtactaattgagttacactctaattattgtttggtgaaggacgaggtaacaaggagagtgctgctccacgaagtgcttaaagacggcctataccagcttggtcagcctcatttctttccaattccagcaggttcatcttcttcaaagtctgcaagtttccaatcctttgttgtgttggctgttaccagtcccaagtatgcgtctgtagctcaatctcaaagtgaaaataatactatgtctaaagccgatgtgtggcatagaagattgggtcatccctctcttcgtgtgttgagtcaagtcctagagtctagtcatgtagctcttcccgaaaatgaaattaaccacttttgtgatgcttgtcattcggcaaagcgcatgcacttccttttaatttgtctcaaaacaaagctaaaactgtacttgaacttatacatacggatttatggggtccagcccccattaattccaacaccaatcacatgtattatatacactttgtggacgattatagcaggtatacctggctatatccactcaagttaaaggccgatgcactaagtgcctttgtagagttcaaagctttagttgaaaataagtttgacaccaaaatcaagtgcattagaactgattggggtggtgaatatcaacccttcactaatttggtcaaaactcatgaaattgagtttcaacactcatgtccacacacatccacacaaaatggtcgtgctgagagaaagcatcgacatattgtcgagatgggacttactcttcttacacaagcaagcatgcccttgaaatattggacatatgcctttgctactgttgtatatctcattaatcgccttccaacacctgtccttttaaacatctcaccatttgaagtattgtttggcagaaaaccagattacaaactgttgaaagtctttggtgtagcatgcttcccttgcatctgtccctatcaatcgcacaagttccagtttcactccataaaatgcgtcaacttagggtataacaatgcacacaaaggctataagtgtctcacgcccactggtaaaatttacatttctcgaaatgtagtgttcaatgaattagagtttctctttaaatccgggtttctcaataattaccaaacaccttcacctgtcattatccatagttccacttggtcatccttgcttgtgccatacactgatgtttctgcagattctcacaaatccacatcaacagatgagactgaccaacgcacaccagcacacagagcagtaccctcctcgctttcctcttcgggacaccaaaattctgatgctgaatttgatgaagagtagctttatgatcttgataactttgatccaaatggtggcacacttgaatccacacaagcttcagtaccttctatatctcctgcaccgggcactcatttatctccatcacaccagcagacgcaacccgctgctcaaccgaaaccccaagtcactcatcccatggtcacaagagcaaaggcatgtatatttaaaccacacatttttctcagtcatgctttaaatattggctatactggtgaaccaagcagtgttgaagatgctcttaaacatcctggctggtctaatgctatggacaatgaagttcaagccttgaagagaaataatatctgaattcttgtaccaccctcaaagcactacaatctggttggcaataaatgggtgttctgagagaaactaaatgctgatggtacactcgaacggctcaaggcgagagtcgtggctaaaggattccaccaaaggtcgggaatagactacggtgaaacctttagtcccgtaataaaatgttggaattattttaccaggatcttatatctactcacaagtatgttgatttaacaaagatcggaagagcgg

SEQ ID NO: 17325 - DNA, 7792 bp, Cannabis sativa
agcatttttcttattgttcaataagaaaagccgaaatgaataattataccatatctatggctatgatctgtgtttatttcttcatatttgacatgtcctcaatttggtatttcaaatgaaaactgatggtcttgtttgaacataatgggggtaggattgccttctttgtcctacagggtttgctgctaatatggctgtgatggttactctgggcaatgttagctctctactggcctctggctcaaagcctttgcagcatgaaagggttgccattttttctgatgcattcaaccatgcttcaataattgatggtattcgtcttgcccagcgacagtctagtgtagaggttttcatctatagacactgcaacatgactcaccttaatacactgttgtatgtcatgcaaatttctaaaacattcttgcgtgtcttcttttgagtttattcatacacacatatgtgtatatatttatacgtatatttggggtaggttcaattaacatataagtttttgcacacttttataccgtgataaacactggtttaaaattgaaaaatgaaaatattccatttgtgtatatataatttcaacagttttatcaatttggtctaaaagtgtttatcacggtgtaaatatacgtgtgaattgaatttatccctgtatatttatgtatcgtatgtatacatacatgtattcttacgtcaaaatttaatcctcttgacagatcaagttgcacactgaagaagaaagttgtagtgaccgataggtaaatcattggtattatcatttatttcgatgacactttgttaatgccttatcagatgggttttcgtgaagcatgaaggttcaccactattttcttgatatggttaggttgtttaaaagctaaattttcaaatggctattatttaagatatactgaaagattgttacttacgagttttaggaaacagacaaccatttttttttttttgtacacgcaaatcatccctgcatattgtatctgtacaaaagcttcatttggttgtgttattacagcttgtttagtatggatggagactttgcaccaatgactgaacttgtgaagttgcggaagaaacacagatttttgttagtaatcgatgatgtaagtaagactgtaggtaaaaatcaattaatgctgctcatctaggaactatttcaaatttgtttcacaaactttgtagtttcttactgttcagtcaaagcatgatagactttggggtagagtcattaggtttctatgaccatatagttatttcataaataaaatttgttaactacgtaggcttaacaaccaatcatttattcttttagatgactctgtacaaggtgaaaagaaatggcatatgctgatgaccttagtcttggttgaagtaaattaataagtggggtgtaaagtgtaatgcagcaatgactgcagattatttttacattttctcaaatgtgcttctaataactttttgtttcaggctcatggaacatttgtttgtgggcaaaatggaggcggagtggctgaagagttcaactgcgagaaagatattgatatctgcgttggcactctgagcaaagctgttggttgtcatggaggatttatagcttgcaggcaatgactatatattcttctcccttatattccttttctagagtttttcagtaataatgttacaattacgataattcgcctagcacctattttggaacagtgcgtttgtgcatacctaaagttttaacagtttgaaatacaatacttataaaccataactagcatagaaacattgtaaaattttaaatttgtctattgttcatatgtaaacagtaagaaatggaagcaactaatacaatcaagaggtcgctctttcatattttcaactgcttctcccgtgccaattgtggctgcatcccatggtaatcattatttttttgttcaacatgataacttacaaaatggtcattaaaatcttaatcgaagccatataatatgtgacatggcagctggtgttattgtggcaaggaaagagacgtggagaagaaaggcaatttgggaacgagttcaagattttcgcaatttaactggaattcccatcatgagccatataatatctcttatcattggaagtgaagagaaggctctcgaagctagccagttcgtcacaccctctctgttttttattctcagcaccaatgtgaactttatcgcaatgaagttaatgctacatgtttctaaccgtgttgttgttattaaacaggcatttgttgagatctggtttccacgtgaccgcgatcagacccccaacggttccacccaactcatgcaggtttgtgaaaatcgtagtatcttttctgatattaaaagctcttcatcttgtttcattgtttgcagtagtagtaagcaactcaaccgaaattacatagaagatggttgagttttatacttgtttatcattttcatttatatgcttaatttgataactattttgacaggctaagagtgactttgagtgcagctcacacaagaaatgatttggtgagcctcacagatgcactatcccgctgtatagatctcaaagaaataagtgttaatggctcatcatatgcatatgctaggatgtaatatttcattattttgaaaaacaagagaccccttatttatttacaattaatattattaccgagttaaaatagacactcttttctagtcagaatgaagtgaaatactttatttattattagattgtgcattgttgtaattctgttttgaaacatgcaaggctgctgctatattgaaacacatgaaaaaatgtgttaaatttttattattcttgttatctcttcaaacaaataaaatgaattaataaaaataaatatttctattttagttatctatgtactagattattattatttattgctatattcttgatgaaaactgtaaccaggtagagcaaccagcttcctgctaaactttttgttttatacacataaataaatcatatttttatacattttttaatcaaaatatatgggacatgatagtgaattgtactaataacactatgttattttttgtagtgcataagaccttaagtgtcccttctccatcttaaactatttgattcacaaaaaaacataataattaataataatagtaattgtgttaaggtgctcataacaccatgattatattttgagatgtgattaataaaaattcttgtactaaatcaaaaaaaaaaattgtttctaatttaaaaaataataaaaaattaagtctctaactcatagcactaagaaacatatccaatggagtattaaatttagctcacaataatttttattataggaaattatcccatatattctttttaaattttttttcgtttcggtaatttttatttagattgttatgtggattttgattgtaaattaggttgcttatttagtttatatatgagttgttatgtggattttcctaaaaataaaaaaaaataactttaaagaaaaattataagaaaaaaaaaacttattgtagtcactaattattataatacattgattatattttgttttgttttgtttctcactaaaattataacatcaataataactctctttttacttattgtggagatggtctaataattaaaatatagttaaaatgttttttatatgcacattaaaactaaaagtattattatttggtatctttaggtggttaatagttaatagcataccaatgtaatattccataattagttagtaattttttatattatttattaaattaaatattaaaatgcaccgataataacatcctatgtgtgtcttataacgcttcacacccattaacatttctcctataattgcccaaactgattaataataaaagcctaaaaacatttttcatacatgggaaacattaatggtgatataggtcattaattaaacattcaagagagtatagggcgaaaacatttttgtgtaggtcttctatatctagttactcttttcgagattctagtctaaaatggtcagttgaacaaactctgcaattcaagtctatatgatcaaaataaggaaatgaaactttcacatatacttatcagtacacgctgtgctttactctttggaagattattattattattagactgacactcttgcaaatattatttgcggtttgctcttatctttaggcattgtcatttttctttttagctataattacaacaattcaattgaggcatataactcttaaatattctacaatgactgagttaaaatctttctttacagtactgaagcatttatggtggtttctttctttaaaataactgggttaaaatatctttctttacagtgtgaagcatttctgatgggtttagcattctcaggagacaagacttgtgatcatttcagaaaagcgtggttattatgtacatatgtacccgtcaccactatagtgaaagttttctttaaaggactatatttgtaggatataccctactaaatataggatatataaaaccaagcaaaattaagataaacatatgaatgattatgaatttgatcaaattcataaatgtacatatgatgaaatatagatttctgtgaactattcccatttcccaactcaaaaagaaccccataataatgagaattacataaagtagacaatatgtaaatcccataactatggtaaatcccataataataactaataatgtgtttatttatttcattagtcctataataatattttccctgtaatctttttcattctataatatttgagttttctatatataaatcttttcaaaaaacattactattgttctcttccacaggtaataatgttctcttccacaggtacctcgtttaggttaatgacagacgaagaactgggagccttaagatcaggagaataaagaggaaggccttcggatatgaagcttaaaggggcacctcttacaggcacaggcttcacaggtggagttgattggggcccagatggagaaagaggtaccaggaggaggtggggtactggggagaatgtggatgaagaagctgatgatggggtttggaccacaaaaggacctgatgatgtagtagtggtgtttggccaaaagaaggtaccttgtggcttgcaaatcctgaaaccactcttcaatctcgctatctttgctgccttggtctctcctgccattgctgcctgttcattatcccttccttgatctgatacccttctttctcctaatttctctttattggcgtcccatatttcagattctgacgacacacgtactccattttttgtcatcattagttgttcctgcaaagtaagttataaatgttatattagctagagtagagctaccaatcaagtaataagtaaagaaatatatatctcacagaatcatttaataactacacccctgcaattaaagtttgcatataggtagcaaaacatacaagtagtctctcaaaagaatccaaataattatacttacataagtacggatgattttaatttaatcacatgcatttactatttggtttcattcttatattataagtgaagataatttaatcatatataagagacaataataatgttctttttttctttcttttttgagctaaatatacaattaatattttgtacctctatgttgctcaaacttccccaaatttcaatcagctctttctcaatatttgtatttttgctcaccaaatccataaaagtttcctgccattgaaaaagacatgcgatactggttaaagaaatactttttaaacatggctatcacaaaattaaacaatctctctcatcagattcaaatcttttttatgtttttcttacctttggtattagaaaataatctacatgaccaaccaagttggtcacagtagtcaaatcactgtcctctgaattcttcaatccttgctcagttaccctaataccagaaatatcaaacataaccatctaaatagaatgctatatttcaaaattagtctgacaaaacttacttcttcatcttgtctattactttccatagctctttcatatccctagacatggattcctgcctatccctgctagaaatgacttccttcatatccctgtaaatccataccaaaatataaaattcccaaaagacaaatggaacaaccaaagctataaaaataacaaaaaaaaaaaaaaaccaaattaaaatttacattttcatgttgacaatctcttccttgattgccttgatctctcttgcacatacaggatcttgggtgggattatctccgagcttccacccagaaggaggtgtccaatatgaatctgtcacaccagccttcttccttatgtcagctaactcagcactctcaagccaatactccatggccccatcggagttatgacgccggcggaatcgctcatttcctccgggagccaattttcctgccatgtgcttaagcaaatggtctagcaaaccagtatccccaatcagcttccgtgcctcagctcttaaatcaggcctcagtattgggttaccaatcacagctcctttggctttcattattttcaacatgttctgttcagccaacttgtacctgcatatatatcatcacttcaatagaattagaaacaatgaaacgatcaactaaacaaaaaagaaacgatcgatatatatatatatatatatatagattttgtttgcatacgtacctcgcttcagaccatctatcaatggagtttttcaaggtctttgtcttattccgactgtgaagtaccgtttgattttttttcttaagacattttggttttttctcgatttccctacttcttttgaactcctcaccagtactgatcttcctcttagttgcagaccgagttttagcaagctgattacatagattcactgccttcacgtctttgtagtcttcgtcttcctcttcctccttcccctcatcttcttcaccatcccgagcttcctctacaattacttttttctctttctccaccggttttccccttccaatgtaccgtacttgccggcgactcccccactgaaccagacctgtacacttgagcagagacaaacaggagctcttcgaacaaaccaccttattattactacttccaccggcaacgtcaccgctgccacgatcagcgccatttccttgtctaaagctcctctcaactggagcccagaaactggaaaatttccgccgaagctcaaactcatcaggcaatattctccggcgaagtacagaagcggcaatctccaaactcatatcgtgccgttcatctagcacaggcacctttctgttgtccgtgttccgatagctctcatcgccgaagtactcactaagagaataaatgctagggaatcgtaacgaaacattgcgctcattcttcttaaatacctgaataataaataccatcaccaaacacccgaaaaaaaaaaagagagagagagaagaagaagaaaatcgaagatgatgcataccattacaattagaactgaatagagcttatccggcgactgtggagggagattttcgtgtgaaatctggtagaagtaaccttcttctacttcctcgttttcaaactctgccatttgaaggtggagagagtaatggaacagtagtacactatatatattgctgataccaaaatgaagtagaaggaaatatatatatatatatactagcaaaaagctacgtgcaaggcacgtatactaaattttatgctagttttttctatgttagttgaaagtg

SEQ ID NO: 17326 - DNA, 5301 bp, Cannabis sativa
ttgatttggtttttatggtttgtatgtgattaagctaagctcagtcaatttgtgttgttgttttttttttctgattgatttggtttttatggtttgtaagtgattaagtaagctaatctcattcaattttcgttgtttcttcttcggattgatttggtttttatggtttgtaagcgattaattaagctaagctcattcaaattctgttgttgtttcttcttctgattgatttgggttttctggtttgtaagtgattaattaagctaagctcattcaatttttgttggatcttcttctgattaatttggtttttatggtttgtaagtgattaagctaagctcattctcaatttttctgtgttgttgttgttgttgtttcttcttctttcgattgatttggtttttatggcttgtaagtgattaagctaagttcattcaatttttgttgttttttcttctgattaatttggttagtgattaagctaagctaagctcagtcggtttttgttgttgtttgatttgattttattaggttttggttccgatcgctaatggtacggagccgatggaagcggtgatcaccattgatgttttgcgaagagctggagctgatgttaccgttgcttctgtggagaaggagcttcgtgttgatgcttgtcatggtgttaagatcatcgctgatgctttgattactgattatggagaacaaggaatcttcgacctcattactctacctgtatgtattatctactttaattgtttcttttgattgtttggatgaagagaaaattttgtgttgtcgaattgaggcttttcacttttcagtttttgttttgcttgatgtcttcagtaatttcttttttgttgatagatatttgattgagattgtgtcgatggcgccaaagtgaaacttatacaatactcggattgcaaattatttttgttatcgttttgcaatttgaggtgtgtttatgtgacaatagtcattataaaaattttattaacaaaataaccatgttcagtcgcacaagcgacaaaaaattacactatgcgaccataaatttaaactattattgtcacagtataaatttgatgtggttattttgctaatttaacattttcatattgctagtttggcaaattttcaataaatcaatctattatatgtaggatggtttttcaactttgattgtttatgaaattatgctttttgggttgttcattgagctattgctgagacatgtatttgacttgaaattactctttattgcctttttcatcctatagggaggcatgcctggagctaccaatcttaaaaacagtggaattctagaaagcatggtcaagaagcaggctgcagatgggcggctttatgctgcagtttgtgcttcccctgcggtggctctcggagcttggggtttgttgaagggtgtaaaagtaagcatactaagctattacggctattacgattccttgacatgatgctatgtactgtactgagcagtttcttgtgttttggtagtgattatcgatgaatgtatgttgaatgttgacaggcaacgtgttatccggcatttatggaacaattagcctctactgcaaatgctgttgaatcaagagtgcaaatggatggaaaagttgtaacaagtcgtggacctgggactacaatggaatatgctgttgcactggttgagcagttgtatgggaaggaaaaagctgatgaaatttctggcccgctggtaaggtcatattctttttcgacaaaagatgaaaaatatatggaggaaacatctgtttgaacacacttgaatgagcaaagctctttttgtttgtggctttagttattgaagcttaaatggggtttttcagtagattctttggaagctaaacattggatttcaaatgaggaaaatccaacactttcgaatgcttagagaaattgcgtaagacacttttagaataatgattgcgaaacaagttcttgggaaggttaagcagatagagattgtttgggaagcacatattggtggtagagattcacttttaaagcctcttaagtggtgatgccattatctagcttgggctgatactgaactcatgaaattggtaaaaaaaattgttagctttggctcaaaagactgtaaactagtttgcactactttttatagtttaccttttctcttactgtttgtggctgaatttttttggacactttgtgtgctttcacagctgtataaattatgctaagtttaattcgaaaacaatcttctactgacgagtgatacataaaatacccaattgaattatttgatgtgttattatccctcttttacactgttaccaccatacctaaacccacttggctaatagtttcgtttatcatcttgttctactttttacagaagaattgcttcttttactcttctgatttattttttggctcataaaactttaaataggtaatgcgatccaaccatggtgaagaatatactataaaggagcttaatcctgtgcaatggacattcaatgatggccccagagtgagacttttgtttatactttgcttttgttgttgagtttatgaatatatttagtattaatctacctctattagaaaggattcgactaaattactttaacatgcttaagtctaactcgatgaataatggataagggagtcagcttatatatttgataatttagtcaaaattagtgtcttgtgttccctcctttatcaaaattacgaggaacactgatgagtgagttcaaaaatgggtttgctgataccgaaattttcacaaattcatgcacggtttactttgtcccagattcttgtacctattgccaacggtacagaggaaatggaagctgttatgatcattgatattttacgaagagcaaaagcaaatgtagttgtggcgtctgttgaggataaagtagaaattctggcttctcgccaagtcaaactcgaagcagatatgcttctcgacgaggccgccagactttcgtacgatgtcatagttttgccagtaagttatttggtcaccatttgattcaagtcatcatccatctattgatttccatcacttgatgttctgtaatttttttttaagggcggacttggtggtgctcaagcttttgcaaactcagaaaagctagtaaacttgttaaagaagcaacgggaatcgaatagaccttacggagccatctgtgcttccccagctctagtcctcgagccccacggcttgctcaaggtatggcaaccattcacacgaatgtgactcggtttatgtatatatctgtttatcaagagcttatgctcctcaggagcatctctaatactctcatacatataataaataagtgttatagtttagcatttgaagaataaaaaagctttcaaagaaaaaaagctctttcattacattatggaagagaaaaagaagaagaagaagaagagagagtataggaataaaaaagtgatatgataagagaaaatgaagttattcagtcacatatgaaaaaaaatactcttttctttttttgagtttgagtttcataagaacgaaaataagaaggggttgtgcgattattaattttaattgatgatatttataccacaaattttcttaatttttgcaataaaatatttttcttttattcttacaataattcttttttacatagatttgaaaatgtcattgtgtatttgaaacatgatgctaaaagtattttaaatcaataatttatgtcctgatatagtgttaggaacataaatattacttctaaatacttggtacaaatagatttttgtaatttcaaacaactatcggcttcttctatacaggggaaaaaagcaacagcatttcctgctatggcgaacaaactgtcggatcagagcgaagccgaaaacagggtggtggtggatggaaacctaatcaccagcagaggtccaggaacttccatggagtttgctctgggcattgtagagaaactgttcggacgggagaaagcgttggagcttgccaagacaatgctattgtaagcctctactcccataacatatctctctatatatatctatatctctatatatatataaatgagatgatagaagtggttggattcatgtttgaatatgaatccactaggcttacgtactcacgtacgtgatgttgtgtataaaataaagtctcaaagatttggtcttcaacaacttttattttatgtgtctctgaaatgatcttatttgagttatctcatcaactactgttttgttagtttctgttttgagtcattaaccacaattagtcatgttggataattgtacaaagtcactaattgagctgccttaggtgaaactccatataaggagaattactaaaaggtactagtgatgtttagtgctgtaaatatgggtcgagattattgataaggtatgaaaaaatatgtgtttaggcataacacgacacaatacaaaaaaaaaattaaacttaagtacgatacgatacaaaaaatatgaacttaaacacgatacgacaagttcaaaagtaccgtacctaagcacggatagtttaactcgaaagcatgatacatgttttttaacaaataatttgataataaaaagaagaattgaaaagcacgagatattaaaaagttaataatttaataatagtaataatgataaaatatttatttatcaagtaaaaggatagtaatattttaattataataattttaattttttttatatgattgtgtgtaactattattgaaaaatgtataaaactaattaaaattataaaatatacatatattttattatttaactcatcaattgtaataaaaatataaaaatatgaagtatcaatttgagtctgtataagaaaataagttagtctatttaagaaaaaccggccggtctgaataaagtatgacacgaatttgagtgcggtgtgaaattactggacttgtggaccgtgttgggtctattctataaaaattattacacgacacgacttatatttttaaaaagctcaaaaaatacgagttaggctagcatgacgtacacgcattttgcctaattattattttactattttgcgttagagacgctagcttgtgatggtattttttggcacactattgtctaatatcacatgtgtgagcttttgaaaaaatatggtagttaccacattttagctagacttgcattggataaatcttaaaagatattggtagtatttagcattaaatattatattattgatgtaattaggtaagagatttacatattttagtt

SEQ ID NO: 17327 - DNA, 4751 bp, Cannabis sativa
ctaacatttgagcactaactaaataaatggagatcatgttagccaggagctaacattgaaccaaacaccaaaactcatacaacaacacactattattactggtactacttgatgggattggtcaacaaggtgttggccaacactagctttgtaatggtactatttcacatgagcaaactttgatgcatttcttactatatccacagacaatatttctgtcactgagttcactgactgctacaaaagcctaagaatcccatgaactcatggttgcttatcattgtgatgctcttctctatgccaatgacacctgcaaaaagtttgtgaattttttgtcaaaaacttcttaatgatctccacctttgtgaatgtattggaatgtaatggatttaatgatgttattacccatagtgagagcactagcaaaaatgacaccagaaagaatgaaaataatgattgaagttctcccaagtattttgatgatctttcttacaaagtactgtccccaaaacccggccaggacagacactcccgagaggtataaagctgaaaagagaattttatagtacataagaattgcaagaatcaaatttatacatatatattgaattggagaggaaaaaaaagattaccataaggaatggggaacctcttgaggagataaaactccaccacggacaaggatgatgaaaatgccataacaaatgttgctgttgaacttgccacctgtacaagttaagacttagttaacttagaatcaattgcaaggtctaagaagtaggcctaagaagtagtttcgattgcagggtcaaaagattcaacattgtgtagtattaaagtttaggaactaaaataagtgttgtgtaagtgacaaagtagtactggtggaatgacgcctatctcgagaagaagtggaccgagaatgaagccgcctccagagccgagaagtccaccaacagtgcctcctaagaggccacatagagcacaaaatgcaagatgaagtacactccattcaattgaagcctcacagatgtattctacattgcctgtgctcattctcttcttgtgttctttgtataatttcactgcttcatatccaaacaatgctagcgctattgggaactgaatgaaaacagaacataaaaaaaaattcaaaggtgagaaaaagctaattgaccccactaaggtaaagtttgagctagaaagaaaaagctgtctcaatgaataataggctacattgtatatatgtttggtacctgtaagaagaaaaggacccaataccatgtactgcagactttcaaatcattctgtaatcaacaaggttgtgacaaaaaaagaattattagtgagagagtgagaagtaaagggtagttaaaacaacggcgaagatagactagccttgacaatttggagtagtaggaagcacgcccagacagccactaaaaccagtacccttttccaccgaaggttcaaacacattacttcctacaacaacattaaaaaaaagtttaagttgacctgactgagcatgtgaaagaatgacatataatatatcaaataaatatatactaaagtataattttctcaccattgttgatttctcttccccagaagataatggcaggtaatccataccaattataactagagaaacacaataaggagaaacagaaaatgcataattatatttcaaatccaaaaaattaaacaccagaaagaaagaaaaaaaatcatgtcaaattgtctcacgttctccacgagagtctacagtttctagctgcctggccttttgtttctgtagaagtttgagaaattagaaaaactgagttactttttcttaaaaaaaaatagtaaggttcaattatcatgtatgaaatgatgttaaaaacactcacgtccaaggtttcattcttccacttctcgagccccataacgaaggaccttgaagaagtccctgatatattatagacaattaaaaaggcatcagctctaagtgtttcaaaagagaaaaggagtgacgataacaatctagtaagagagagaattagaaaagatttgactaacccaagaagaggataatgatgagaacagtgataagccaataggggaacacaacgcttaaagacacaccaactgtgataccaagcatcaacatgggttggaaaagaagggccaaatcatagtctatgatgggcacctcttttgttggatgaggcactcttagattgtaccaaacagaggatattgatgcccccataatcatgcctgaaacaaaaatcccagaaaaagcttccccaacatcaatacatgacacttattaaaaacaaaaaggtgaaacctttttccatttttttattatttttatatgagacatgaataaaagagtaaatagaaaagcaccaagaataaaaggtcaacctcaaagttctgaaaaagcccagaatgagtatatacacaaaagttttgagacatgcaatccataaccctttcgaacaatattcatataataaaaaggaaaaaaaccataaaagagtttgagttacatttagagatagcagcagcggactttgtgtcaaaaccaactatgagagtaagcataggaacaaatatgcctccacctccaactcctcccacagttccacaagccgagcctaaaaatccaatcagtgtcgccattacaagtctccaattaaactccaattccctgtaacaaataataaaaaaaaaattaataaaaggaagacatggacatttattcaaacaccaatggaacagagtgacgtacaggccagactaatgcttcggtacttaagtccacaggagcatgatttgatgatgagaaacgagtttggcgatctgggtagtattcatatcgttgtttgatgtaaataagagaaagcgcaacgacagagaaacccgacaaaaggtagagaacaaatcctttggtggtgttagtcatcaccattagagcccgttaaacgacggcggagacaaccagattaaaacgggaaacgacaatattcagttctctgcgttttgatgaatggagagaggagaatgtgtgtaagagagagagagagagagagagagagagatgaaggcgagggaagagtgggtgtcgttttatatagaggatattaatggaggtggtgattggtggtcacatggtttttgaaagaaagataaaaattgagtaaccaaaccaaatcacagttgtaatttaaattcattcaccttatttcatttaattaaaaataatttctttccaaaaaaaattaattatttaatttatgggtaacaatatctttttcttaaataaaacaccaataaatttaaaaaataaataaaagataaataaagaatagcagatgatttatttcctaaaatattattttaaattatgtttgtgtccattattattaaaattttaaaagtttcgaaaatattttacaaaaagagtgttcaattttttaacgaagaatttacgcacgtgatttttatttctaatctttatattaacttaatgccctcccaaaatgaccctcagaattttttttttttttttggaacaaagcctcactaaccagtttgtctttacctgttgtgtaattaatttttccaaacttgaattttctttacatgatatacttttttattcttttttttttttgttcttaaaaaaataccttttctttttaagcctctttatagtacatttttttttgagttattagagtttagataagggtgttgattagatctcatctaatatttttagacctactcagattcaatctaattatatattggatgttagattttactatccaatctgatttaattaacttcagtcatccaatcaatctaacatccattgaatattagattggattggttctattcattgaatgtatttcatacatatttattagtttaatacggatttatttaatattttaaatctagtattttttttgatcgaatcggatccatccaatattttatgtccagtatgtattggattggattgatccatccaattcaaaaataaaagagtaaaattttaaggataatttgtatatatacatatacattttacatataataatataaaatttaattactctaacaaattaaataaaaatactaattaattttattggatatattggatttttagacaccccatccaacatccaattcaaaaataacatccaatttgattcgatcacagttggatatccaatatttggcggttatttatatttggataggtaaattttcattagattggataatttatgcacaaactccttaaaatactttttgtgactattggagctaggctcaagaagtagtttgagcattttttatattttatcttttaagatgtattactaaaattttactttatatattttacttaaatttttacatgatactatccatctatccatctgttttgtaattttctctccatattatttttaaaaattatatttttaatatatcttattcattttaaaaagtaaaatatacataataacattacatatatatataatcaaacatataataaaaaaatatttttaactcaataaataaatatctttacatttaattaagtattattgaggtaaaaaatatgtaaaatagctcagtgaacttttactcacaaacaatttagtaacttggttatcttttctattccgcaggacttattttataatgaccgtgaggtctaattttat

SEQ ID NO: 17328 - DNA, 2283 bp, Cannabis sativa
acaatacgacataataaggcgttccaaacgaacccttaaactattaaattattaattgattataaaataaaaataccctttaagctaaactaaaaaaaaaagttagctttaaaaatctaaactaattaaatatttgtttcttttaaagcttgaaaaaactgccaactaacttatggttactctttgttccctccaaaatgagctctaaactgttcaccatggccgtggcagtgccatagtctctttctcatctcactcactctcatgctcttttcttgccggcctaactcctttcctgtatttccgtacagtacctacatctccttccttagatggctctctaccggaaccccagctaccggtgctccttctattggtcttccccaaaaccggctgaactatctccgtatgttctttcgtttgggcatgcagttccagaattatcaaaccaaccattacgaactcgcattgctatccgctctcaggtcttgttcctccatatccaacgattttctcggccaacaaatccattgtcgtgttttgaaatctgggctcggatttaataattttattaccaacagtttgataagtatgtatgctaaatgtggattaattggccatgctcgctccttgtttgattcttgttctagcttggatactgtctcttgtaatattatgatttctgggtatgttaaatctggccatttggacaatgcccgccaactgtttgagattatgcctgagaaagattgtatctcttacacaaccatgattatgggtcttgctcgatttgaatgttggactgaagcaattgaagcttttaaggacatgaaatcctctggtattttcccaagtgacttgacaatggtgaatatactctctgcatgctcgcatatcggtgggatttgggattgtcgaatgctccatgcattgctcatcaagctgcagttgctgaaatttgattttgtttccacgaatttgttgaacttttatggtgcttgttcgagtgttggggaggcaaggattttattcgaagaaatgcctgaacatgacatagtttcatggaatgcaatgctaaatgggtatacaaaagcaggtcttgttgatgtagctaaacaattttttgagacaattcctacaaaagatgtggtttcgtggggtacaatgattgatagctacttgcaattagaaagattaactgaagctctaacagcctttggtgcaatgctgagttctggattgcgggcaaatgatgttatggttgtagacttagtttcagcatgtgggcaatttacagcatttgctgaaggcctgcagctccatggtatgattgtgaaagaaggtttcgattgttatgactttatacaggcaactattatcaacttttattcggcttgtggtagaatcagccttgctcgtttgcagtttgaaattggtctcaagaatcatctcccatcttggagtgcactcatagcagggtacataagaaacggaatgattcaccaggcaaggggattatttgatgaggtgcctgaaaaggatgttttctcatggagcgccatgatttctggttatactcagaatgagcagcctgatgaggctctagaactcttccatggaatgaaagatagtgggattgaagcaaatgaaattacaatggtgagtgttttgtctgcaatagctagtttaggcgcactgggagaaggaagattggcccatgaatacatacatagtaactccatccctcttaatgatatcttaatgacagcaatagttgacatgtatgctaagtgtgggagcataaatactgctttagatatgtttcatcaattccgtgacaaagtttctactgtctcactgtggaacgcaattatatgtggactcgctgttcatggacaagcagagttatctcttgaaatattttccgacttgcaggggcgtcatatcaaactcaattcaatcacattcattggcgtcttgagtgcttgttgccattctgggttggtggaggccggagagagacatttcaagagcatgaagaatgtttacaatatagaacctgatatcaagcactatggttgtatggtggatcttttagggagggttggtagattagaagcagctgaagatttgataaagagcatgccaatgaaggcagatttcgtattatggggaacattattagcagcgtgccgaactcatgggaatatcgaaataggggaaagggctgcagatagtatagccaggttggaaccatctcatggagcaagtagagttctcttg

SEQ ID NO: 17329 - DNA, 3578 bp, Cannabis sativa
ttgagaaagagagtatgtgcaaccgggttcatccaactatatggtgtactcaactaatcactaaccaaaaacttaaaaaatcactataatgattgtttagaaccaaactcataagtagtgtgtttctgtattagtggggaggttgttgcacataaaaatcttgcatgaagaacactgaacatggatagctagatttcatcaaaatatgaaccgacaagactttaaatattagtggggtgcctttgctactttctctagcttttttcataaggcaacccttcaatttttcaacatcaaaaactccctttacttctataaattcagtcatggtatttgtatttatagtactgttgttccctgaatattcaatcacttgttcaactcctgcccaaagaaccaaaacaaaaaaaatagcaaatataaaattttaagtcattaattaagtgtacataagtatatcatttgtattatatttacctttgaattttttacaatattttatgattcttcttgtacagagttgacagtgcttgatgtactttattgtcacggtcacacgctgttaaaccaaaaattaaagaaaattatagaaagtagtaaaaataaagaagaaaacatagaaagaaactaattaataatcttaatcaaaaatagaacctacttcatgagtttgatgttggggttcttgtgttctagttttattgaaaacattcgtaagggccttccaattccaagccttcattttgaggtgcaaattgcaaaataaaaaaaataaatgcactaaaattatagcttgaatccactataattatttctaatttcaaatatatatccgtatatataagtacttttaaaatataatttaaatttgagatcttttttgagtggagataaataagtatgatattttaattatctaattttctaggatatacttttaatttaatttaattcaaatgtaaatgattcaaatttaaattatgttacctcattctgaaaaaaaaaattacataaagaaattattaaaatttacataaatattaataaaataatccctctagtaatcctataagtcataattgattaaatcattgatgcaaaaagtgtctaaataatataaaatttttgttagaatttgagataaaataattgagtttcatctcaaaattaattggtaatgagagtagtagtctattttataacaatttatttttatacattagcaatatgtgactaactctaataaatttagaaaaaaaaaatataacgtatattactcactaaaattttagaaaacttgccacattattcctttaaaaattatatcaaatatgggataaattttaaatttttacttatctcaataccttttaaaattgtctgtcattgacacaaatatcaaattctatataatttaatatattaatttttaaagaatatcgttaatcaaattgctgcactctccaaatgttgctaagcaagttaatatatacttaataacaaatgttgacaatttgctttgagaattttgagaataggatccaataattcacgtctttcccactttgccaaccacattttccaatccatttgcattggaaaaatcccacttgcttaattacaaaatcaccaacttttaattttcactaaaaaaaaaaactaacatcaattgatttctaaactacttcaaggaaaaaacacaacaaaacgtgttgtaaacttgtaaatgttttcttcatggataatatgatataacataaccacaaataattttcatcttcgtattaacaaatgatcataacctataaagaaataatttaaaaaagaaaaagagaaacagaaatgaatgaagggtttcattttttttttctttgaacccttttctgtttttgttgttaattatttcaagttaaggcagcaaaaccaccacctttcatcatttgtttaaactctttaaaattgacttttccatcaccatcaacatccactttctttatcattctcgtacaatcttctattgttctaccttgcttgagtcccaaggaagacaaaaccgacctcaattcctcaacggttatgaacccatctccattttgatcaaacacattgaaagcttccctcatgtcttcctcctcgtctctctcgtccattatcgtttgatacaacgccccaaactcgtcgatatccacgtacccatcgccattcacgtcgattttatcaatcatttggatcaagtccttatcagggatgaagattcccaagttttctaacgaatcactcaactcctttttcgtgattcggccatcgccatttttgtcgaacatttgaaaaacccgctttagctcggctggatccattttatcgaacacttggtgtgcacaaatacaaaaaattaataaaattatgtaataagttaagagaaagaaattattatgtattgggttttatgataatgaatgaaatatgatgttgaactttgggaaaaatgaattatgggaattgtgttggagaaaaagaggttgttaataagaacaaagatattaaggaatatatgtggtgagtattgttcgaattggttaaggataagagaaattaattaattagtatttggtgtctttatatataaaggttttcgtaaaaaacgttggatcgtttgttttggtagttataaaaaaaaaagtttgttaagaaacacgatttcgagtggtttgaaattgaattaggtataacacgtttttgcagtctttgttggattgtgtgttttaaataaggagaatatgaccattgaaattattgattgttggtgaaaataacatcttaatgccgtcacattattttaaaatggaagtttgatttaggaagagaaccatattttaagggtggtagagaatgaagagtttgacattttcaagtgttttctcacaatatagtcaattataaatatactttgatatataacgttattttcagttatatggttgatttataagtcgtttaattttagttttatattattaggtctagaagggtgacattggattagggatagaaattgggtgggtagtgagtgtgtaatgcacgttcaaatcctgtctcatttcccatttatgccctctcaatattcacgttccccgacctgcttaatctctgatggatttggggtagggaaattccattgggtatgggtatgggtggacccacatagaagcgaaaaagggcagtggtcctcctgagaaaaattgagaaaaaatgtatagacattttggttagttacaacatatatttataacatttacaattaaaggtgaaaaatataaacataacaataatttccgtttgttggttaggctatcttacacatttttgttaatttctagcatcatattgaggttttatctacaatgtacgacattatctctcgtgcactgtagtcactacataatttttttttaataatttaattaatatttatattattgtatttgtaaaattaagaatgattttttgggaaattatataatacacatttttaaaagtgatgtacaaatctactcctatttgtttcggcacccgacaaa

SEQ ID NO: 17330 - DNA, 1732 bp, Cannabis sativa
atggaaagttttaagtaattacacagtgtaattacattcaattcttatggggactatgagaattggagagtataattggaacctctcaattacttctaattacacagttacagtgtaattacacggtcagacaaatatgtcaaattgtataattacctctaagtacacacaaatctaattacattgtgtctttccaaacacacccttaagatgtaagaattttgaaaatagttattgtttttaccataaagagaaatgggtacatattgtaacgtagagtaggtcaaaataaaaaaaaaaaatatgaaagttggaataagaagactttaaattcatttcttaaaagaaatgttataagaaaaataataaatagaaataaatgagacaaagacaataaaggaaactcgtgcagtgtcgccaggtgtgaataagagaatgctaatgtatagacagaaaaataactgttatatgttaaacctcgtaaagagagaatcctaaatttaaatttctattcactattattatcatttatttatttgaaaaatagaataattttgaaaatgtaagctttaccattatagatagaaagaagtaaatgagaaaataaaagaaaaggcttaataaggtataacatttcattgaattatttctcaaaatgataaaaggcttttatgtatatttggtcacaaatttatacaaatagcattaagtatagtttggtccttatcctatgagtgagttggcaaattagttttcaaccttcttattttattaatatattataaattgctaatgtaaaaaaattaccatgatcaaaataaaaaaggcaacaaagtataaagtttaaattgataaaatgtgatttcacaaaaaaaaaaatggtgaccaaaataaaaaagcaattgaataaaaaaaaactaaaatatgattttctaaatcaaaaaaatatatattataactattatagaccatgacacttttatttattttcatttttccatttcttttataatatttagttctacttttcaacattctgaatttataataagcattttttttaattctcaaatattttatttattgaaatatttttagttatatatttagcaatcaaaatttaatagataatcctaattgttgtgtttcataaaattaagcttagagttacatgttttgtaccacaatttgaagtgtggtgtaacaaggagagtttcacttaaatttataacaaatttattaaataatgaattcggtaatcttaaaacttcacttaaattacaaaataacttattaaatgtgcgatttttacataaatttaaaataaatttattaaacaacaaaattgataaatctccaaacttcactaaaactatctaacaattcattaagtgtgccaattttaggtaaattaaaaagcaaatcatacttatattggcgcgaaatcgaattcaatttaaataaaaacgatcattaaaaaataactcggacaaaattcactttaaatttaaaaaaactgagaaaagattaacacttcttcatcctataacaataatagcctccataatattatgtaacttatacaatacaaataaaataaagttcatcattaataaaaattaaaataaaattagtatgaaagcaagaaaaatgcatttcaaaatcaaaaagaaactgtcattttgaaaaagtcaaatgtaataatttttttttcttccaaggaagaattctt

SEQ ID NO: 17331 - DNA, 2772 bp, Cannabis sativa
  modified_base (2718)..(2726): a, c, t, g, unknown or other
gataagctccttgtttgatgtgtctaccaaaggaagaaaagccataaagaccttgcataaattttattacagaagtttattaagttttaagtctttgttttaattgtttttggctgagttgttctttttgttttgggttagtagcttttaatgaagttggtgacatggtaagctttattctctataaatagaaaattagaactcagtttcagataggtggaaagagtttagaattgagagcaatctcatgagagaaatctagccctcttgaaaagttagaatagaagaaaagcctctcgaatagctattttgtgtaattctattaataaaagcattctggtaggaaatcaatatttgtgtctgaattctttgttagattatttctagtctaggaaaagtctatcataacagcagaaaagtgttatataaatataaatatatatatatatattaacgagcttaaaatagcaacagaagttataatccaaagaagaaagaaataccatcttagatttcctaacttcaaaaaaccctctttgatcatatacataaaacgaccaggtgttgctataaggacatctactccttgttgtaaattttcaagttgagttttctgccgaaaaccacctgtcacaaccattgacctgaaaggaacaccactttttgacattgatcggcaattgaccaaaacctgcaaaatttacacacatgcattaagtaaaagtacaaccttacaaaaatgttcaaatgatataaactctatttcttattttctccgtataaaagaaagagaaaaaaaaactgtattccaaaaagagcacaacctgtgtaaataatcttcagtacattcttatttcaccatatagaaaagaatatgttttgaaggtactaccaaaagggagtagcacagtggatgttaaggaaacaaaatctttagagtgacagcaaatgaagcaagtagtgagtgaaatgcggaaaatgcaatatagagcaaaatagtcacatacttgagaagccaactctgcagttggtaccaatacaatcagtcgaggactctgcgatgaggccatgctttttccatcaatttcctcttgcctaagacgttgaattacaggagcaagatatgctaaagtcttcccagatccactttgatcagccaaaatacagctctttccctctttaacgggtgcaaatgacatggcctgcaattgataaaaacccacttaactaagaaaacatagtcagctgtaaataaaattcatgtttgtatttatctattaaagtcttatgcttgttttgtaactacggttttcctcggccataagtgagactcctgaataaattttgcgaggaagttgtctaagacaagtgacttctgtctctttttcaaaaaagaaaaaaaaaaggataaaaacccacttaacgtcaatgctagtatttatagtatccacaaatttcaaattcatagttctctaaagaatgcaagacaatggtgacaacagagccaggatattgaacaacataaaccaagtaaccaacacgactatggatatgggatattgacacaaatgaatcaaaatgttcaatataagtttagctatctccaaagaacagggactcgatataatcatatcagaaaagacatatttcagcattgcataaaaaaaatctagttctttgcaagctaatgaaatatgataaatattcgaaatattgatactattaacaatccaaatgccaagaaatgaaaaccaataagggcgtgtttgctaataaggaatacaaatggaaataagtaaaatgtttttcgcttatacttcaacatttatgacacaatatttaaacgaatccctttcataaagaagaaaaatatacgaacgaaaacaataactaaaatgaataataaaaagaaaaaaagttggataaggtgaggaactgttatacctgaatatgtgaggggcgttgaaaattaagtttcctaagacattcaatcataaaatcactgtaacccacatctctaaaagactttctactgaaaaaatcagaaccggatgagaagttggttcgtggggtcgaatcaggttcgggtgagtcgtatttcaagttccatcctttgttagatgagcccactctagtttcactacctttcctggtccatttcctcaatggtggtggagattcaacaacatcatcatcatccactggcaatggtggatttttggttggtacttgtactacaagctccttgggccgagtagttctcactctctccactttcaacctgccaaaagatgacctcgaacgtaaaactgcaaccacaccaatggcgaaattggactcagaaaatggaaaagaaggaaatagaagagaaaatgcacatagagaaaagaaaagtacctgaaggggattgggatttgtccatgtttgtggtagggtcgttggaggaagaagaagaagtagaagcatgaattgagggagaatgaagacggggcccatggctgaggccgtagatagatatggaattgcagtccaacttcaaaagcggagaataagctttcaccagcatcgtttggattatgagcagaaagagagaaagatgcaacttacaacaatgagagtcatatagatatagatatgcactcccttagggatgtactatacatcctcggtatccataataattttttagtctaattttttttcatattcacgtacgtnnnnnnnnnttaagatatcctacaaaattttaaaaaattcggaataatttacaat

SEQ ID NO: 17332 - DNA, 5656 bp, Cannabis sativa
cgagctagtttaaattttccatcttttcactataatttcttatactccgattaataaatatggttcaatatgataaattagctagtttacatcttccacctttttactataatgtcttaaactccaattatcttcaatgaaaacttcattgttcaaaggaaaaataaaccctctataaaaatccaaacaagtaacatattgatacaaaacacaagctcaaaaatgagaagagagataattactaaaattgctacttttcttataaaagatgaaacgattaaaactaataataccaacaaataaaaaaaaacaccccacagagcaatttttttttaactcggaggcataatgaataataataataatgcaaattacaatattgcccctcttgtcaaatgcaatgcaacaatgaattatgattcaatcctatattcccttccctaaccaaccaaccaaccaaacaaaccatctctacaataatgtgttatatataataataagtacattaaaccaagtgggcaaaagaactatatttatatatatatatttctatatatattaattatatgaagtgtttagcatcatcatatgatcatgttttggtcttaaactttctttgagatttcaaatcaaccacaatgacactgatgttgtctttgcttcctttctgaagagctcgattcgaaagatactctgcagctgcttgtgctgcaggatcgatgtcctcgcctctcctctccaaaggaagtgtaccgccgttctttttgtgccatataagtattcgtttcctagccaattcacatacttcttcgttcgtcatgacatcccatagaccgtcgcttgctagaattaggcaatcgtcttcttttgctcggggaaggaatgtcacttctggttcgggaatgatccatggttttaagtatctatcacctgaaatcaacaagttcttcaactatgatagagttcacattttacgctatgctcgggtaattcgcttagtgagtaggtggaatgggattcaaacttatggatatgcattagacccttatgattctactcaaagcaacaagttcttcaagtataggctcgaaaatactaaaactaatgcccgaaatgaaaaaatagccttcgagctagggtgtcgagtatttttgactaaatctcgggtgtgttagagaaggcgtgacactagattattcttaatgaaaccctgatgaagacataatgtattgagaatttcgctaaaatttaggctaattaaatcaaaaaaaccgagcatttgagaacaaaagaaaaaaactacaacgaagtacgcaccaattgatctcgacatagccaaaacgccaaacacacggtgtccattccattgtatgactttgcctccagatgcttcaatcctagcatattcatcttccctgtttggctgagaacagaatctaataattagtttaaatcgaaagggctatatgtaacaaaacataactataaggaaagttactttatgatcagctgagagagcaatagcttctttcccacgacaaagaaccgctctagaatctccacagtttgctactatgatatgagaggagcaaataacagcaacaaccgcagtagaaccaacggtttctggggcaacgggatcaagactagcttgtcctccaacttcagcatcaaccttaagaaaacaattcatgaatgcctttctccattgctcttcacaactatccttaattctaccatgaattaggccttctttaatgtactctatctcctccatcattgctaaatggaggcgttcgcgacaatagtttgcaaccttaatgaaaacaaacaagtaaacaaactctattgtcatgaaaaagaaacaaaattcataatagagtgtcaagtattttcgatatggtacctgagaacctccatgaccgtcgtatacaccaaagaaatgagcagtttgatgagacaaatacttgttcatcatgtcatcgattactcgatcaccaatcaacatttggattggaatttttaaaagatgaggtacagaagcaactgcatcttccatctcaggtcttctaccacaaaccgaagtatatccccaaagaggaacataatccacctcataaacactacgaaccaccactccccctttctccacagacaatggtttcgagcaagaaccatcaccaccaccacaactgatttcttcaatcctaaccgagacagtatcaccaacaacatttgactcccctaaacttgtgatcttagcaacaacatcaacactataaagactcttctcaatatcaacagaacttaatgttgttgttgttgctcccacatcagtaatagcctcaaaaccgaaaaaatcctctaaactactacactcactagccacagagcccgaaccatcaagaacttgatcaccctcaaccgataaacaatcttcttcctcgctttcgcgagaatcatcaacagaagaaacacaattacttttgttttgagatatcatatctaaaccattaataacactactactactacaatcacaatcacaatcctcctcctcctcctcttcggggcaactactactactcggttctactatcgccttattaggcacaacaacaacagaatcagatagcaaatcagtagtatctgtcattagcttaagtcttgtgacatccatgttatgattagtagtagtagtagtagctactatggttgagttatcacagactgaattgcctactctaaatggcactgcaaccgcaggagacatctcctccatcaaaaatcttatctttcaagtacaaaaagttaccccaaaaaccctccaaaaaagctacacaacttgtcattttttttcaactaaactatcacaacaacaacactctactcctttttctaacaatgatgatattggaatgtgaataataatggtaccattttccatttgcctaataataacaataaataataataatcaactcaattaagacttaaagttctgaactttatgagcttaaagggtatgaaaatgaaaagggtattgagatctaaagtcaacaacaatggatcccaacttccatttttgtgaaactttagcttaaaatagataaaaatagagatacccttttaagctttgctgtcaatttcttcttctctacactcttcttctttattatctacaccaagaaacaaccacaaatctactttaaataaatcattcaattagttatataataattaaacaataaagattaaaacttgaaactaaggcaagaccttatctccaaacacaagaaagaaagatagaagaagaaaagggatcatgagaaagaagccaaagaaagctacagtcccaaaaaatcacagggaaaaaaccctattaaagaaaccatctttattttattttcatttgagttccctggatccaaggcaacccatctgaacctcttgtaattcaactctctctctcttaaataattacaaagagaaagaagatgaaagaaagaaaaactacctaatttgtcaactcttgagtctttctttcaaagacttgttctttttatcatatattatataaattatttatatatataaaccccatgaaaataatccagaagaatcagcaaacaaaatagaaggaaatgcttacttaccacttaattatagacaagaaaagtaaagaaagaagactttttttttctttttcttctggttctttcatgatttttcttatatatacacatgaaaataatatataaaaattaaatcttggtgtggggttgagatttggagaagcaaagaaagagagtggatgagaaaagattaaaaatttagaaaagacaagagagaaagagagagttagtgagagagagaaagagtgagaatgaaatggacacatgtcaaatcttgaagagcacattaaagcatctccacccatatcaaagctttttttttctaatccaaaactttatataaatctatgtaattagtattttttgatatgtattaaagtatatttttaagttttttctattgaaaattattcttaaattattaaaattattagatttaagagtatttatttaatttatttaattttgtgattgttcatgtactaaattatgctttttaaattttaatatctaccaaattatatctttcgaactttgatatatagaaaattaagccactgaattttttattcatgttgaacttttttttaccaaaattaaaaaaaaaaaaatctttaaattcaatattatcaatagtttaaagaaaatttttaacaaaaaaaaattagaaaatacaatactaaattttgagggtaaaaatcctaattacatattatttttggtaaaaaaaaactacccttatatatttaaagtttttatatatatatatatatatttatgatattcattcaaattaaaaaaaaaaaattgtataaaagtaatcgaaaaataatatcaaaacaataaaaagataatatacaaataacaaaaaattaacaataaaattataagagcacaataaaaacatacatcaaaatactatattttttgtaaataaaatcaaaaaaaccgtaaaaattatttaaaattttgcatgactatatttttgttatttttttttttatcatttttacgtatttataaaattatctcatttatttgttaagattattttcatttttgacaaatttaaagctggaagatttggttagattttgtttatatggattgatgagaatcaagtttgatttgagagaataagaattaggaacccaaaaatttaatggggttccatttttctccctcttactctaagattaagttaataatgtaatctttacaagcttatgttaattaaataaataaataaaaaaaaaaaaagcaaagtgcttataataaatcaaattagactttaagattataagactatgtttggaagttgaattttgacaagaaaaaaatattaaaaaaataaaaatagaacaaaaatattatatttggtagaaaaaaaattaaatcaaaaaacgctcaatttaacaaaattttccatttcatacttgaaaaattaattttttttcccacacttttttttattattattattttcgccaaaattcaacttctaaatataactaaaagatttcttggtatctaagacaattcaaatatatcaaataaatttttagcaaaatctacttaactacattaaaagcaatatagttaaatgttaaaaaaaattacaagccaaaaacaatttaaaattaactaacttatataacaatattaattaaatcatttaagtcaatgtaatcttttgttcaattaaacatagttgtaatcaatgtattattagcttttgactcatgtattgtcctattaagctctcaaatagtttttagattttaaaatgacaggtggactaactcatgactttaggcaaatgttggaaaagaatgtattaactttttcaattagtcaaatttattattttaaaaaatgataccacaacatataatgttttaactttaaatacatattttgagtacatatattattactattttacaatattattattagttattagtgatgctcaatattacaacaagataactttttatgaatgatttataaggaaaaat

SEQ ID NO: 17333 - DNA, 4795 bp, Cannabis sativa
aaatcactaaccaaacgtgacttgtgttttaaaaacttcaaaaactattttttgtttttatttctaaaaataattttttaaaacaaaaaacagaaaacaataccaaacatgctcttaggttccaatttttgttttttgttttccatttatcaatgacattcgggtttcatgctccatttttgctactagtgtcactgcaccatctactgccattcaagtgatattgaatcagattgttctttccacaacaatcatttttactgtccatttcaagttctttccacagttcaaccacatcaacttaaaggatatttcttacagattctcacattaggcctccatccaacaacaataatccttatctgaaatacatttttatttttcaaaaataagaagaacataaaaataataataaaaaattacaaaaattgtgaattgtacgaaatttttaatatttttatgattttttagattttatttaaataaaatattatctttttaggttatactcttgctattttgttgtttattattttttattatttaatttatatattattttcttatgttgatttgatttgatttttttgttagttttatataattttcttctatttttataaaatactgtaagaatatataaaaaaaaaaacataattttaaacgtaaaaatataaaaaaaaaaaattaaaattaatattttatataattattcttattttttttggaagaggatccaacattttaaaaaaaataaattatagtgactaaagttgagagcccttttgtagttagtggtaaaggtccaagggacatgtaattaataatcacatgggataaaaagcatttgaagattaatcattctatttttagataataaagataattaaagattagtcatttttttttagataaaagcaatatatcaccgacacatttctcttctttggtacgtaatactatatttctatatggatatgatattaatttattttgggtacataaattgattatgatcctaagttaaatgtaattacaccaatttcttcaaaaaagtatatatttcttcctgaagtggggaaagaacaacaataaataaggtgggtcatcataaagtcatatctatgttcaatcatcatatattgcaccttttattgtgatcatataaatatataaattatccatttcacatatataagaaaagatataaggtgatttatcccaaaatgtgtggaccatacatatacaataatattcctttgtgtttttaatatatatgactagttaaaattataattctttttatataattaatgatttatattaatgagaaattcaaaatattatttacaatacagataataaaatttaaacagcttattgttaaattattatgaatttttaaaaatttatatataaaatcttaaataattatgaatagagtatatattactacacctacttttaagagcaccataaaatttcctagaaaagaataaatggaaaaaacaaaaacaataacactaacattgtttttatcaatagattaactaaatcatattatttggaagtatatatattatattttgattgggtgttgtgagatatgtgcaaaggtgcttagtactttctttggtggtgtagttgattttctttaatagctcatggaaagttgaaaagggaaggacatatgaagcacatgggataaagatttttctttcaaacaaaccaacaaatatattcaattcttatgggaaaatgaaaatactatattcaataatttagatgtgagtgtgacccttttgtttttttatatatataatttattttaatctcaaaatagctttaatggtaagagaatggaaagtcctatataagactagatttgttcgagtatataaatataattaggtatggaaaaacaaataggaaagacatgatagatttcctagttccttaaactttttattaggtctacataattaaatgggattaaataacacatgtacgagtaaatgtaaactaactatatatatgatgtaagaaaaaaaatatattaaattattgatatattataaaaattaataaaaataagataacaatatttgttttaattattaattatttaaataaatagcaacatttaaaaaaataatttttgttaggctaattatagtttttggtttcgaactttaatatgtattaaatcgtgcttcttgaactactgagaattattagattcaagaacttccgtctaattttactaacagatgtttgatattgataaaaatttaaaaggtaaaatttgatatatatggaaatttgagggagaccatttgatacatatcaaaatttaagggcacaatttagtacttaaacaattgatacgttaataaaattgaattgaattaaacaaatattatttaatctaacaatctgaatagttaaaaaaaaattaatggcctaaaaaatttaaatacacaatttagtacatatcaaaactaacaaataaaattttagtagttatttttttatggaataatttaaccatatataggattgtttcttgtggcataatacctccaattcttactcaatatatgtctcgaacttaaaaaaataaaaaaagcattatgaaaatattagtttatatgttatataaaatacataaaataatgtatttttattcctatgaatgaataaattaaataagctaactaataaaacacttccaaataaagtggtaaagtaggttaaaatagtggtcaaattacttggacatggaaactatgatgcttttactaggaatataagaagataggtgcatgcatttgtccgtactataggtcaatgaggagactttgatttgatcttaaatgacatgaaaagccaagcttagtgtgttaaccatatatatttattacttagaaattatatttataatgtcacataatattatgatttatgactctaaaatatagaataatatttgatgttccaacaactctcttcacaaatagttaactatatattttttataatttaaacttaatatgaaattacacttatatatagtatttttatttaaaatatgacatccaccacaacaaaaattatttaatttacactgaaagttgaaaaaaaatataactttaattttgattttaataaaatataatttttatctacaaactctatcttttactctaaacttaaagcgattttgttggctttaccttggacaaaagagctaattagaatgaggtgaataccttctctgaatgtctttttgttgtccatgccctagatcgaaaatcctatccgaattggagactacatgctttttcatggagattccttttatcaacggttcttttaattcttaaaattttttgtttggcaaaagaaaatattttttgttgatgaactagctcgtcttgctagaattgatagagtactttcgctatataatgttcttgaggagagattgattcttgtgaatcctatttcttttatactctattggtaatgtctggtaatacttttatttttaaatttttaaatcacaaaaataaaagtgaaattttgtttttaaaattttaattttgaaaaataaaaatgcgttttataactatttttattttttaatttaaaaatagattataaaagtgtattttataaattttatttttatttttatttgttaattttatttaagttgggtttgggttcgaagccgtgatcagaggttgagtttaggtctggagtcgggtttcaagttccaaggtgtaggttggagtcagaatctaaaatattattaattaagaaaaaaaattatttaaaaaaatttagaaagttttttaaaattaaaattttgattctcaatcaaaaaattaaaacgtaaaaatattttatagaacatgattttagaaaatatttaaaaaaaagtgtaccaaacgcactctaaaatatttaataatttgtatttttaaaattatttatgtggtatcctataaaatattttgaaatggtatatatttatctatctctttttttttccttttcttttttttgaaaagctctatctctaatttgatcaacataattattttttcctcaaaagtataatttcaatacacaaataaaatctatataaaaaaaatacacaaataatacacaaaatactaaataataatctagtatattacattataattattgttttttttttctttcgaaaagttcttgttttataaattaaaatcagtcaattacaacaacataaaaaattcgaagaaaactgtctctaacaaaatataatctctatccaatcttaaagtgaattttgtcaaacctagagttgttttatgttccctcataattgttgttttattaaatatgaatctcccaaatctaaatgttaactagaaattccaacggtattactattcctttaacaatccaaaaattgacaatatttaccacatttaagcatataatcatatgtataatattgtcaattatcatgaagtactataatttgtttatttctgttcatttatagaatcaatgtaagaatttctattttatcttagaacaatatgatcactcccatcaaatgatatttgctaaactattacatgatctaataacctaagagaagtgctaccatcaatctcctgttataatctcttagtcaacctccattctgaaaacacatgtcggaatatttttttcaacttttttttttcacgggggtgtttgttatgcttataacatcatttttgtaaatttt

SEQ ID NO: 17334 - DNA, 3607 bp, Cannabis sativa
  modified_base (26)..(28): a, c, t, g, unknown or other
aaaccaattggcaatgagtggagtannncatgttcttatatatggctcaattctctaccatttatttcatgtgggacattgtccacaataaggcaccactagttccctttagcatttgtcgttaaaaaaaaaagcctcaacgtgaagtaatcccacaaagcacaatattcaatataatcccacaaagcacaaacaaggatttgggataagttactaacttagagagaatcttttcgttatttcttccttctttttatatgaatggatttaatacaaggtcataaggtgaagtttaccttggatgagtttggaattcctttgaatccttttcttcatattatatgaccaaatttgttacaaattcaatatatttatctcttttactattattattattattattatttgatcatatataaagatacatcttccaaacccacataatttccttgttccagcaatggttgaaactcatgaatggccaattaatttagttccatgtttgaatgggatgggacaatgtctgtattatttcttttcttttttataagtagcaataaagggtgctacttcccttctagaaaaagaaggagcatagttatagggcgcaacccaagcagcaatcatacattattacatgatctaaatctctaagagtccaaacaacatttttaaccaggcattcacctaagggaaaaagaagaagaaaaaaagtatattagaattgaggaggagaggggactacaatccaaaataagtttgtttcacccatacgaaacaccatagagtagggcccatcgactccgcttcaataggggaggccacatgcatgcaatatgccccaaatgacttccacaaatctcctaacgctcccatcttctaaattaaatggcttgattctatatatggggtgtatttctaattatttggggagctaataaataagattcaagttgtacaccctcaaaaataattcaacttaaaaaaaaacaaattgaatttaccggaattataacattttttgcccataaatttttgttttcgtgtgaaaattccatcagaactataaaaattgttagtaaatattttccttaagttaccggaatgtactaagagtaaaaccccattcttgctagtatcaattccaccagcatatgttcatacaatggtctccacacctactactccagtcattggccaaactgtgacggctgctctacaacctactgatcttcctactattatcaatggatcaaatggcccaccaatttatgttgcaatagttaattccatcctggcattatcaaagctcaagaaaataaattatctttagttttttctaagtgtcaattggtctcatcaaatggtaatgctcgccaaatgttgaaacgatgtcgtacccgtggctccccactggctgattccaccaacactcatgtgtaacctacagttgattccatttctgaattgtctaaaggttcaatagtggaggatcatagttttgctcttttggcgaaggatgttcaccaatcatcatgaatatcatcagctggaacgcttggggtttgggcagtccccaagcatctcgacaactctaacttttcgtttctgaaaataattcgaatgttatttttattatggaaactaagttaaaagtaggttctttttctaaattttgtaatgtaataaattttcttaatggaattgaagttcctaggatatagtttaggtgatggtatgatgttgttatagaaatctggtattaatgtaactattataaattatgcaataaattttattgaccattatatggcgtttgatgatgaagagcctttcacatggcataacaacacatattctagagccaataaagcaattagaatatactttctcaaatgtgccatagtctgatagtttttctctgcctactctcaaacatctcgacttttataagtcgaatcacagagctctgcaacttctcatcacccttaatggtcagattcaagctccacgctacaagcctcgtttttactttgaaaagatctggcttcataaatctgcttatgaggatatcattgcccaaatttagcatgataatgattccccttccataaaccatttgatgcataactttgctcatgcatcctctcaacttcaagtttggcatcgttcaaaatttggagtccttccaaaatagattcgtttatctcaagaaaaagttgatggtttgagaaattcttatgatacttctccttcccatttcaatgagctttataattcatagaatatcttgaataacctaatggcacaagaggaggaatactagcaacaacgtaccaagattaattggatgcaagctggagactcaaatacaaaatattttcaccagcttgcaaattcttggaaagcaacaaataaaattatcaaatcaattgataattttggtattgaacactcctaaaaaaatgttatctctagcattattggtaattattattatgatgtataccaatctgatggagtggaccacattagtaattattaattttttttttattttaatgaaatattaaataatttattattaaaaaaaaaaagtaatcgatccaatttgcactattgtgaattttattggatttaaactgctatgcggattgaattgaatctaaaatataaaatccgcacttagtgcgaattgaatattgtttgatcaaaaaagagcagattgaatcggatgaacaactctaactacagttctttatggtcagcatgtcagtcctttaagttgctactccttttggtcccatcattctaaaacatttttccatgctttgcttgaatgtaaaagagcaaagtaagtttggagattatcaaactttaactttgctgtctttatcagctactttcacttctgcaaagtatttatgtttcacattttagatgttttctctcaacagaacttagaacatattgtttgcattatttaaagcatttggaatgaacaaaataatgaggtacatggtaaaaatcccaaaccaactggtgttcttctactccctgccttaaactatgtcacagaattccaaaatgctaaaatggtcagcacgccaatggagacttttggttttggccagcgtcttctaggcctttggtaatattaacactgatgctgcagtaaatacaataacaaaaaattctaattttagcgctgtccttcataactcagatagtgagatagtgactaccttatcaaagccttttcaaagatgcttcaaaccagaaattctcaagactatgactatcttttacaaccttatgtgactagttgaattgcaactgttggaattaattccccatataagtcaacctgtaactatttactgaagttaaaatagttagttacaatcctaactaacctaccagctttacaatcccacatcaagacagttagcagttattccctaaccgactatcctcagttacaatacttataaatagaagaacaaaatgaaagagacttacagcttcaacaaatcttcttagatctccagagaaaagaagatgaaaaccccagacctagagtgagagagtttctctcatgtgtaat

SEQ ID NO: 17335 - DNA, 5111 bp, Cannabis sativa
aaacacttggtcaaaacttaaatatataaatataaaatacttttagtgatgataaaaaaccacacgcacaagcaaaaaaaaaataaattgtagtatatctatatcatatgttatttaccataaatgttgatgaaaatatattaagataaaatattaattttgaggacacgtgagattgaaggcgggtccacccgcacattaatctcataatctgggattagtaatgggttacgttttcgcatcacgggattactgtgatcaaagaacacagtgttgaccgttgatcatagtcattatataaaattaaattatattccctaataataagtgagagcagcatttgtaattttgtcaaagcagttgattattcttgtttggtggtctgtgggtaggaaggaacaagaaagatgtgtgcatatgactttgagattttgtaatgattcatttcgaatattgcatattattttaattgaaatttcacatactttattattcttaataaaaataaattcagttcaataataatactgaaaatgtacaatgaatcctttcccttcacatgactcctcaattgactttaataatatcaacaccattacttggtaaatataattagtttagactatcaagctaatgacctaattttatcagctaattacaaatgatccctaaaataaatttgagcacaaacataaaattgaaaatgtaattcaaaatttcacaactaattaaaggctgtcataaaatttgtaacatataatatatatttacattattatcaagcatttctattggagccacaaatgctattcgtcctttttatgaaaaaaaaaatatccaggtttgggacccacacattcgttagctcttgcagtgttttaagagtggtgaccatcgaccaaccacaattttcaataaattttttacttaatgtgtttccctaattactttcatgtcagtcaatatgtacattattacaagacaaaattgaggtgaaaagaacaaaactttgcataagagaaaacacttgcaactttccaaagtacagttatagcatttagatgataaaaaaattctccacgaaaagaaactacaataaatatagcagaaagctgtcagaacaaggataagtaagctcaaagtcagttggaattttagttcattcaagcatacatgataatcaatgatttatgcctatagataacctcccctatttcttttactctcacttgttttgctcattttatccgtgcttggttcactttcaactacagtgtgttgttatagtaatgatacttgcaagatgtgtaactgtgagccccataaagataaagctagtgatttcttagggttcagaataaccaagctgtttctgctgttatccaaaggttacccacattagtctgacttcttatctggtttgtcaagagcagccaacctttcaacaagtgggggatgagaatagtggtaagctgagtaccaaggatcagtgttcatggctgacagattctcttcctgcaaaccaagacatctatttagtgctgcaaattgcatgggctaaactttgaaaccatgtgtctaaaatgacaaaaattaattgaggcgctcaaataaagtaactggatttacatacacgcaggcaacaaacccacttttggaacatcaacacttcctaaactacttgaaacagtaatttacttaagtgtagagcacgaatctattaaattattaatggggaaaaaaaaatttaatacctgtagtttgacaagagcagcccgaagtgaggaggtatagccaagcttcttagcaaaggcatcagcctgcaacaatgatagtatataaaatcatcaaaatgaagaagaaaaaagccacactgacaatgtacccttctcacaagaactcacctgaaattcaaaagatcggctgaccaggttaagagcaaaactaactagatgctggagcgggattacagtgtgctgccagaaacaaagccagaaaaagataagttgcacagtgtcagccataactttgttatatctgaataatgtaaattgaaattgcagtttcattaactgaaagatccatggttgtgttgaagaatggaacaagtttcaaggataagtaaataatgagctcagcatgtgggcactaaatttgtattttcaatatatacatacatataaatatatctatatatagctggaaatgagttaagcaaaggaaacacatcatgtgctattgaatatgaaaaatttctgtgatatcacacagaagttttcgtccagccgaaaaaaaaaaaaaaccaaagaatttctgtttctaatgctaatgcagaatgaagaattccaagacaattacgcatgcatcatatgcaaaacctttagtaaacccacgtatatttcaccaatttccttcaacaaggtaactggttcagccctacactctcttaattcgtacttttgacttcagtgatggcatgaatattaaatgtaatggcaatggcatatcaataaaaggtcgatgaacaaagcatcctctggtaagggcattaaaaaatgcgtcgtaagatctattctcacacaagtacataaaaactacactttagttatatatatacataccacacattaacagtaaaagtcaagaaactaaaaagcaatgagttaagcatagaactcataatccttcaaggcaggatatttttttcttccttcattcacagactacagtagctactcttttctacgcaagtacctgaaatattataagtccaataagtactggctgtgtatcaaacccaaaactccggaacaggtcacttgagttcctcacaagagtatatcctccaaattgcaaaagagtgagaatctgcatcacaagaataaaaataaaagccaaacaagggatacttggtgagacacaatatagggactgtcatcaaaaaataataataataaaagaaagtgtaaatgccactttgaaagtcaaaataacagtttgaaaccctgtaactatatttgctaaattgaaagaaattgtcataatacggtcctggcagaaaaagttgaatgtccaagtcaagtcaacaaaatctaatgaataggcgaattacatctgctcaattttccaagctcaaatggctaaattcttcccctatttgcaagtttccaaatacaactccaagaaccaaagttacccaactacaaactacatgctcatgtttcccctaaagaaaagtgataccatttaaatcacaatcctaaacatcacagtacacatccactcacagctaaaaataagtcgaagcaaaacataaaatgcctttatgataaaattacattttaattacagacacgatgatacactataatataacagatacagaaggggaaaaaaaagctggatcttcgttaaaaatgtaaaaattgcaaaacaaagttgcatcatacctgcacagctataaacgagtacattgtatgattaagcttccaatgccctagttcgtgagctataacagctacaatttcttcatcatctttgcactacaagaaaaaaaacatagccaagtaccaattgtcactaatatgtaatgacagcaaaacgagaagacaaactacaaaatacaaacacagaccaatttcataaacatgtaaaagagttgtagactagtagtagtaacactggaaaatatagaatagtacaatttatcagtgacaagataagtagtaggcaaaaaaatgatttccttagtagttttttgaagcacaattcaacctagctataaccagtattttacaaccaaatttaacaagatacccacgggaagaaaatgtcttaaattatttggtataacataccagattccacgtcacatgtttatgactatataaaattcactgccaaattgttaggatatttccttgttaagaacagtcttcttggattttgcagaaaagaaaaaattacatatcccaaaggccaaagatatacccaaaaaaaaacagtattaagttaacaacctaagaactacatattttttccctcacctgttgaattagtgtatcatagagaacaattcgcttgttcttaaagaatccgtacatgtatgcctgcatcattcataatcaacaacaaagaaacaatcaaaatcaaagcaattaggtattctcaatccaaatatatctgaaaaaattattggccatcagaagaaagccatgaactacaaaataatagcatcttaaataaacatcattaactttctggccaacatctgtttgggtaacagcactgtactttttccaaccacttatacatgaagatgtgtaactcaagagcataagaaaataaaaattcacatattttgcattcaccttcaaaatgctccttattgcattcaataataattaacataaaactaacctcatatgtccatttttgatgaaaatgattcaaaaacaataaacttcattcaatgttcaacattaagatgccaagaatttaagaaatagtaaatatgtaaagaaacatctcaaatatgtagtatgtgaatttatactaagcaccactgatacccagtcatatttcattaaaaaaaatgcaataagtcaaaaagctcaaactcacattgctatgacttgaccttgtggatccatctacaacaaacaacttcttcaatggaaatttgagagatgcagcaagtttttcaattttttccctgagaccaccttctggaagctacaatcatacaacataaccaacagaaataaaaatcaaaaccaaactaaaagtgagcatgaataaacttagtggatgacaacttttttgaatactcacaggagtgaacttgttaaaaagtggggctatgagaattgggtagagtgtcatcatcacaattgatagaatgaacataaaggcccaaagatatatggccaagtatggacctcctttctgcaattacaatataaatctttaccatttcaagagaggaggttactcaagcatagtgcaaaatagaaaacattattagtttattaaaccataaaatatttaaagaatttttccacacaaagaaaaagaaaataacacagccaatttgttttgaatacagaaac

SEQ ID NO: 17336 - DNA, 3910 bp, Cannabis sativa
ctatgcctagggccggccctggtggtgcacaacaaaattattttccaaactcaaaataaccactaaaaaagaaataaaaaagattggacaaggagtatagataaggaaaaattgttccaaataattcaataaaagcttctttatcattattactctttcatatgagatttacactgtttttggttcatcttacatatttgatagaattgaaaaaattaacttagattgatgagactatgacattagtacagttcacagttaagtaaaagaaatttctatcactctcttataacttaaattcttacagattagtctaattctgtaatcatcaaatgtctctaatcctctttctccaacacatgagtatttaacatctcaatcttcaacaattctgccatttccacattaccttgttttctgtaaccagaaataaaagcactgtatatctgataagtcggtttgaatcctttcgaaaccatttttgcttgaagccttaaagcctcttccatattcccttctaaacacatcccagttatcaaaaactcataactcttccttgttggacaaaaaccaagatgcctatctgcccttttcaaaatctccaaagcttcaaacacccttttcttatcacaaagccctttaatcaatgcatccattgttgtggcctctaccctaaagtcccttctacacatatccttatacacaaacacagctgaatcaatatttcccacctttatgtagccacttactatgtgttctagtgtggcagtagtgctctctactccactcattgccatttctctgtacaactcttcacctttttcaatctctccaactctgcaaaatccaccaattattgtgttgtaagccataacatcaggtacaatgttctgtgctctcatttcatcccacaaagcttctgcttcctccattttctcatcatcacaataagctgccatcaaaatactgtaactatagcaattggggtcacaattcaattcctctaattggtcccaaatctccctcaccatgtccaacataccatcctgataaaaagctaccattaaagtgtttaaggtctctatgttgggcttaactctagaaactcttcttaacttttcatcatcaacactttcacaatctcctaacccaaaaatctctttgtaaatcaagtaagcttcaggagctcccctagactgtgatacatttcgaatcaaagaattgcaggtgctaaatttgggggtaatattgcgagataacaacatcctcacaatcttaatggaagaatcaatcttcttggtttccaaacaagctttgattagcaaatcaaacacaaaaggcgccgagccgcattggttgtaggtcttgagaagggactcaaagagtttcaaagggttagattgagattgggactgaggttgagaccccgaaacaacccgaaaagcttcgtgaatgtaaatcagggcttgggatttgagacggcctcgggcgagaatatgaatgagagttgaataggaaaggaggtcatggtggcagagggagttttggttggtccagttgaagaaacgaatgactaggtgaggattgtttttcaagtgaatggtgatttgagaaaattgatgtggattgaagccattaggagagagagatcggaggttagtccaacgagattttgagcgttggtgggtaaggacagaaacgatagttgagattggaatttcaccattactggagctggaattgaagaatggtgaggaagagaatggttttggttttggttttggggtttggaagagaatagttttgagtagaatacgaattgccatgtttgaaaacatcatcccattcccatgattattggttcaaatgttaagatcagtttctatcactcttgtcccataaaagcagctctaatggcgtagttgttgttagtaatggcttccacttgtctccaaaggaaacactcaacttgtcaacttttctctctagacgtagactctgctccaatcccaaacctaacactctctaaacctaatttcctttccaccgtatagtggaaaatccctatatacagacagagagagagaaaactgtttttgttttctttgctctgttttagaaaactcaaacccctctctgtgtttgtgtgattctgttctatgtctaaaggtttcaaaggtacatcaagtaccgacgacgacaacaacaacaacggtaatggagttttgttcaagaattttttcgaaggatggttagttcgtcaagaacattacctggatgagctaatctgcgccaatcaaaacttcgatgaatcttctgatgatgatcttagagagcttgtttctcgaattctcgctcactatcagcaatactacgaggagaaatcgaaaattaccgagcgaaatgtattcctcgtgtttttcccgccgtggttcacttctttagagcaagcttttctctggatcgctgggttcaaacctggacttgcgtttcgtctggtgacgaattcgatcgacgatctgtctgaggatcagatacagaccttgaatcggcttatgagagagaccaaatctcaggaacgtagcttaaatgatgagctcgcgaagatccaagagagcattggtgcaccgccgttgttggagatcgctagatgcggaggaagaagatcggttcacggcggcgaacaagaggaggaggattccaactcggattcggctatggcggcgctcaagtcggggttggaagccgtggtgaccgccgctgataggttgaggatgtcgacggcgttgaaagttacggacgtgcttgaatcggctcagagcgtgaaattcttggcggctgcggctcagcttcagctccggctcagatcttggggtttggaacgaagaagaagctgatatgagagtgagagaaagtgaaaggaaggctcaggagagaatctttgaggccacaaattttttaatgggacgaatttggtttttatatatttatatttatatatatatatataggtttcggatgaagtctatattattattattattattattattattatttgggtttgggattgtacaaattaattatataattctgtatttatatagtgagaaaaatcacattttgagtctttaacgaggcaacaaatcacttttgttgaagattgaaggattaaattagatgccttcttagtttaagtttaattaatgtctttggtgccttagttcgaattgtatttttattttaaataaaatatctctcccttaagttagtgaaaatgtttggaagtttctttcttggacatgcttggaattgggttttggtaaatttcacaaacttataaaaagtgacatggggccttggttttgaattgagctgtggattgatggttgtggttgttgttcttaagatttgatgcaagtagaatatgcagttgccacttgggggttctagggtcgtgggtatgtagcaagcttgatgagtgagcccttgacaagataataatgggcctttataaaggtgtaggattagacccattattcaactcgagttgctgttggggtcgtcatggtacaagtgaagaagtagcacgaggtttcagactctttaactcccttcttcagcaaatttctgtatcaatggcataaacatgccagtctcttaatgggcttacaatatacttggcccaattcattcgattgggaaaataccacaaacagatgacatatctatctaggatagatattattctcaaatatattagaaggccatatttgtaatatttagtagagtaatttacgatgacaatatttaaaaagtataagtgactgtttaaatgagtaacccacaatcgtacaagtcggacgaaacccttcaaggagccaatgtggataatgttagacatttatat

SEQ ID NO: 17337 - DNA, 2002 bp, Cannabis sativa
tctgactttgtatatctttggctagacaattagtttgttgactgaaattttttttcaaaaattatcagtgtgattcttatccctctttcaaaaataaataaataaataaatgaatcacataaacaaagaaatacatattttactttcaaacatataatcgaattgccatgataattgataagcaaagaaatacacacatatatatattaatattttataacaatttttatatacatattattaatattttataatataacaatacgtaatatcttttttttagtgtatcttttttttttctaggaaaatgcatttaaaattagggttgcttttagtagttctcttatttttttaggttgagccgatcttgaaagagagcgaaaagagaaggtgcatttctagtcgatgaacgacattattctttataattgatttgacaaacgatgtcgtttttgacacaacaatttaaagatggattaaggtttccttttcctggccaggctgttgttccagtacccacatctttggtccaactatacacaaatgtggccccaagacaagataaatataggataggagcttgtttaatcattaagaccgacattttttttttctttctatttttaattttttaatgcatagacccaacttttagttaattgttaatatgacacaatatataatatatagctcatttaagtctctatccaccgtttgaaaatatttaactacaaattcgtttaaaaccacacccaccagaaagcttaattaccatttggtacatgaaataaaagaaaggtaacaattgtaaacttaatttgacagtacataaagaaaaatgggagtgatatatagttttctacgttatttatttaatttcaaaattctcttacacatgatgatgatcaactttacccaaataaagaactaagcatcaatgtacacaattagttaaatcataattatttctcctacgcatttacttgttcttttttcttttccatttttctagaagtgaagtaatagtatcatctaacaactatatataaaattacgataagagaaagcaatgaaaatgaaagaaaataaaaaatgtgtgcaaagtgtaacaaacgacaacaccactccagccattggagaagcttggttggtggacacttccccttttgtgggtctgtcagcagctaaacatgtgtccttcttcctccaactacttgtctattttactccaaataattataagtgattatttttttcttctcaaacattattaataaaaaaaatatattattcttcaaacgtatattagatagatgcactccctcttttttatttttttatttttttttatttcaacaattgaacaaatttcctttttttaaaaaataaaataaaataataattgaacaaattaaaagggaaaaaaaatgcattcccatcattactcaaatattcaactaatacatttttttcaaccaccaaaaaaagtttctttgagtttcggcaaaaataaaataaaatgaaactcatgaaaatgtttatttatttttttgaatgtggggtagagtacgttggcaatacatgaaatgtccatgagtgactataaattggtggttcctctttttttaattctatatttactctattttaatatttttttcaatcgggagaaacatttattaatggaattaaaagcttgataaaagggtatgcagcttaatgaaaaagactatatatttctaaataaatatgtatttacgtagaaaaaaagttgaaaaaagtttcgtaagtgggtgtgttttattatgtcaattgtcaaatagtggatactccatataagcatttaatttgaagaactatcacccgaaaaacaaaataaaagttagttcattttaatttaattagcagaaaagaaattaaagctttttaatttatttcaatactgttgttatattatatgtacgaatctcaccaaacaagaatgacttgcattacactaaaa

SEQ ID NO: 17338 - DNA, 7765 bp, Cannabis sativa
  modified_base (7730)..(7738): a, c, t, g, unknown or other
tattctgcaaagtaaaaaaaaactccacacagatatatagttacgaatacgtatatataaataatttaataattatttaatttaatattattaatttagtttatatttattattgtgtatttttttaaaaaaaaatataattaatttaaggtaaatatttttataaaaaaatttattaaaataatataaaatatcaatttgtaaatttatgctctaataaaatattaaaaattagagaattaaaaagaaaaaagaaaaatagttttggagtgattttagagtgacatgtcatcgactcattattctcctttatatatattgatttactataatttttaacatatgctaaatttgataaattttttaaaatactagaatagcttttttttttttttcaaatgcactaaattatagtaatacatcatatttttagtactctatattagagatattctgaatcaccttttgacacactattagagaacaattttattaaatacgttatattttaactttgcattatttatttgtatcttcattaaagatgtttacttaagaaaaatgtttggcattaatacttatttagtttagcttgttgtaatttaatatttatgtaatattttttgggaaaatttttaatagacattctcataacataattgacattgattaatttaatgcccttgtattaacgtgacacatcaacgtctttgccgcaaaactaaaataatctcataccagtatcccaaatataaaacccaaaatatattagaaaatttacatatgagtactttattttcactatatttacataaatgtgatggattgtgttttattcaaaactataccattttatataccatttttaattttattattttttgaaaaaaaaattgaaaaaggcttttgagacgtgtcttgttgttgctgatgtcaccccatcacgtcgatcacgtctccttctacacgtagagtcgaactgttcatgcgcctattttttgcaacttttttttttcaaatttgagtcggttattcagtattagaaaatgtttacttttaatattttttatttttatatatatataaaaaattgaataacggcatattagttagttttttggtgtttggttataaataggaaagtttctttataattaaattttttttagtttttctgtttttttttttttttttgctctgtttttcttttttcagagttatgggtatgggttaggatttcatcttctttagtagattctctattgtttttttaagttttagtgtgtactactgattagaagtgtttttagtgcatcattttggttactcattcttttgatggtttggtactgtttaatttttgagtattcttatctcctgtatacttaaagaaatagttaaaactcgtcctttaatttctccttctcattctataaaattagcttctaataagaaaaaaaatgaataatgtatttgatgatgaagatggtggtgattctgatcgttctgctggacctagtgaatcctttgatggtagccgtgacactgctttgcaaactaagaggaaaagagttgctgagaaagttaagaaggaagatgttcggaatctgaataagatgaagcaagtctgaagatttgcttgaggattatgatagtgaagacatggaggttgaagtttgtagtgatttgaaggtattttcatgattttatatattgtttgttactttttgtttacaatttattaaatatttaagtatttttttttttattttagagtttattgttatatatatgaagtattttttatcatttattataatttgtagtttatatgttaattttagttttttttttctttatgcatgttgttgtttatgttttgtttttgtcatgatttttgtgtttgttttgtctattaatttttttttatagatttgattctatgttattaggttacggtttatgtgtatttttttagtttatttgttaatttgttatgattatgtatttttaggttacattttatattggtatactgttttaacaatttatacattagtttagtttatttttttaaaattttgtagtatatcaaattttgttattctatgtttttaaaaaatatgtgtttactgtgtttatttttttatattaggaattttaaggtttattttgttgttttagtattttaatgtgtatttttggtggattgtattttatcgtgttagaaatgaaaaaatgtgtttacaaaatttcatgtttatggtttactttgaagttattttttgacatttattttttggtttaccgtatttatttattgtatatcatttgttgtttcaggaatgggatttatattacaagcctaatgaaaagattcagggaaaagtcatgttattccgtaatcaagataacattgttgttaaaaatatcaattttaagttgactaaaggtcaacgtaagattcttcatggtacttgttttggttattttttagatagtcatcatgttagtttttagtctcaaatagttcataatgccttacatagggaggtatatcagaaaaataaaaaagaaatgtggtttatgtttagtgatgagaattttagatttagtttagctgagtttgcagttgtgtctggtttactgtgcgttggtgattctgatttgagtaagtatacacacagagaaaatgttttactttttttttgtatatttttagggtttgggggtggtgatgctgctaaagctattggttcagattcatatgtagatggtggaaagaatgttgaagaaggtggagagtgtggagattttgaaaataatgataatattgaagaaaaagcagtggacgtagatgcaagtgggaaggatgttgaggatgttgctagtaagagaaagttgtttgatagtcaaggaactaaggatagtattactgtgtctgctttggagataataaataaaaaaattgatgcttatgagggaagcattaaaaatgtttatctaattttgtttttgtttattgtatacttggtttttttttatgttatattttgttttcaaatttttaggttgatttataattttttttattattttaagacaagtttttgaacaaatttgaggcaacaacacctgatggagtatctgcttttggtttggagaaggtttgtttacttttgttatttttgtatgtatttttagtgttggttttagtttactattttaaatatatgttttacttttttacatgatatgaaaattgaaaatttaaaagcaaagattcctgaagttgttggtggagacaagaaacatggttctcaagaaagtttttctgtgtctaccatgaagattactaataatcaaatagtttcttatgaagacaatttgaaaagggtttgttttttttttttttaagtttgatttaatatttttttaattttgttattgcacttgtttttaatgttaggaaaagtccataaaattggaggtaacaactcctacagttgttaagagagagaggaaacctggatctgtatacaatagtccctataccacagagtttagttcaggtattattggtacaccaaaaggtggacaacctggatcatgtgctattagctttggattttttaacatgattgatgatgtgcaagctaaatcttttgattagtggtttaaggttggatttaatgataaaaataaagtgaagaaatttaaaacatgtcacaggaagcttaaggttccttcggattttgtggtctgttaaattgacgataagatgtgattctatgatttgcttgctgaggaaagagcttgtcatgctcagttagtgttttacgactttaacatgtttaattgtttgtatttttttttatgtatttttataaagttggattgttttatgtttattgcagcatattgatgtttatttttctatttgagaaagaagttaaagtatgaaaagtctgtgagaatttctgcaaacactactgattgcttctttgcttctcaaatttttgaattatataatgagtttgttgcaagtggtgaaaatgttgaatcagttaggaaggattctaaggcagctgcatacatagctgggttttatatattatgcagtataccttggattgagcttgatttcatactaatgactgttaatgtgattattcttgctcattagacattgtgtattcttgacattaagttgagatgcttaaaagtattgatttctacgaggtttggaaagtacaagaacaactcaaagaattttgttcgtgcattttctctaatacttcctatattgctgtcatatgtcaatttctatgaggggatgaaagatattgacaggagtagtaagcactggcaaggtaaaaaagagactgatgcatttgatattgtcgtgatttgataatttgccccaataagaggataggtaactattttggtatgtttctatgtttattattattattttttttttgttatcttacaattattatggtttattctgtgatgtggtgattgtggtatttttattgtaaagtatgctcattttttttatgcatggattggttgataagattcttaagaagctggacatttcattcactcgtaagaagttatatgttgacttgttgttcatgcaaagaagaagaagttgagtaggtatgagtcttcttcggagttcccgggaaggatgccatagattgctacaatgaaacaacttgttcgattcttagtttacaatattttgaactttatatgtcttttatgtcatgttgtttgaactctaggtttatgttggtgttcatttaagtaacttttcggtttacttaatatgtttaggagactattgcctattatacttttgaagtaacatttcggtgtactagcacattatgtgcagttttaacttttgtattgttataagacaatatgttaaccttttggaatatattttaggttttacatgaaaattagttttatgtactaacttctgtatgtgatataatttaattttgtttatgagtttatagaccattgacagtttcgtataccattatcagtgttataaaccaatttaatggttgtaaattaataaaatgattataaactaattacagttggtaactatacacaatattcttaacttgttatttttaactacttattttatatggattactagaatttttaaggcatggtatattaaccatggtattaaaaagtattcttagtacattagaaatatttatcaactgacaattattactgtaaatattttttggttactgtgtatatagtaaccatgtttgatatttctatcaacatttttcttttcttctttctcttttttttttcctggaccttaactccatcaacctcttttctcttctctttccacgttgtctccctctctctcttagcttggtgcggcgccaaagttggcttcgagtccaactgtggctggcggggatgggacagatatgtctacgacgttcgatggtgacgggatccaaagcatgtagcccaaatttggagtctcatcggagcacgttaggccatcgactctgggatagatctcattctccctctctctattcgtggtccttctgtgttgctctcaccgtttctcgttccagctctgactaacaagttggccaggacagtgacagtgcacgagaaatgatgattcggcaccaccatggtgctcgtagaccctaaaagttagctccctctctattttctattatctcaatttctctttgtcactctctctgatttgtgcaagggtctatgtgcgaattcgtcgtggttgatggggttctttgtttagatctaacaattttataatagatatatatttttttaaggtctgggtatcttttaaatttgtgtattttttatgatttgtattgtacttttaccgttataattgatctaattttttttttttttttgtggtttaagatttaagaaagaagataaaaaattaaaaagaaaaaaaaaaagagaaaaaaataattatttttcaattattttggtgggtggtggtggttgcgttatgatggtggtggtgggagaagatggtttctgggtagaggatgaaagaaacaaaagaaaagaaaaaaagaagaaaaaaaataattatatttttgaagtttttgttattttaaaatttaaaaatatattttttttaatatttatattagatggatcaataaaaatttgtcacgtgtatacttttgtaaaccgtagtaatccactttagcacttaacagactaaagtaaacgaaaggaatacttttagctctaattatttcagtctaagaagttaattgtactaaatttcaaagtttaaagagtttgaccacaaactatccaaaataaaaataaaacttatgaagtacatttttagttttttattttcaaatttaaaaacaaaaacaattatgaaacacatttttaaaaacaaaaaaccaaaaattaacattcattttgtaatttaaaaaattaaaaaacaaaattattaggcacccttaaagttcaactttttctgtgtatttaccttcagagaaaaacgacaatgaaagacatagtttgaaaaagcaatggaaatgtaaaagcttgtttcttgtttgaagggcaccacaagtaacagtgtgttccatatatcttttttttttctaagggtccataaataatctattaattattactttgagcaaaaaaaatgtgttccgatttgttgagattgtgaaaagtaagaaacagaagcaagaaaagaaagagagagaatggaatcaagctcaacctcaaactgagaaagagaggctttatttatattaatcaagaggaaattacaagaggcagacttagttaaaactaactaacggaaaaactattaaaacagttacaagaaagataaaacaattaaactgatacagacaaaggacaaaaaggtcctaacaccccctctcaagttacactaggattcctaagtgttaacttggacctgaaattctcgaactgtggtataggaagagcctttgttagaagatttgcaatctgatgttcatgagatgtgtcgtatatcaagttgattagcaagcacacgatctctaataaaatgaagatcaacctctttctgcttcgttctagcatggaacacaagatttgaagcaagacaagtggccccaagattgtcacaccagagaacagggcaagacacattagacaagccaatttctgtaaacagagactgcaaccatatgagctcagttgtggcaagggcaatgactctatattcggattctgtgccggagcgagcaaccacagtttgtttgcgtgaacaccaatgaataagattgtctccgaggaacacacaatatccagaagtggatttttgatcatcaactgagctggcccagtcagcatcaaagtaagcaacaagctgaaggttggcagaaggcttgaaatggaggccaagatcacatgtacctgctaaatatcgaagaatccttttacaagcaaaccaatgctcagatgttggagcttttaataactaggagagtttgttgacagcaaatgaaatatcgggtctggacatagttaatattgtagagctccaataacacttatatatagagtaggatcagttagaggtgtgccacttgttatggaaagtttggtaccatggacctgttagaatttattttaccagnnnnnnnnntctactcacaagtatgttattttaaca

SEQ ID NO: 17339 - DNA, 2605 bp, Cannabis sativa
aatcttgttgaatggagttttcttggtctctttgttcatcttattgttattcttctattgatatctcatattttcgtaacaacaacatctttagattgagtctggcatcaaaggtatgacatgtcagattgagtttggagggttaaccttctggattcgttggtttagatttacccgtaacttaatattgattgaattcggatctcccgaccagctccattctttggtcgggctgttggactttttatgctttgtgaattggcctgtaagttaatttaggacacacacgtgtcacctatccggaaacgctaataatagtgttttaagagattttctcagacctcagtgcttcatgcaaatgcctctaaaataacagtttttcaggtatgcaagattctgatgtgaaccataaatgtcttggcatctgtgggaagcatagtgtgagatgcttgctatgccaagagagaatgcttgtgaatgttgttttaatgacaatccactcgtattgggctcaagtgatgtcgctgcctaaaaaaaccctgcacaaaattgacaatatctgccatgactacttgtgaaatagctctttagattgcaaaagtctcggttcagtgtcttggaaaagtttcaatataataataataaaaaaagattctatgttgaacttagtaacatgtttgtgtatagatttgaaggtttatatgtttcatgcgtgtttgagaattctaacattttgtggtctcctttgaagtctcacaaataacatagcacactcaaattcggatattcttgacttacagaatcttacaactcaagctaaaacattgctatgtatatcacgctgtattatgtttatttgtatttgaattactgctatatatcatggtgtatgttattattctttgaatagagttgggtggcttcctttggagacactcacaaataacatagttagtacagtactagagataatatttttgcatgcatatgcacgagttagccacatacctgttaattaatatagcacatgtaaaatgttaggtacctaccaagtgtggtccacattatattaatgttatagttgagattcttgcattgtagcactaaataatagaagtgggcattaatttagatagctactttgatttttgaattcgtgtagtgtcaacatattactaagaattattagatgtgttattatcattcgttttctagcgaactacgtcggacggtatacagtcttcgaagaatatatacaactaaatagagatatcctacgtgtgattggagtttcttataattagaaagctcgtccacaaattatatccacttcaaaatttgttattcttatccacaacaaatgacaaaaaaaaacataattgtatgtattcatgagattaaatcgagttttttcataaattagaagccatttttgggtgcgtgtcattttgaactataagatagaggacttttggcagcacatgtcggcaaaaagagtggcatggtacagctaactcatttcagtaaattttttaccggcgcacaattataccggtaaaagtagcttatggcggcgcaattcgtgaatggcaccatgagaaacctaaccgctttttggtgcaaataatttttattgatttgttaccttaaccggtgcatatttgcgctggtaaaaggtctaatatttttgtggagaaatttctacgtgcgaatattctttgtcgtcacaattaatcttttacaagcgcataaagccaagaaaaaagtaggtgagaaaattcctacttgacttttcgatgagaggaaaaattttacctgcgcaaattagtaaaagtattattgaagtgacgtgttttatttttcgagggttttattacttcgtatcagggcattcagaaccttttatcagcacagttcattatgctagaaaaaaatttatatatctaaataaagaaaggtattagagagattatgtggcattctacatttcattctatctaccttttctattttgtgataatttcatatttttatttactttatattcataaaaatacataattattatctatactaatcaatgacgatactatttactatcagtttaaataatattaaacaaaggcaaatttttttaaaaaaattggtcatttttatgtcttttcatgttcctttatctttgtataatatatttactctaccattgacataatgactcaatatatttttttataattttttcatgtaacaactcagttaattaagtttttttttttaatatatatttatatctatatatagataaacatgaaaatattttttttctttgaaaatacatcatttctccaagaaacaacataattttaggtgatatgtactacatcttttaccataaaagaaacaacataattttaggtgatatatactatatcttttactataaatacttttttgtcatattttatctaaaaaatactcatatatgcatgatgaaaaaatacacacggaacaaaataaaaaaaacgtaaggtaatgtgttacatattttttttaatctatattttcatttttttagtgtttcatttttgttaaaaaaaaatattta

SEQ ID NO: 17340 - DNA, 1701 bp, Cannabis sativa
aatctatgtaggtttgacaattttttaatcaatctatgtaggtaagtggtaagccctaaatatttatgtactttattctagccgacctatttaagattattttattatactaacttgaatttggtatacacttttctaccttatcttttgttcattacaaggttataaatcatatgtgtttcttatagtttcttgaaaattatctttattaatcaaacgtgttacaaaaatttaaaatataactcgcatttaaaatctctaatctttattttaatttataatacagttctcaaaatcatcatactttttaagtcaacaaaatattttcccagaaattaaaaataaagaaagttgaaaatgtactgattcaaaggttcaaagttcaaattattatgtccctttcactaggaattttcttggcttaattgaaaggttcaaagttcaaattattatgtccctttcactaggaattttcttggcttaattcaatatatctcttggaattgagtaattggaataatatttttcttatctctgaaattacaaagaaaagagaaaccaatcacttaagaaaatgaaatgtaaatgatttaatttttagagtcaagaatgtgacatcttcaatttattttcttatataagagaatgaaaataataacccagttttatacccatcaagctttacaaaataattaatcagtcatcaccatgaatagtgttcttgtttttgttcttcttcatatttttgtgttgtctttggttccattgaagattgattcttcaccaagaacacaagcagaggctctaataagatggaagatgagcttggagttgaaaccatcttctcttgattcatggtccaacaacaacatcattaatctttgcaattggactaatgttgtatgtgatggttccaatggagaaatctcacaaatagatctctccaacttggaactcaatggaaaattggacaacttcaacttctctccatttcctaacatcactgtcttcaacctcagcaaatgcgagctcttgggatttataccaacagccattggtaatctcaccaacctcactttgttggatctttctgagaactatttcactggtccaattccaacttcactgtggagccttaacaacctcatcattctagccctttacaacaatagtttgagtggttacatcccaccagaaattgaaaatctacaactcttgtcaacttttgatgtaagcaacaaccaattatcaggagtgttgtcatctaacatttccagactgagtaacttggagagattaagtgttttcaccaataatttcactggtatgattccttcagagattggaaacttgaagaaacttaaaagattggatctttctaagaaccatctcactggtccaattccaacctctctatggaacctaagaaatctcatctttgtgcgaattttcgaaaataatctttttggaaccattcctcaagagattggaaatctaaaacttttgtcaacttttgatgcaagaaccaaccaactatcagagagttgccagttaatatttccagccttagtaacttggaggtgttctctgttcataccaataatttctctgggacaatccctagagactttgggaaaaataatcctaatttgaagatcgttatgtttggaatcaacaatttctttggacagttgccacaag

SEQ ID NO: 17341 - DNA, 5360 bp, Cannabis sativa
ctttcaaatatgtaggccttccatgcttcttgatttggaatttacttagggagaattgttattattaactatttatgtaccataactgaagaagggatggttagcagttctgctaggaagccatatatcttcaaagtggttgagagttgagacctagatttagcctcgtgtaatgtcattctctaaagtgttttttttttttggtagggacatggctgaaagttgtagttatttattgaatcatctatataaatgaatgcctttagttttttaccccaatgactattgtaatcttttgctgtaaactatggttttcttatgtatgtttcaagtttttgagagaaaattttgttttaatatatcaaactcaactttatgactgtttgttaaactcatctgctgcaatctgttaacttcgctatttgatactcattctaggccccagaattgcatatggagatccataagcacggttttggccagcaggcaatgggagctgcaggaccttcttcttcttcttcatcaggtgctaaggtaatatatgaaaccattgtttggcttaagctgctattataattcttttttgggagaagcggtttcttggtgcattgttgatcgaaactcttattttgcagactgcgaagaaaaagaagagcagtgatctcaattacgatatatgcggatgggtaatccttgctgtttgtgttgtcgcttgggtaggattcgcaaagtcacatgtgcctcctcctccaccgcgataagccaaaggatttgtttggtcttgacattcggtgctttggaagagagtgtttttggagattgagcaccattcatgagcttttggaggctttgagcccacagtgcatgtagaatttagaatcacagttgattccaagatttttcacctcagtaatgattttcaccatgtaattgatgaaattatattcagcatttcccatatgaaatattgatttttcaatagtaattatatggttacaaaattatatattgttaatcaacaccaatgtgttcggtgctactatgaataagattttattttgattggtaattgagattcatttccctgtagaaagttgaaactcaagacctttaatttgtttggtgctcctaaaatattgaattcatttcttgcttaaatgacattatgtaaaattcatcattgttatttgaattcatttgttaaaaattcatttgaatacttcgttttatgagttgaatttggtgattagtagtaataataactagggtgggcatcagatcgaatcaaatatttttatttcgatagttataatcaaatcaaattattaataatattgctatagttatagacaatcaataataattaaatataaattattttcttaatatatattatatgtaatttgattccattagtttttaattgaattttgacaacatcatttgctatccaataatttaatttttttttaaaaataaattagatttgtttagtgtaattagattaatttaaatgttgactactactacggtactaccaataaaaacccttaaattccatttttccaacaaaaagcaacccacagaagtgaaggcgaaaaaatcggacattggtggactgagactgtattaactcgggctcgattatgaaggcccaaacccaaaagcccatcttccgttcaccaccaacttcagcaaaacgacgtcgttttccaaaccaagaaaatcctggaatattcttgcggagttgtacgtggatgattatatcatcatcatctttaatcagtgatgaagccgagtcgagtcgagtcgagtccgtggcctgtgctttgctcagctctggcgccaaaagcttcagcgagggagagagaagaagaacaaggacatggcgtcgttggatacccaattgcactttctcaatcacactgaagcattatcattctcctccctatccacgctctccacgcgccgtctttactccaacccatctcaatctcaactttccttctgcaccaagaaactccctcgcctcaaagtcttagccttttctgttaagagaagccctaagcgtctcaaatatgcaactcctcgctttgccaaggtcctttctctttctctccacttcccattgttaatttagtattttcctccaattttaattttcagctcagtcgaaatcgaaagttttgaatgtcagattttgaaatgctcagaaacaaagttgtagtgatgattgattgttcttaactagcttttgtgataagactcatagttgttgaattggaatttgggagagaaaaaaaataaaggtattgtaacttatataattgaatatattaacttgttcaggaagatgaattggtgtatgttgaagttgatccagcaggagctgatagctggaaactggaaccagttgttgatcttttaaaagggggagctgttggggttattcctactgacactgtgtatgttatacctgttatcgttactttcttgcttactttcactctgttttctacttaagggaatatataatgggggattggaaattggatgccctttattcatgtgtgactgacccaaattatgatttttattcaagcattgctacatggcaccattgctgcctagcaccaagagatggtgcattataattagttagcgatattttataaaaatccgatacttaattatacaaattatacgaattgtgatatgacacgttggagagtgctaggtattactaataccctttaatatttctctttttatttggataaatactattttctattttttggtttgcaaaaattgccgatctgaacatttgtcttgttaaatgataatttggactttagcccaattttagtcaattttcttttctaatatataactaaaatgttaccaatttgcagatagtttgtaccaaaaaagaaaaagtgaaaaatgtaactaggtcataacacttttgaatcaagagtattgctatgttttttttaatgaagattattattatgttacattttaagctcatggtactattatgtgccattgaaatactctggtcaaattgataattttgataacttttgttaaacacaaggtctaaaatagtatttactttttttatctcttagttctttgttatcaaacattatttaagttcatattcaatctgtatgtgttattttctctttactgttttctttattgatcttgactttgagttagaaaaattattggtttgtaggtatgcctttgtttgtgatttgagaaatcactctgccattgagcgacttcgaaggtagatcttatagtaagacactaagattgatcctccgattttactaagtccactttagttttcttaaacattaaatgccccttcttgatgaggctctttcgtgtttttctcttgcagaatcaagaacatagaacctctgaaggcaagtttcatttgcttcctttaataagtattcgaataaaatgtttcagcatgtaactcaaccagacaccggtgaaaaatgtgctgtcaaacttgtaatgtcacaaagttgcagtgtaataagttctggatattaatttttgaatggtaatgctgcctgcccattatctgattatttattaaattttcatggacatggtctacattattcgtacagccccttagcattttatgccactcctttcgagacatagatacatacacaacaggattccctcgaggtgatggtcaaggccacacaagcgtattccgggctgttaagcagtgcttacctggacctgtaagtgtgttctttcattgttttctaatttcattgtgtagggtcaaatcaattggttcattagatcttttgaaatggcaaactttgattatctaaggcaagtttgtttcttacagtacacctttatcctaacggctagcaaaggtttacctaaacagtgcataaggtttgggactacaactgcaaaatatgcttcgaggaaaaacgtaggtgttcgtatacctgatgatgcaatatgtcaagcaatactagagaagatggaggctccattgatatctacaaggtaggttgatacatttatattgttacataggaaagataggttggagactagatatgtttatcttcactatccttgtatataactatatggagcttctttttcttgtatcacatatgctattctccttttttgctgaatctgaatgtgtgctgcttgtgccagtgtgaagagcttaaatgagaatgaatggatgcttgatccagttgctattgctgatacctatagacccgaggtatatcttttatataaattttgggttttgcagtgaaactatctaattagtttatctttagctatgtgaatccttctaatctttgtattttctcttattaaaatagtataatttacttatgtaagagcaacaagaaaaaagaacaaaaaattctaaagttgtggattaaaaattctatcagggtctggatttaatctttgtattttccaatcataaacttttgcaactgtatttaattacatgtcttgaactgctaaatcacagctagaccatagactaggtccttttatgttcatcatctgttccgtaatattgctctcaagttgtggattaaaaattctatcagggtctggattttatcgttgatgccgggttaagagttgctgatccctcaaccgtagttgacatgacggttaaccctccaaaaatcattcggcaaggaaaggtaaactagagtttccaatagcaagggatggtggtactcgcttggctcaattgttaaaatgggaaacacattatgtaagagcaaattcaaatcactttcaccatttctgttttcttacgtgtgtttatctttccagggacccaaattatcgtggatggccgcagaagattacgatgaatcggatgaagaaaaaccataaatcaccttttcaatctgtgtttgaaattataaacattcataccgataaaccctgtgtaaaaattcatcatatgtacagggggaaactgtttaagaaagagacaagtgtaaattgtaaatacagattggtcaatattattgtaccggttaaaaaccttgtagtttataagtaaccccataagacagaagggtttgagtttgagtgcacatatgaggtttccattcaagaaatatgatttcttctcattgttacagagttatctttgtaacttgcaagtaagattactgctaccatcatagttatgtcaataaggtcaatagtttccgcactaaaactttagtatctgacactttgtatgggcagagaagaagagtatttggtaaaaaagaaacatcttttaatgctaatttgcaaat

SEQ ID NO: 17342 - DNA, 4752 bp, Cannabis sativa
ggtattacccattaatgggtaataaacaaatttaacaataaatattaattttaaaaatattaaaccattaattttttgtccgatattaatttagctacttaattaaagaaaatattaaaaattacatttttttatactatatcaataatatgtttatataaaaaaatatttaattcgaagtcaaattcaacttttttatcactttttttgccgaaaaacctttatttttattattttttttttcagctgatggaccaatctcagcccatataatgtaaaaatgagaaatttttctaattaactaaaaaaaattaatcatgaaaactcaaatgcatcaacaatagtatttatgtataatatatatatttttatgattatatgatgaagctcataatatttatgtatccaaatgcatcaacaatagtatttattatattattttatgtgaatttatgacaatattcttcatcaagactctattaatttttatatattattaatatttggatgcgtacgtaaaaatgtatttcataataatgtatttatcataaaattgttttaagaattgtaagtgctaaattctatcaataaattaagctctaatttaccaaaaaatagtgtttttaagaaaatcgtgtttaagtttgatcgctttaaaatgatttagtatttttcacatttaaaatttgtgtacatatatattttgattttgttgttaatttgaaccgaatttgtatagactaaaattgtgtaatataatataatacaatattatacaacacaatacaatgcaatatatatactacatactaattcaccattttttatagttagattaatgaaaatatatatttaaagtcattacggccagtttccactttaagactagtttttaaaaattattttagatctattcaaaaaggaaaatagataatattatattttacaaatatatatatttatatatatataatttggatttttctcttcaaatatataaacttgataaatttttaaaaaattaagaataatttatactgttaaaaattcaaacaattacttattatatataattagaattagttttgtttcctaaatttttacatgtacaaaaactatgaaaattgttagatatatttaagaatttctatagtctgacatagatgtaagttcaaggggtaaaaattcgtaatattaaagttccgacaacaagatttgatgcatgttaaaattcgcgagacacaatttggtattatcattagtaaaattaaacaaaattacaccgaataagctcttgaatccaatttaatttaacggtctaagcaatttaaatagcataatttgatacatataagttctgaaaaaataaacagtccatatcccagaaaaaagtaaaagtaaaaataaaagtaaaagtacatcaatttaggtgtgtttctaatttttagtcttatcgattaaagtcttagaacactttaacatatatattgtcccaacttaatacctacgtaacgaataaacacatgataaaattgtcacaactacaaattaaaaccataaataaatgtatatatatacatgcaatatacatattttataaaacagcatgtaatatatatatatgtatatgtatttatatactataattaagtgtgtcacgctttgcaaaacaacatggagaacttcgatgaccagcaagagttggttggaaagatcagagaagcgatgcaacaaaattggcacgaagtcgtacgtttgtacgagacggatcctaatgctcaaagcactaagattagcacctccggctacacagccttgcatgtagccgtggccgatggtaaagatgatatcgtttataagctagtggctagcataaagagccatatatcaactatcatatctgaagatatgacaaagtcatcattaccatcatcatatcacgattattatgaggacgataatcgtgatgtaatgatgttcagaactgaggtagaacaagtagcgaacgctagcagctcacctcttggaattcaaaacgaaaaaggaaatacggctcttcatctagctgcagctataggtaatgttcctatgtgcatatcaataatgtcatcattagatctagatcaagactactatcgttcgttgattgagattaagaatgaaaaaggcgaaactcccctctttttggctgctaaacatggcaagaagaacgcttttctttacctaaactcgttcttgatgatgaaaagtacttcaacacaatccaagtctaacgatgcatgttgtcggagggataatggtgataccattctgcattgcgcaataaacggcgaattcttcggtaagtagttacaattttaatttttttaataattttagtcacaataattgttgcgactaaaagtaaattagtgacaacttgtatctaaaaactatgttttagtcacaagtaaacttttgttatgagtaaaagtcatatttagtcacacaaaatttatgttgtgactaaaagtttgtcactaaaagtaattttttgtagtgataactaacttgaagaaatttttttacacgcacgaacggatatagtaaacaaacgaacgtaacaagttttatcataacacatttagatcgagttattattaagttttattttaacagaaaattaactaattaactgagagttcgatttgtgatatctaacatataatttggtttgatatacagatttggcatttcagataataaagtcgtataaacatcttgcaagtacaaacaatataaatgttgaaggaaaagccccacttcatgttttagctgataagccttccgcattcaaaagtgctatcaagttgggaatatggaaatccatcatttataaatgtatgtcttttctttatcaaacattttgtttattaaaagttttgatatatatatatatatggcataccaaatatggtatgtttttaacaaattataaatatgagataaatcatcatagataagaaggattatcataaaaatcttaaaaactcgtatataaattttacttttatataaccaaaactagtttcctaatgaagaaactagtttcttgatgaaaatatcagttttatgatgaagaaactaattttttaatgaaagatctttggtgaattttgctctgaccgatcgttactagatgggtaaaaatttaaaaagtcatatataaattttacttttatataatcaaaactagttttttggtgaagaaacaagtttcttaatgaaaaaactagactgttttttaatagaaaaaatcagtttcttaaggaaggatcttgattggtgagctttgaaaaattaaatttacatatacatggcacaaacaaataccataaaatagtttaaaaacaaaaaagtgccataagaagtggccaaacttaaagttatcatatttaagtaaaagggtagtttgcagttaaactccctgaactttgaagtttgacacgatcaaccccttagaatagaaaaaactagagctaaactctccaacttctataatcgttttgctctgtactctttttatccactttggtctgttaagtgccaaagttgattgccactgtgtaaactcgtgtacacatgataaaattttattggtccaccttatttaataattaaaaaataatttaaaatatttaaaaaatttcaaaatcaaaataaaaataaaaataaaaataatattttttttttcacttttttttttcactttttttttcacttttttttcacttttttctttttttttttcttcttctttcttcttctacccagaaaccttcttcccaccactaccatcataacacaaccaccaaaacaccacccaccatcacttcaaattttcaaccttcttcttctttgttgttcttatttttcaatctatcaacaccaccaaacccaccaccatccacaaccactgaaaccaccaccaccaccatcaaaacctatttttctattcacaacccaacaaaatcaaaataaaacccaaatcaaattcaattccaacaaaatcaaactaaaacccaaacaaattcaaatccaacaaaagcaaacaaagctccaaatcaaatgaaaaaaatactagataaaaaaattgtccttgccgagcccaaaagcctaactccggacaactgtctcatcctcaagcccgtcgagatcaaaagcttcttcgtcccaacctcctgtagtcacgagttcctctgtcaccatacagtgtcagagatgatctagacggggaggatccttgatcccatcgtccttgacgcccactaagaagaagaggagtgagagaaatccaaaataggagaatcaatgtggtctggccaagggagatttgggaaggaggtagtggtggtgtcgtacgatgagatctaagtgagggagaaagatggcagtagtttgggcgagaaagaacgacctggtttgggcaagggagaacgataatggttctctagtgtgaggttgagtgaacagcgaagaagaagaaagaaagaaaaaaagagaaccattatcgttttgaaaaaagagaaccgttatttttttattttttttttctaattttgaaattttaaattggtttttttaattattaatattaggtggaccaatgaaattttgccacgtgtgcacttgtgtacacagtggcagtcaactttgacgcttaacatatcaaatggatggaaggagtaaaaagcaaaatgattatggaggttt

SEQ ID NO: 17343 - DNA, 2561 bp, Cannabis sativa
cccgccgtttgttcatcatctgaaagagaaggaaccacagcgtcatcactaggaactgctcgtgcgcgcttaagcatgcttcgaacagagtccccaacctgagcagactggcgtgtgtaatgcctcctggttcccaccgaagaagctggtgaagactgagagcgaggttcattaataaccaatcccgtaggcctggtgcagggtgagtggggtgggctggaagtaggcaaagctattcctttccctttggtagtgtgggtgatgatggaagtagttatgattggtggtggaatggtggaggaggggatctgttgggagaaagacatagggatggtagtgaagggagcgcttgaagtaacagtgcgagaagatggagtatccatgcggaggaatttgttcacgacatgttgcagactgtgaccaggagtacagtgtcgaggaaaaagttcctgaaaaggagttgagttggatatttcgaaggggttcttcttaagatgagcatgagtcgaggcccaaagagagtctcggtattcaaggataggaggggatggaaaattgtcacagcataaaaggtttttgggaaatctgttgtaggtatgatctagaaggccacaaaagtagcagaaatttggaagattttcaaatttgaaacttatccattttgggtcagggatagaccgaaaggggcttcggcatatgagatggagaaatgattactctgaagttaattctggaggcgatggaaatgacggttagggttgatttgggatacttctgagaggagtagaaaggatagatggtctgagcaagcattaaatgcacaaatggaggagccgccgaaattaaataaagctgggaaagagaaagagcattaaataacaactgagcacgaaagatccgggtgatacttgtaatgattaaggttgacatggagcaataaaagcagaaaaaacaacaagaggttggttgaaagaaacaggggaagaaaggaagagcacttgctcactcactgtaccagagcaaagcctggatgacacttcaagaagaagataattgccagagttgtacctaacataataaccaagaggtgttagagaacaaaaattatgtgaactaatatgtatagtactacttatggacaagtaattacacatgtagccaactaagataaataatatttttcacaacatgtgaaatttggtgataaaacaatcattgaaaaattaataattttaagccaaatttcaagaaagatacatataaattgcttgtaatatgttgataataaaaaataaagtctacaccataacagattatttttgcatcaaacaatcaagttttataaatttagaacaacaactaatgaaaagatgtgaaaataagaatattgatggagatttcatagtcaagataaatcaaaataagagagtgacgatgtcaaacaaaatgagaagaaattcaaaatattttctatgatttactaatttctaaaaattatcaaaaaaactatttgataattttaaactgcgtaattattattaaaattaataataattattaaacggagtcagaaaattaattaaaaatctttaaaaagttagaaattaaattttaactatgtcaagaaaataatcgtcaaaaaatgacatcatacgttagcgcatgtgccccctagcgacgctgtctagagttggcttcgctagggagggggtaatctcctaccatggaccgggtgtgaaagaaggtcacttgactcgactttctctaatcgggtcgaagacaaaaacgaaccaaaataatgccaaatcattagaaaaacgagaggttttgatcgggtctaaaagtctaatctacctatggattcaatttggggtaaaatacccaaaacaacgatagatcttgtaatttaatccaaaatttcaaaacaaaaaaacatcattaaatctactgatttttttactaagtcggtaattgaaatctgcaaccacattataaaatattggagtcatttattcataatcaattttagtcaataatgattataataaaaaaccccaaattttatttcatcattaaaagataccaaacctaaaagtttaatcgcaaaattattctaatttactcaataattttagtcatataagatatcaatagaaagagaatttcatgatgaataaaacccctaaacttttaagattaaaaaacgaaaaattcatcaaaaaataataacaaaattaatatgtaattagaaaaaaaattaacatatacatattaactattacacaaattataggttctaaatcataaacatttggcaatctgatacaacattttagaaaaattaataatctcaagatacaaaatttgtatataatatagagcactataatatatataataattttataacaatgagatttgtgtacctaattgatccatcacaattaccgtaatttgatagtgcaatattatcaattacgtattcctccctaggtttctaaattaaaagcaattttgttaatctgattatcaaaagaatacaattgtgatgaaacaatatg

SEQ ID NO: 17344 - DNA, 3506 bp, Cannabis sativa
tacaattttatgcaacaaaaatatgaaagcattgagtattatacataaacatatatacatgaaaattatatgtatacacacagtatatgaatataaatatgaatgtgcatatatttaattatttttaaaatatccaaaaattacaaaaaatttacctttttacaaaatattattttttttaacatttttaaaaaaaaattcttacaagcaattgtttttaggttctaaaaaagagtgttatttgcacattagtttcacgttgcgaaaatatattataatattgctgcaacatgaaaacgttgtttttcttataaaaaaaatcagaaatctgtaaaagcataacaaaaaaagaaaagaaaagttgaagaatacccatttttcttatacattaactaaatttatcttcaaataaaatttaactcaaatatacctctttttatgagtattgtacctaaactatcacactcacataactaagacataatttcaaacataatagatttgtgttctttgtagatggatgagtagatttgtgggaaagttgggacaaaattttaattagagaaaaataaaaactgtcgtaaagtgatagaggtaaaaatggtagaatgattaaaaaaagagataaacataatacattttgaaagagatataaaaattaaagacatcaagttaaaataagtatgtagcataatttcttaaaaaaaaaaaaaagcgcaattttatatactgtgtaaatttcacttttttcctttgtatattttcgtgggactccgtttaggttggcctaaaccctcctttaccaccgagtactgaagctagttctgaaggcagcattgcctctttcactcttggaagagtccttttattcctttttctctcattaatacctagaaaagacaggtaatactacttaaatatactccatgaggctcagagtgaagtgttctttggacacaaatcttcttttgggatcacttagttaattatacatctacactcatttttatgagattagctctatttgaagagagatgaattttgcatatgtttttggaaaagttagaaaagtctttgtttgttagggaaggctagagtggatttaagatatcatcaccttcccgaactccaccatttgcattcgatatttccgccattaaaggaacaggctactctaacatgagagcctccgatacccttcgaattaacaactttgttcaatggaactcgtgagtgaaggttttgtattacttgacttgtacatcatgaaagaaattcatatcaagcattgatatcaaatagcaaacactaaaacattgctcctaaagattcatatagctctatacaatgaccttatttatcatcacttgtatcattttttcttttttaaaattgtaatctctattggcaatttaaaattagaacaaatacgttaaagtattaaatgtcattttataaaatgggaaagataatcaaaataactagcatcaacaaccaatccaagtttgaaaatccatgtaatgtaacacaagaacaagaaaaagcataagaccaagcaaaattgaattgtcggagagaatagatagtcgtttgcttttaattactactaaactcagcttaaaccctaaatcctctgctgttcctctttcctctagccttctcgaacttccttccctttgagcgaacgtacggcttagtgtgactgtgaggcacaccaggagctggtccaaagtgcttcactgcttcacgtgaattctttggacctcttagaagaacctacagagataacacaacaaaagattcttatcatataatgtgagtgatttggtaagttgggggttcgaaaatttctctgatataagagagaagtaaaaatgatgtgaagttaaataccgtgttctgcccaagaggtgctctcaaagcaagctgatcaaaggtgaggcactcccctcctgctttctcgattctggcacgtgcagtctcggtaaacctcaatgcagtgaccttcattgctggaacatcatgaacccgaatgtcatcggtgacagttccaacgagcacagcaaccttaccttcctataaataatgtagaggaacacatgattaatatacaataactaaatttctcactatacagataatgtagtacaaggcagctgagattagagttatcacctttccttgcatgtaacggatcagtctagaaagagaaagtggtgccttgttgaccttgctcataaaaagacgcttgagaataactgcattgaacttgcttccagttcttcgcacaagaaagcgatataactgtaatagaaaaaaccaacatctagtcagaccatgttcatatatacaaactaattgccacaaaatcatagaaaggagatattacataatgaagacactacagttgaaaaggcaaacattcttttgcatttgcccagaaacaacaaaatccattcgcatacataataaaattacacaaaattatggactgtagttctctcagagtattacagataagaaacttcatgaagtagtcagtatatattaccataaaaaaagaacaataaaatacaacatggcctagtcttataaaactaagaaacatacatttctagaccttaagatcccataatgagctgagatacacatttgccatcattgttatttcacaaatgaccaaacagactttcagaatattcacaacaacacttgagctgaatcagtgatacaactcaccacctaagatttacaaaccagattcataataaacctaacaaatctagggttagtactacaaaatcaatcaacatcacatttagcttcttaagttcttgcaagagattatcatattcaagtagatacaagcaaacccatataacacaaaaacaaacatttgcaattaaccctataattccacccaaaaaaacacaaaaaaaaatgggaaaaggtatagctaaaggaccttgacaagaagcttgagataaacatcatcggattttggtgcggtcctcttggtcttcttggacttacctcctgcaactagatcgataccctgttcgccaacatagccaaatcaaattgattcagttcaaagacagaatcttttacatgaaataagctcaaagaaggtgggagataagagatttggtaccatggtggtttaggtttatcgctgctctccctcgctcgccgcctggtgtaacccaaaatgaaagaagctagggtttaactctcaagccttttatgattattgtaagggtgcggggacagaccacttcttttgttttcataagaatccccaaaatatcttataattacaaaatctgccaaaccaaatgccaaatttaacatattatgcattttaatacactctatttgcaaaatatgccacaatttcaatattaaatggaaaatttcataaaccatgctttattttagatcccaaactaaaagggaaatttacatggtatactaacttttgttattttcttacaaaaatactg

SEQ ID NO: 17345 - DNA, 22713 bp, Cannabis sativa
  modified_base (240)..(254): a, c, t, g, unknown or other
  modified_base (3117)..(3121): a, c, t, g, unknown or other
aaacttgaaacttttttttttatatttattttcaagccttattttatttttgacaagtgttgctcaagctttgttgtatttgtgatattttaattacttagtgatagtcaaaaccgcaaaaactgcataaaccgcaccaatttttgcggtgcagtttttgcggtattttagtttcgcggtgcaggtgcggtttgggaaattgaaaaaaccgcatgtgtgggttggtttgaaaaaatagtnnnnnnnnnnnnnnnccgcaccgcgaacacccctaatttaaacattgttttcaacatgtaaaattattcttaatttcttaaatttttgtatggtgttttaaataattacaatttgcactataaaatttctctttttttttttgaataaatcatgcaattctattaatagggtctacaatccattcaggacatctcccccgttagaggcacgaccaggattagaattaaaaaaataagtcaaataatcaatcgcctaattcccaaatcgtttgacaaaaaactaaaaataaaatcaaatgaaaaaaattacagtatcacagttaaccctaagaacacatatattcagtttcatctatcgctcagaagacataacaatagaaattgttgcagcatgttcattcaatctcgtagcttgagcacttatgcaaggtatgtaactgcactactaacaacctattcagtcgtagagaacttgttattctcaaccactaacagggatttaatggtgaaccatccaagaacaaagaaaaacctacaacgaaacaaaacaaaataaaatcatatcacacaaacaagactaaaacactcaaaactatatcacatagacaagactaaaacactcaaaagtaagtcatagatataagactaatcacagtagcaaaaatcgaattgcaatagcaaaacataaccccgactaagctgcatctatgactagggaaggccagcgggcctgaactaaaaaaaaaaaaaaaaccttatgtagctataaatttaagaacgaaaaatcctaatacaaacttagtattgttaattaataataataataataagggtaatttgcgactaaactatctgaacattaaggtttggtacgattaacctctttactaatttttttggggctaaactctccatactttggttctgttttggtctcaacttttccttcaactctcgtctgttaagtgcaaatgtgaactgccactgtgtatactaatatatatgtgacaagtttttatttgtccacctaatatcaattttttaaatttaataaaaatatatttaaattatatatattattaaaataactttaaaatgtaaaaaaaaggaagatattggtggcaaaacgacctactttatattttttaacaattaactacccgaatcaattttttgatgacaaaactactcaaacctactttttgttagctatttacactttcgtccaaaaagactatgttaagtgcaacaattgacatgccacagggtacacaagtatacacgtgacaactttttagtagaccacataatattaagtattaaaaaatattttaaatcaatttaaaattaaaaataatttaaaaataaaaaaataaaaaatatattattttttattttatcttcttcctcatcctcttcttcttctcctcttttgttttggtttctcctttgaaaccctaatcctctccactctaatctcattcttccttcttctccattattagctttgcatacactagaaaagacatagagcaaaaaaaaaatgagaatgaactcataggtaaacaaaaacatctatcaaagcatctttcttttcttcaaatacatattcaaagccaacatcatcaaatattaaattgtataatatttttgttgattaggttgaatttagaaatattgattttttgaacatattttgattgtataaaattttcatagtatttatattggatgggatgcgaatgatcatgactacgatgaaagggttaggttttctctggtatttcttttttaatcagttagttattaatatatagtttgtttaaaatttaataaattttaaaataattttaataatatataaataatttttaattatttttttattatatttaaataaagatttttttttcaattacagtgatgaaagggatctaaaaattcatcaaaagattatagtcaatattatatattatttgtatagcctattaaggttactttttagattttattgtattaatttttataaagtagatattattactactattaaagttactagttatttattatttaagtgtattattattgattattagagttgtaaaattattaagtgatttaagttatgaattatttgaagtagcttgcgatacatcaattattttttacaagataagtatttttattttccactcaaaattgactattgtaactatttatctacactgtttatctgtagtaaaaaatattataaactttgtaacaatatttatttttttgttataatgtttatttatttatttttttcctttcgactaatgtatttttgtttatttatagttaaaataatttctctcttcaaggaagtcaatcctcacaagattcttacatttatgctgcgtagatttcattcctgccgacagttgttcattgatgtttggttcatttggaggaagtagaacaagtggttgttaaattaggagtggaagatgaagattatcaataattcaagtatattgtttgatatattagtggcgttggataattttttcttcaaagttcgttgaatttgttgattatgatcccttagcaattgtgttagtctttgctaggagacattctcttttcagtggtctaagatcattactagaggatataacaagtttgtgatctaaatttcccagagtgtccctgatccatatacatcggtcggccaatgtggttgcatatggagtagttgtgcatgctcttcggataaataatcaacttgtttggctagagacgggtcaatttttattatttgtttatcaatgatattggtcgttacttgccaaaaaaaaggaattttttcatttttacactttaaaacaatttnnnnntttttttgcatttttacagaatttcacataaaaacccttatagcaactaacggagcaacttaaatcgtaagcaaaattcatataacaacctacatagaaactaccggagtaactcaaaccgtaaatttaaaaaaaattaaaaaaataatatatgagataatttccttttaaataattccttgatattagatagactaatgaaaacatgcatatattattatataatggcagttaccaaatcttaaaatttaaataatttagtcgcaaattattgtaataataataataatagtaataataataataaaatttctcaatttttttttgaatgaaattcatttttattattaaacttgaatttcagctaccaacacaagtagcaaaacagttgggacatccccaaactgaaaacacaatcaggataagaactagaagctcttgcaaaagcatgagcaactgagttcgctgattgtttaacaaagattacagaaacatttcgcataatagcaagcaagttcttacaatctttaatgactaaaccaaataaagaaatcatatccattgagctacgtaaagcttgaactaccacaaggctatcggtttccaagacaacttgctgccatgagaaggtttttatccagctaaggacttccctaacacccattgcttcagcaagaggaggatccacatgaccttgatagtagactgtttttccttgaataagaaccccacaacagtccctagcaacaataccgaatccaaaactgtggttttccacaaacattgcagcgtctacgttgaccttagcactattagtactaggtgttgcccaatgctcagctccatccccaggcattaagttgtggattgatgactcgagtatcaagttctgagcacaactccaagagttgttgtagatgagatgatgttcgagatgttaacagtttttttgttccaagccactccatttatggcgccccaaattgcccaacatagagcagcaacatgggcttttttctcactgtccaggtgtcgaaaaacctccctgcaccagtctagaaaaccagcaccctcctccactcgagtgccgatcccaacccttttccaaacctccttgattacttgacaagttaccaaacaatgcagcacagtttcattctcattttgacagaaaggacacagagcactcacctctactcttttaatcctaagttgatccattgttggcaaacaattggtgccggtcctccacaagtgatttttgatcttaggaggcatcctcaatttccacatgttttttcagaatgtcgaggcctcttcttcactccatctcccattaatttgctacaataagttgtagactgacttgactgtgtaaaggcctgaagtatcattacaccatataaaatggtcagtacaatcagtcacctagaggggaatttgtaagataaggcttgagtctctctcatcaaaaaggtcattaagcaattcaatgtcccatgttcttgcatcgggcatcattaagttgcttaccttagtgtttacaaggccagggtgagatgaaattacataggggttactcaaatctagcagccaaggctcccctaatacacttatgttaaagccatcacccacacaccaccttgttccctttaagacaagttgttgagcctcccatatgcttctccaaacgaaactaggattgttccccaaggaggcattgagaaaagagccattcggataataacgagcttgaaagattcttgacacaaacgaatcctttcttatgaggagacgccatccttatttgcctagaagcgccaaattaaaattcctgaatcccactccgcccacatcgttatgcttgctgagtttttcccaagacaaccaatgaattcctccattgttttgagtgaagatttccaccaaaacttggccatcaacttctcaatctctatactgatttctaacggcaaaagaaatacgctcatagcataactaggaagagtttgagccactgttttgaccaatatttccttgccagctcgagagagaaacgtcccttcccaaccttgaagtcttttacgcacacgatcttttaagtagcccaagacagcggttttgtttctccccatggtgcttggaagacccaggtaagtactgttctcattggcttgtcgcatctgtagtacatggttcaggtgcatacgagtagcttctgaagtattaatgctgtaaaagatagatgatttgttcaagctcacttgttgaccagaagcattttcaaacttggcaagtaactcacgaaccttcactgcttcaggagccgtggccttacagtatagataattgtcgtcagcgaaaagcatatgtgtgattctcggggcaccgttagccaccttacaaccatgaatccaaccacggttctcgtactttttaatcaaggcagaaaaagcccatctgcgcaaagaatgaacaaataaggtgataaggggcacccttgtcttatgccccttgttggaataattggacccatttctcttcctccatgtataatgttgtattttgctgaggtaacacatcacataatgaggttaacccaacttctaacataacccatcttcaaaaaaaatttcttcaaaaagtcccactcaatgcgatcgtacgctttactcatgtccagttttaaggccatgtacccttccttgccttgacgtttcctcttcaggtagtgtaaaacttcaaaggatacaagaatgttgtccgatattaaacgacctgggataaaagtactttgggtgacggacacggctttatccataaaaggcttcattcggtttgccattaccttagtaatgattttataaatgacatcacacaatgcaataggcctaagatctgtaacatgctctgggtttctctttttgggtatcaacacaacattggcattacttatatccatcttaagtccccttctttggaagaaacgatgcaccacattaaccacatctgaccgaacaatgttccaacatttctgataaaaaccaggtgtcgtaccatcgggacctggactttttgacgggtgcatctggaaaagtgctttcctaacttcctccttagatacaaggagaagaagatcatggttcacaatatcaaaaatagaacacttgatttcatcaacaacttccgcacatgtcgttcctgaacttgtgaataaactggaataataatctacaattaagacaaatagaccattctcccaatgaacccaatccccactgtaattcttaagcttctcaatattattccctcttctagttgtggcagccatgtgaaagtacttactatttttgtctcactccttgagccagaattgtttggctctttgtttctagaaagtctctcgctggtccataatttgagaaagcttcaacttcacttccctaaaacgctgcacagagaagggatatctcttgtttctcagctcagaaagctcttgcttacaccttttaatcctcagtttaaaagagccagttatgtcctttccccattcggccaaccgctcagtacacatttgaatttttttatcaatagaggcattgggcatagactcccaactatctttaatcaacttataacaaagtggttctttgagccaagcattttcaaaatagaacttacgaaaaaagatgtgaagagtttcaagtacaggttctaaaagaattggagaatgatcagagggggaagtttcgagattacttaacttggcttgagggaacaaacagaaccaatccgcagaaatcaaagcatggtccagacgaatctcagcccaattcgttgtacctcttcctctctcccaggtgaacagatagccaagaagttccatatccgtcaattcacagtcactaagggcttgttggaagccttggagtaaagcctgaggatagggaagacccccttcttgtcttgctgagaaaccacattattaaggtccccgactaagcaccatggcaagtttgagctttgcttcaatgtgcgaagaagatcccaggttatgtgtcattgattccttcgaggctcaccatagacccctgttaatctccactccggcttcccctccatcttaacagtaaaatcgatatgatgatgtgaatatcccacaacttgaccttcctcacttgtcttccataaaagggccaacccaccacttctaccttgggcctcaattataaaaaccccttcaaagcccaactgtatactaacccattcaactctttccctggcacacttagtttcacacaagaaaacaaatttgggtttcttttaagaaattatctctttaagaaattgaacagtccatgggttcccaagcccacaacaattccaacttagaacattcataatacttggcgggcttgagaaccaaggcccgcccccattcaagttttttggattatcatctttgtttggaatcattagagtgtcaccaccctccttaagactaatatgagaggagtcacctatttcattatatggcccatgagaatccattataattaaactaggcccactgctgttttcccctggcccatccgaggtgtcaaaagacattcttttacttttagcatccagggaagacacataatttttttgaattaattcagttgaccctaaaatccctccaatttgcttctttccttttccatctaatagagtcgttattggatgtatatttcctgttgaccgagggtcataaatggtgatgagcaattgactaccctgattcatgggattaccaatttctaccactggaatatctctattcacactaggcggatgttcacactctactgtcggtcttctctctgtctccaatgaacgctggacattctcgaatccaccactcgtctcgcccttagaaaatttgccattattctttgagtcatcagcagttcgtaaccaacgagagccaatcgtgtggttccgcctacggggtgcagctttcaactccatgttatacggtttgggcaacaaatgcgatggggtatcgaaaacttctcacaggatttttccgagtggccgatgatcccacatataaaacagaatgttggcaatccttcatacttaaatatagcccagcaaacaggtctccccaccttctttagtttcattttccttttttaaaggttgatcaacacgaatagatactcgaattcggagatagtctctccatatacccatgaaattattatgatcagactcgacaaaaaccccaatatagttgccaatgtccttcactacccgttgagacatgaactctttcgacattccatgtagttgtacccagaagtcaagcttttttagtatcactgatcggggtttttccccccttcgcagcctttgaaaacccaattgaattctgtcaaacgtccatgtgcttccctttataaccctgccaacatctatttcatgatagaactgaaatagatagagattcggtttcagctctttgacatacaatccacgtcctggtcgccataaggaggccattttatgttgcatagctaggaagtcaatttccctatccgtgataaatcttcccaccagaaaccacctgtcgtcgatttctgagagtccctcatcctcttctccatattgcaaaccacccatttcttcttcatctaacgtcatcgaagcatattgatcatccatgttcgtacgtgtttgattaaacgtagccatagaaagacaaaaaccacaatcacaatcagaactagaaaaacaacattaccatatcaaaagacaagactccaaatcaccaccctacaaaattatagctcacttagatattaatttgcaatcaaaaaataaattatgtattgtgaccacatattattttatatttatatcatgtttaatatgattgtttgagcttcatctatattctcaattttattttattttgctccaaacaaaaaagagaaaaagaagattgaatataatgactaattaacgtctcaccaacaaataaaaaggaaaagtttgcgttagatctaagagaagagagaaaattgacccagacggaccagacccacacccaccgacccagacccatacaaattaggagaacgaacctcaaccttccttcgcattctcaatccattttcatttttggttttctcttactcattacaaacgccgtccccagatctatctaaccggagctactcagattctgctggtattttcttcttctatgctttcatctcccaaatcaattttgtttttttttttgtttttttagggttttttcaaaagaaaaataaataaatacaagtatgttaattgattggaaaatcttgctattctgttcgtaatgattgacggagttttcatttggtttactgagagcaagaaagagtgtgtatctgtgtgtgtgttctgtatagtgattgtttgattttacttgtgttgtacagagtgtaatggtgattggaactggcgggaggtgatttcggacagtttatagtttgaattagtggatcggatggataagaataagaaccgtaccgatctgcttgccgctggcaaaaagaaggtatggatttttatttctattttcttcacttgtgtgctttggttttcttttttcggaactatgattataatcctttttgcttaatgggtaagctaggacagtgaaaccaaattataactgaaagtatgaatgatatggttatggttgcttattgggaaaaatgacatggacacagagaggatattgtagaaagacaatgtaaacaagtaaaattaacaaaacaaccattacggtcgttcatacttcaactgtttctccacagtcctttatgtatatgatcgctcttaagtaaataggatgctcattttgcaaataagtatataataatatgtgtatatatatatatatgcattttatgtatatttttggtgcaaataacagttgatctagagtcattgaaaatattggttagatggggtttgtgagtatgtttcagtaagcaagtagagagttggttctcttgtgtaatgtaagtttttcactattttaatatggtatatgagcttacatttttggcgttatagtcatagaagttaggaacataagttgaaattctgttcttgcgggatatctatgattctagcttaagtgctctttttgcaacatctatagtgtgccagtatattatcctaggttctatgttttagaaccttttatgagtttgtgaagtttaattttgtattttttattgttttttttttccaataatcagcttcaacaatatcgccaaaggaaggataccaaagggactggaagtcatggaaaatccactaaaaagtctagtaataaatcagagcagcgtgaagctgatgctggctcaactgctgataaaactacatccatgtcttcagttgaaggggaaattacatctcattttgattctgatcctttggtaattgcttcatcaacttctcaatctgtagagattgtagcttctgtcagtgaagttgttgcagttgatctatctacagtttccagcacaccagactttagtatggatgaaacattaacagcccccaatgagttatctacaccgaaggtgggggttggtgagcatcatgttgactctttagtccaatctgaaggcacaagtattggaattgaggtggcaagaattatgtcttcagatacatcagatactgtgcactctggtggagaaactaaatccgatgatatttttgtattaagtgatttgctcactaaacctgaattagttgattctactggagtaacacttaatgctgaattacaaagtggtagtttggaagatagttcatttccttcacgagcaaattttgtggattctgaacacgaatcactgccatcgaaagatgataatcctgataaatccttgatgcagacaagggaagatcaggtaacagatgtaggttgtgctcttctccgattgttacattttatgttttccttttgtttatttcttcttcttgaatctgaggtatctaggtagggtagtagtgagatatttggatttagagaactatattttaaatttacatatattattcttgaaattgactatgatgaacccaggtagtgctttatgcctactattatgtttatttgatgtataatattgttctcatttgttgctgggtagggtcaatgcaggaagctgatggtttggatggaaggaactctgattataagagtgaaatagagcacaagggggataccaaatttcctttatctgaggctgatgtaagtggtgaagctctttctgggatatctttagaagggacttgtgtggacacatcatgtgaagttgataataatggtaaggtggatgaagtatctgtttcggatggtgcaaacattatggaagattttccaggtgatggtgttgttgtggcaagtcagaatagcacgggtgccgtgatgggttcatttcatgaagggaagagtagtgatttgctgaagactgatgatcttggagaaggaagtacagagagggttcaaaatgatacaggagatgagaaagttgtacaggtacataatcaacagcatatgctggacagctatgaaaagccttcggaaatcgatttggtgagttcagccagagagtggaatgtatcttcgggcttcgttttgagctcaataaatctctcccagctcatggatttggttaagggtcttagtgaagaagaatacaatcttctagttaagtctagagaaccagtttctagtgccgaacttgggcctgccaatttgaaaatggctgaccctgacttttctaagttgctggagaagctcaaagaagaattatttctcacgaattgtacaaaagatattttccagttgcaacttgctcagcagtctgagctacaaggtgagtttgatcatcagcatcatcagttggtatccgtgcttagtgcctcacttaaagaagctagtgaacagaaccaacttcttagagaagagcttttgcagtgcagatgtgaattacaggctgctgttggtgcaagggaagaatttcaaaaagaattttgcacttcccaggctgaggttgccagagcatacgagttgcagatcagtcttgaaaggtcacagggggatttgttgagactctcaacagagttggctgactgcaagcagttagtggcatctttacaggtggaaaatgaggacatgaatggagctcttgctttagtaaccgaagagaaaaagaaattgaaggaggaaaaggatcatctttttgaagaaaatgagaagcttgcaattgaattagcggagtggaagggattgatggctgctttacagctagaaatttccaacttaactacaaatctgactttagcagcagcagaaagaaagatacttgaggaggagaaggaacatttaggccacgaacatgcgaagatattaacaaaatttgctgactgtaaagaagtggcctcaacattgcagctcgaaaattctagcttaaaggagaggcttgaccttgttacagaagagagaaaaaggcttgaagaagacaagaggtgctttgctcttgaaaatgagaggcttttgtttgatcttgccagtcttaaagagcagttatccactgaacaaagggaacgagagagggttggagttgatttaaaagaagtgacatcacgccttgaacaacttatggaggaaaacatttttctttctagcagtttggacattcataaagctaaacttactgaggcatcagatagcaacagaattgaaatgccggttcaaagcaaggaagattggcatcaggttgaaatatcagaagttcgaagcagggatggtgagaatttaagtgctggtgaagattcttattgtattctggggaagcaagtcgatgatgtttgctcttacacccagaagcctctgtctgatgatattgcaggaagaacaccatacatactttttgaaaagggagtttttgatgattccttgggctttgtatccttgaagggacacttggatgaggtagagaaaatattgcaccaacttgaaaaagcgattggagaggttcaggcttactcggcgtcattaagcaagtcaggtggcaagttggttgcacctggggtatctaaactgattcaagcttttgagtcaaaggtgcatcttgatgagcaggaatctgaggatatgcctccaatagaaaagcagtcaacagcaacagacccatttgtggtagtggaagaagaaattagaaatttgaaagagttatttaagcagttggtattggatgctgctgatgcttatgtattgttcaagagtgaaattgatgggaggagaactgcagatatcaatgttagggagctcaaggttcaacatgaagccttaaaggatcacagcaacaatttggaagcgtcaaacattgaacttgcaattgtttcagaagttttaaagcaacatgggggcaccattgaagcaacaaacaatgaactcgtagttttgtgtgaagctactaagctagaagttattgatctcaaagcaaaaaacactgatctttgttgtaagctacgtaaatgtgaatccagaattgatgatttacagagtcaattgtatgatttacaacaaacttcaaatgagatggcaactgtgattggtaatcacttggatgatttgcagaaagaggtttctgggaggacattaattattgaagaagattggaattctactcttgctcagatttttgaaatagttcagaagcttgatggttcccttgggaattttgcctcagaagtatttgtccctgatgacggattggatgttgtatgccaccttgcttcttcagtcaatgcagccaccaaattgtttgaggatatgcagaagaaacttgaagcttttcaaattgaccatgaagttatttctgggtcatacaaagaagtgaacgagaggtgtgaagagatgcatcggaagaatgatatggctgttggcttattgcataaactacatggtgactttagaaaacttgtgcgttcacatggatctctggatgaaaatgagataaaggaggtgaatccagatcctctagattatagtatatatgagacatttatggggcagctggagcattttctgagtgaaaggcaggagcttgaatctgttatcgataaattgaatttggaattggtaaatagaataggggaatttgaggaactgaatagaggatgccttgatacagatgtgatctgcaagttaattgaagatgctcggggtgtccttaaagaggaagatattgagatttgtgcaaataaatcacctcctttgcattttgaatcattgattactgttcttgttcagaaatacaaggaggcccatatgcagttgaacttaattgaagaagaaaatagatccaaggtaatgaaatttgaggaattgcagcaagaagtacagcatttaactgccatctgtcttcagcatgaaactgaaatgcttgttctcaaggaaagttttagccaggtagaggaagctctatttgctactggttctgaattacaaaagaaagtaagtgaacttgaattgtcagagcaacgtgtatcatcccttagagagaagctcagcattgctgtcactaaggggaagggcctggttgtgcagcgggatggtctaaagcagtccctggcagagacatctagtgaacttaagagatgctcacatgagttacagttaaaagatgccaggcttcatgaggtggaaacaaaactgaagacatattcagaggcaggtgaacgtgtggaagctcttgaatctgagctttcatacattcgcaattcggctactgcacttagagagtcattccttctcaaggattctctccttcagaggatagaagagatcttagaagacctcgatctgccagagcattttcattccagagatatcattgaaaaggttgattggctagcaaggtcagttgctggtaatagtttgccttctgctactgattgggatcagaagagttctgcaggaggaggttcattttctgatgctggttttgtcatgatggaaccttggaaggatgatttacagtcaaattcaaattcaggtgaagatttaaaaagaaaatttgaagagcttcaaagtaagttttatggtcttgccgaacaaaatgaaatgctggagcaatctttaatggaaaggaacaatttagttcagaaatgggaagagcttttaaataggattgatatgccatcacacttgcggtctgtggaaccagaagataggattcagtggcttggaagagaacttacagaggcacatcatgataccatttctctccagcagaaggttgataaccttgaaaactactctggttctttaagtgctgatttggaagactcgaagagtaggatatccgttcttgagtcaaaccttaaagctattacactagagagggaacatctttctgaaagattggacgttctgaatcatgattatgataaacttctagcaaaggcaacccaatatgaattagagaacagtaggctgcagagtgaagttactagttttcaggagaaccatgagatgcttgcaaggaaggctgatgagtttgacctcaagaacagaagtctgcagaatgaagtagatgatcttcagaagcaggtggccgagatggctggaaatgagaaacagattcttagtattgaagaagaaataagaagattacagaatttggttggtgatgtgctacaagatcctggactagaagatcaaatttcttctggcagtaacattgagtgcttagaaatgttgctgaggaagcttctagaaaattatgcaaaattttcaaccataagacctgtacttggtggtaaaattgatgagctgcagactgacgtgatgactgtagaggcagctaagaacttaagcaaaacccatgctggggagtccgatgaagttatcatgaagaaagagcttgaggaagctttgcacgagttgattcttgtgaaggaggagagaggtgtatttgttgagaagcaacaatctttggcccttgaaattgaagctctggttaaaagaagggaggagttggaattacttctacatcaagaggagcagaagtcagcttctgttagagagaagttgaatgtcgcagttaggaaagggaagttattggtacaacagcgtgacagtctgaaacaaaccattgaacaattgaatgctgaattggaaaatttaaagtctaaagctaagacccaagaagataaacttgtagaatatgataagaagtttgaggaactgtccatgtatccagaaagggttaatgtcttggaatctgagattctgttgttaaggaatcgtttgacagaaaatgagcagcatttgcaggactcaggacatgtattgagcgtgatttcaaatactttagctgattttgatggcggagatggagttaatgctgctgacccagtgaagaaattggagcaatttgtgaaactgtgtcgtgatatgcgttctgatatgatttctttagaagaagcatcaaggaaatctaagcgagcagcaggactacttcttgcagagttgaatgaagttcaagagagaaatgatagtcttcaagaagaactagcaaatgatgctgccgaactttctgaactcacaaaggagagggatctagccgaagaagccaaacttgaagcactttcgcgtcttgaggagttatataatgttcactctttggaacagagaaatggattttctgaacttgaaggtttaaaatctgttgtagatcaacttaggaaaggttttcatgatgtcaataatttactttccgatgtcttctcaaaagatctagaattgctgcgcaatctggagtctggtatcgacaagtgtctgaaaccaaccaatgctactgatgaggaaagcgtgcctcgttttagtgcatccagccttatatctagcggttcagatggcaaggtattcgtacatagagtggtcatttttctgttttacttcccttttccatgctattggacgagatagtctctacaatggtttttctttccagaggttggggaaggggagaatgttttttagaaaactacatgcttacaaagacaaaaaatgtttagaatattgttctcggaaaaatgttctcaaactactttatggtctaatatcttgtccgtctttttttttcttcatttcaacatttttaaattgctcattaaaaagtatatatgataattaaaaaaaatattatagcatcttcattattttgtgtggtgcttgttaccaaaaagaatggtttaaagaccttcattcaatattgttttcatgtcctctgtaatcaatattttccttgctaccaaagattattttctttttcattttggttgtgtttgtctgattagttcgactctcttgtaaagatagtaactggattcatgtttttgttgcatttagaatggattcttcttagaataaaatgctaattataatggccacttgagtctagctcaagcagttggatttatgacttgtctgacgatataagggtccatctattgttttttcaagaggatgtattgttgttattatgctctgtattttacttttactgttattaatgatgtgtagcttgtctctgtctagcttggtacttttcatttacagctttgaatcatcacttatcaactcttctctttttttgggtgcttgctcaggattggtatttttcgaagggttcttggttagactccattatgcatgataattttgaaggcagttctgtaactgaaatctgtagttatgttgggcatcaactggaagaactcacgattgaggttggagttcttaaagaaaaattgcagagtcacacgagttcattacatgaacaagctagcagtctgtctaagttaatggcggtcgcccatagagaaacaatttcccgatgggagttgtatgaagccatgaagggagacattataagtaaagaatcatccgtaaaagaaaaggacaaggaatttgttacgttgcagaaaagtattgctttgtcttttgaagcattctccaatttgcatatggaaattgaaaaagctaaagctgaattacttggacataattatggtgcgggagatcaagggataaacttagcgggtcacctttcctctgaggaatctattagaaccatggaagacaagctattgtttgctatccgggattttgctaggataaaagctgaaattgtggaaggtaaccaaaaacaactgaagactgctgttgcagatttgcagaaagagcttcaggagaaagaaatttcaaaggaaagaatttgcatggaacttgtaggtcaaatcaaggaagctgaagctgcagcagctcgctattcacttgatcttcaatcttcgagaagtcagattgatgatttggagaaaaatcttcaagtcatggagcatgaaaagaatttacttgaacagaaaatggaggaattacaaagtgtgcatgcaacaacatccacagaattacagcagagggtcagatcactctctgatgtgattaatgccaaagatcaaggtcagtttactttggctttgatttgttttagttgtgtccattgtcatttattgtattgaaattatttatgattacagaaattgaggctttaatgcaagcactagatgaggaggagtcacagatggaggatcttaagaaaaagaaagaggaactagacaaggctttacagcagaagaacctagatttggagaatgttgaagcgtctcgtggaaaagttatgaaaaagctttccacaacggtaactaagtttgatgagcttcatcaattatctgcaagtctccttgctgaggttgaaaaccttcaatcacaattacaagatcgggatggagagatatctttcttacggcaggaggtcactaggtgcacaaatgatgttcttgtagcatcacagctaagcaacaagaaagattcagatgaccttcaagagttcttggcatggtttgataatttgattgctaatgttggaatgcagaatattcatcctgatattaaaaataatgatcgtgttattgaacacaaagaattacttaaaaagaagattgagtcttttgtgtcagacttcacaaatatacgtgaagctgctcaaagcaaggatacattattgcaattagaaaggagtaaggtggacgacttgatgcgcaaaggagaaattctggagagatctttacttgacaaggagtcacgcttaagttttattgaaggtgcagaagacccgggagtgacaacttcagcaacctctgaaattttggaagttgaacccctggtatgatgttggatatttctttgtattggtctaagtgttagtaatttagtaatacccttttttccatcaaaaaatttgtattaccctttttgaattgtgttttccttggaatgtatattttgttcgttatgaattttcatacatttgtgtggtatgttccaaattatacttccctggtatttgttaaattaagagtactactagctgtacttgtttgcatcatctttgtttctgtagtttgtgattggctcaactgtgattatattttcctgctaatgacttggttgttgtgtgcttatgcagataaacaagtggacagtgccaagctcttcagtcgcaactcaagttcgaagtttacgtaaaggaaacgccgatcaggttgccattgctatagatatggatcctggtagtagtaatagactagaagatgaagacgatgacaaaggtatcttaagcattagtaatgtcctttcctctcaaattatagctttcttattttggattgcttatactcattttatttgtctcctctgcctcagttcatggtttcaagtcacttactacatcaagagttgttccaaggtttacaagaccagtgactgacatgattgatggcctttggtatgcatatacttatctgtgtattttatctttttgagacttggtatttttcacggggatgggttggagtttcaagctttcaatcaaatttccatatatcttgataaggttctcaaatgaaaatggttaaaattttggtagataagttggtgtctatgccttttttttccccttcaatttatctcgatgttttgaatatgcttaataaattctgttgatgcaatccaccagggtttcttgtgatcgggctctgatgcgtcaacctgcgttacgtcttggtattataatctactgggctatattacatgcacttctggcaaccttggcaatatgagaaaatcaaagatggttagtggtcttcttattttctggtttttgctttgtggataagcttctcatacttgttttgtttactttatttacatgttgaactgatgagtaagaattctagtaaatcttaagtgtgcatttccttccttatgtcagggtcaaggttcggtttagaagtggaacaatcttggcgtgtccccgtcacatgataatatttttttgctcgtactggctcttaagttggtctgtgtctctaccttttcttcttgctagatcctgtgaaattgatttattgtttaacccaaccatacaaacagcgattcccatttttattgacatgaatctcagctttgcatggttgcatcaaataaaaagaaaaataggtccctcccattcctcacaattacaaagataatagattatgcaaaaacaaaaaaaggatgtaaactatagcttctttgtttaatgtttttatctaaaaccatagatggactttagttcttttcctatacgagctccaatttggttattcttattattattgtgtaatactgtttgtacgaataacctacccaccctttattatctaattcgcttattttggcatgtgatcacttcaacttcaagtctctgcagcattatattattattattattatgtcactttttataataagttaccctcttttttatttatttatttttattttaaattttactttttaaaatgcaacatagatgaattcatcaattttctcttcattgattaattgtatttttatgaatgccatgaagtattgtcgcaggacgaaaaatgagtgctaggtacaccctcattcaaactccattaaactcgtaatacttttttcaggaaaaagtaaaaataatattttataatagccattatctcattatctttacttttatataaaaaatatagctataagtagggctatttattagatctaattggtacttttttggtcaaacatttaatttacattaagtgtagattttatattttagattcaatttgatctactgttaatagtgcagaatgaatcagttgttttagtgcggattgtattttaatattttattaaaataaaaaaaagcaacagttgcacaactaaaattggagatggagtttttatctgttttaatacttgcacaattgtctcaattagagtgtaggagaagaaaaataattaggtttaaaaattagaatttatagatttgttcttttaatattattaaaaaaacttatataatattatatatattttaaatatatatatataattaggtgcgggttagattatatcgattactttttgaggtcaaacaatccaattcaatctgtacaaatatagatatttgcattttgtagattgaattggatcagatactttatactttatgaacaactctaactatatgacagaaagtattgtattaatgaggttttgttatttctctattaaagctaatggtaaaattaacaccattaatcacttcattaattatttattaaaacaatttttttattaattattgagattaatattttttttattgtttatcaaatataaattatttaactatttaaaaaatttcgtaaaattgggtatatatatattttataaaagttttgagttaaattttacatatttaaaaaaaaataatacaattgaattagatttagtttttattattaattaaatttaataattagataatggcagtacgaaacatgcatatagacattaattatttaataagtgagaatattatactatcattataatctatgttttttttacaataatatgatacaatgtttgaataaattaaaaatgtaacaaatccattattatacttgaggtgcacaatccaattacatatataactcctaaaaaattaagagtaaatattatttttgaactgtattttataaaaattattgatttaatcttttattttgtaaaatgacaattcaaattgtatattttttaaattatataataacgctctaaaattattctaaatactttcatctattctctctttaattctctcattcttttatataaaatattaatattaactaaaattattctaaataccttcatctattctctacttaattctctcattattatgcttttttcactgtcaaaagtgcctatactcacttatagtcggtcaatggtagttggaactcatccatggaggaggatgtttggaagatgccgtggaagattaaagcccctccta

SEQ ID NO: 17346 - DNA, 11345 bp, Cannabis sativa
ttgaactgtcacaacctttaacatgattttgatccaatcatttggaggaggtgactaaacatgagactcaacaacctttgatgaggcaaacaaataagacccataatctgcgtaacaaatagagatagattcaatataatgtttgatgttactcaaagaagtattatgtaccttgtcgttgcgggccctcgacattgtatctaccacaatcgaagcatagaggaacaacttctcaacatcaacccccttagacttcagattctaaaaaatttaacacaatcccaaacacaagctcccgaatccaaaactgacataaccccccaaggggatgacctccaaaggtgataagcaaagttacaatagaagaaaagatgctctatcgttttctcaccgtctccacagagaggacacgaagcctcctcaatatgcattctcctagcgagaaaggcacggataggcagagcattggagagaattctccaccaaagtatcttatgacgctccaaaacttcagttccatagtttgttccacaaggcgggagcaacattgcctaaaagagcatgttccaatgcttgaataaggtaggaagatttagtagagaataaaccactcaactctttagtccaaacccacctatctttaccctaatcactgggcctaccacttttgaagatgttactggtcgtctccaggttataaagagtgtggagcttagatttcccaatccctgttgtttaagagtaaaaccgctactttcttcaaaccctgaggccgaaaagaattaggtttagggtggaattcatggacatggataacccatggatcattcaagatatatttgtctctttttcatcgaaaataagcttgcaagcacctttcttaaggattgctttagttctcacaacaattttctagaactaagaatctaagttgttaaaggaacaatccaaaaatggcttacatctcagatacttggctcttaacatctaatagcacaatgactgatccccataaatgagggcccatccccacttggccagcaaggcttgattcatttttaaagtctttaggaagccaaggctacccgggatttgggaagacataagtgattccaagcctttaaatatatgcaatgattgccctgctcacaatcctaccaaaaatctctaatcataccatcaattttagaggcaagcttcttaacaaacttcgtagtctgcatagcgtaaactagtaaggcaagtccaacttatttgatcaaagtcgcacggctagccttggacaaagatttcaaccattcgtactactactcaaaataaaaattgaaatatatatttaaataagattgttcatataatttgcaatatgtggttccaaactctaatgaattcgcactaaactatttgagaccagatcaaatgaatctagtgtcaatagcttagtcactccggatcatttataatttttttggttcagtcaagattttaaaattttcgtccgtactacaaaccaaaccaaaatatctaattctttatatatacttaatatgattttttatcgaatattaatatttaagaacaatgttagtcataatattgatagttattttaacattgtgttaagaatatttatttttattgttatttacgtattttaagttttaaagtaaaactaatttagtaaaaaataataagaacatttatgaattataaaccacgtttcaaaccgaaccaatcagtttttaagttgattaatttggtttgattttaacatttaattagtctaattcgattttaaattttaaaaatcaacattatcgatttggttccaaaaaaataaaatttcgaatcaaactaaaccataaacactcctaattgacattgctttaattcaattatcataaacaaatcattatattataaagaataccattctttggtaataattaaaaaaagttctatgtaattaacttgctaaaggaaactaaaaacttttgttaaataaaattagaaaaaaaaaaaaaaaaacctaaaatcaaaatggttactaaacatgcctaagtgtgcccttttttttttctcttctaagttcatatggataacttccatgatttacaaaaataccaacctatatccttatatttttaaaagtacactatgctctgaaaatattcaattcaacagccaacacaactaaaaaaatgaccattttggatatcaaccaaagccatatatattttaacttgacatcttctaacattaaaatatatatatatatataattttgttaataatattgcaagtgaattaagtcaccaatccaacttgatatttcttgaaatgtagagcttatcgatgtattcaataattggaattgaggctgtaatgtaccttctcattttgttctctgccgattgatctgcaaaacaaatatactttctttttattaaaaatgaaaaaaggttgaatttacattcaaagttgaattatcatataaatattgaaaaataataaaaaaaaattataaaaatacttctttatcgcaatttttttgcaaaaatacagattttttttttattcaaaacagcattgttaaattgctccaacataaaaacaatattgatgttttgaaaaaatacaagtaaaaaacttgtacaaatgtaaaatatatataattttaagtattttgtataaaaaaatttatattttttcaagacctctatattacaaatattataggttatatatatttttatatatatattattggtaacgggtataggtaacacaaataatttttttaaacagtaatcactatttttcaaagaaggggaaattataattaataagagtaattggcggtaaaaaattttatattttaatttttatatgcttaattctttttattattttttgtgataaaattctcttaaaattatttttttggtaaatttaaataccaactagatgactattttgtacacgtgtgtatacatgaaattaaaacttcgaagtctatacaataataattcagttggtacgtatttaatagtgatacttcgctgacatcttaaatttgtaaataaaattaaatataaacgggtttaaatgtaaaaaatcaaaacataaaagaattttggcgcaaataatctaagtaataattaatgaagtcttacttgtttcattgagcttcaacaaaagttgttctctggttgggagagcatacattccagcagcaactgctgtcctaatagcccatgaatggtatggtgcacacacctgagcataagctgttgaagcagcaccctttaaataataatcactacacaaattcaaatgttagaatatatttcattaatgctaaaactatttgatcacattatttgataagttatggaagttttgatacgtactcattggacaaaaattgctcaaacaaagctctgataagatcaagaccctgtctaactcgtcttaaattacgtgaattgcttcctgatgttttcactgtatgatttgctacatcacaatctaacatgctatgtaaagtctcgtgtgtcttcgatgcttcaataagattatgtaccttaatcaaacaaataatttatcattattaacacaaaccttataaaaaaaataagaacaattaatcacaattattttcggcaaaaattatataagttttaattaacaacttgatgaaaacaaaggtccttgaaagagaaaaatagcaatccaaaaaaatgttaactttttgttgtttttgggtatttatatgaaaaataataaaaaatcaacaacaaaatataaggtatcatggaaacctttttgcttcatcacacacaaataaaaaagtgtacttataaaaaatctcacacaaatttttagtaaattctaaaataatttattgtatcaaaaaacaagattcaacattattattttttttttttaaaaccgttaaccaaaattattattaatgataataagatagactcagatttagaaatataaataaaaatattatgagatatgaaatttaataccttagagacgtattcacactcggcaaatttgaaagctaagccaagacaaccaaagagaaaggaaataagagaacaaggttcagaaaaggtatccaatctcagccgaaaacactcatgatcatgatgatgatgatgatgaatctgatggttaataatgaggttagacaaatcttcaaaggcatcggctatagcagataatgggttactactagaagcctctatattcaacctcttattctctggtggcatagcaataccctccatgcctctgcaacaactacttgatcttgcgtttgcaatcattaattaattaattagttaattaacaatccaaacaaacaaaattaaaagagaaaacagttgaagaagaatattctttgttatatgagaattgagattcaatttgaaaggaaagtttttatattatgaaaaaacgtgtatggttataatgggtttgtttaggctaggaacgcggtcaacctaatatatatacaaataattatttgaagtttcttaaattctattcgtattgggatttattaacgtgtggttttctaaatctattactattcgtattggaattagaattatcaacttttcaatctttttgttttggggacacgttttataataaatgacccactcattcactgagttaactgaccgtgtttccaacctaaatttcccttttctcacatttcttattaccacgaaatgacaaaattcaaaacaacaaaaaaagaaacgtttttttcaaaaaataaaagaaaagatatgtggttatatattcatattagttttatgttatatttttattatttgtatattattcttattttgtttttctattatttttgtaatgtttttataaaatattattaaaatatatataaaaaaaaatactagacgtaaaagtgtagaaaattactatggattatattctcattaagtgtattagagattcaaatttttaatttgataatttatctgagattatatttggtaatttaattagaaaagatagtatttatccattaaaattaatttacagttatatttcgcatcaaaaaaaaaaaaaaaaatttacagttatatttgattaatatataataaaaaaaagaagataattctcgtcaaaaaaaatttacatttttgtgtaaactttccattattaattttagcagaaaagataaataaagatttctcaaaaataaattggtaccaggccccgctgtgcatagggctcaccaaatctattgacttatttttgcaaaaatatacaattttgttagtgtactctgaaattatcatatttcctttgatgaatggtcacaaaagaaacaatttttttttcaatgagttggcacaacacagtttatatttttacagactttttaaaatacaagtcgagctagattgacaaaccataaacatcaagctttccattccattagaaaaaataattatactttattccaagactaaatatcgtatatatgcttaaattctaacaaaaaataaaaataaaaaaaaaatccctatgttaccaatataaatatgtacgataaaatattatatgagaaagttagacaaaatattatttattaatgatgagcacttatatgtgaaaattgtgttccattcattaaacaatttgattactatactttttttttttgaaagaactaaaagttcattgattaaggaaaatagatgggaatcactgggggattactctccccttgatacaaaaaagccgactcgctagcaattctagcatttttggctgcaccatccgctactacattaagactacggttaatataaaagaaatgacaattcaggaattttcttgacaagtttataattgagtaaaaaacatttgcaaacttccaatcagggcatccccctgaattagaaagagctttgatagcagtgcttgaatcagagaggaggtgaacttcttgccatcccaattcagcagctcgggacagagcaagggagatggcctgaaattctgcttctaaagccgaaagtgccttaattttctgggattgaattgaccaacttccattgtgagaatcaacacatacagctgctattcctgcattctccctagtccaagaagcatcagaaaaaacaacattagaagaacacctgtaatctgcactggagcttcttgctgctgtgttcaaagggactggatttgtcatgtttaactcagtccttcctaggttgttggatatattttgaagttcaaaaaatctggttccaattttgtgcagggccacggtagtattggctgctgaatttcgaatgcaaagagcattcctttgatgccaaatttcagtaaaaacacatccaacatagttgagcaaatcaaacctgtgagtagctccttggagatctagcactttttcaaacaaattgatcaaattatcatcactaaaacattctgttctaatggaaaaaattccaccaaaccagattgctctagagaaactacactgccagaaaaggtgaaaagcactctctacttcagtatcacacagattgcagaatttgtcattgagaaaaggtagtcggttttttgttgggattgcttcattcaagacacgccagagcatcactgaaactcttgggtgaactccatttccccaaatccatttccataagttctttcctatgccaaaccttgatgcattgtccacacggtaagcttctttgacagagaaaattcctacttgattgctcttccaaaaaacctgatcagaaaaaggggaaggaattctagggatgttactgatccgagtccccaattcatggccaaatacctgctcaataagttcctcattccacttattctcaattgaaacatcttccagggtctttatagtgtaacctctgccccttaggctgttcatcaagtttgcaaactcatgatactccatccatggaatccatggttggtgccaaaagctaatggaacttcctgatgccgcaactgatatatttgattactatacttattcatctctttttaggcggaaaagtattgtaaagactaaagaacataaaacgttttctcctaactaattctcttttttagtatatattcacttctttctaaactttaaaacttttaacaattcaatccaatatggcttatttataaagcattttatgattgtgatattctttcaatgttattttataaacatcttactatagaaatgatattcttcaaatgtagtattattctaataacttcttttaaagaatataatggatttttctattagaaattatttcatatatcattttattaattttttttttacaatttatagtttgggttgctccggtagtttctatgtgatttgttatgtggattttaattgtgatttaggttagtccgttagttgctatggagatttctatattgaattttatactgttttaaagtataaggataaacacaattaaaattaagcaaaaatactatattggaacagaaattgccaatactaatctatattttcatatatataccaatttatacattctacaatattattattattcccttacaagttacaaactacacaacactacataactaattaggtaaaactcatctcacatcattattaattatcaaacacattaactactaatcaaaccctattagcaactaattccaactctaacccattactctctttagacaaatcctcactagtatttttcttcttaatcacttgaattggcttataagtgtacattttagcacaccaaatataataaaccaaattcacaacttgtaacaaagtaagtaaccaataaaaatactctaatttacccttattcaaattatcattaggaagccaatttgagccatcagaacgagccgtgtacttatgtattagtgtaaccaaaagagtactcacataattcccagccgaaatcgaagtccaaaacagagccgtggctgtactcctcatgctttctggggcttgatcatagaaaaattctaagtgcccaattgacataaatgcctctgctattccatggagactatattgtggtacaagccaaaaaactgagatgggaattgttgtttttgggtgatcggctaatccgtgagccgaagccgcggctttacgcttgatttcaacgaagccggctactaatgttgctatgattgaaattaggaaacctattcccattctttgtaggaatgttattcctctgtctagaccagtgaattttcttgccacgcgtattaaaacgccgtcgtataatgctatggtggagagcatggtaactatggtgaagacgctcattgagccagctgggatttcgaatgatttggtgaggtgtctattcatggttttggcttgttggagtgagaaggttccttgttgtgcgtaagctgttatcaggagtattcctgaggcccatattgggcccattctgattattgactttagttcttctacacgatggacggtgttgattctccataggttgggggattttacgttgtcttcttctgttattatggctgccttgtccaaaaacctgcatgtaattatttagttaaactaacatagtaaaaataatgattattactctcaattaaactcgattctaatgcttaaaataattatttaaatacacctttgttatggtcaacctcttattctcaacctttacttttaaaactacaagtcagagttttttttttcatctaattcttaatttttctaaagatttgattttttaaagttttataaaattaattccatgtgattatatcaaagtggactgtcccaacattagtaatttaagggttggattaaccgaacatgtgacgatggcccctgtgctagtgggccggaccaggcccaatcccaataactaggtatgtatagttgtgggctgataaggtgacgactgagaaggtggaaatggctaattatgggatatggaagacgagagaaatcttgtcctttttatgggtagaagacacagtgttattattatatataaacaacagaacaaacaacaagttaatgggattgggtcccattcataccaaaaataaactaaaataaaatgcatgcatgaatatataaatattattgtaatttaaccatattacaataacttcaacccaacacgtactggtttctgtctcttctccttttttctctttaataaattaaattaaaacaaagctatcctattattgattgaagggtgtattcatatttggtaattaaagctacatataatatttatattttcaacgataggttagatttggtagagaaaatcttacttaattacgaactaactgctacccctctaatcatgcttacttaatctcactaataataaacttttacattaacctctaaaataatcgatagtaactgtactggaattagtggttgaaaaaatcaatttctaccgacaatacatgacattgacatcaaacaaagtactatgtaatccaaaaacagactgtaaataaataattactacaggataaggcaaaaaactttatgatttctctttctcaccacttattagcatttgtaaaattaaaaaaatataaaaaagatataaggagagagagagagagagagagagagagagttttcttacttcatttgcttagtgtgaacaagttctccatcaatagaaataagagcatcaagttcctcattttggtaaagctgagtagagtccgaaaccaaagccaatttcctctttttataggcagccacagatacttgtaccaaccgggtaaacgggctcccagccgggtctaaatttcggtaaagcgggtacccgattatgaaagcaataatggataagaacatggctatggttggaatcccaaggcccaaaccccaaccaacattatcttggacataaacaaggacagttacagctaccaatatggaagcccccatagtaaaataataccaattgaaatacttccatgtcttggtgttttgtttcgggtcattttcgtcgaactgatctgctccgaatgccaccacgcagggtcggatcccacccgacccgagagccgttagaagtagtgacatgtagagaatcgccacctgtcccgaatcggcttctttacacacttcttcgcctttacacggtggcggtcttaagtggggaagaattgctgagagtgttaagctaatcattccctatcataattaaaaaaaaaaaaacaatattaaattaaacataatattaattaattaatagctgtttacgcagctattaattaaaacagattcacgatttactacctgatcatcatgttattaaaacaatcaggtagtagatcgtgagcctgtttcatctcgaaccaaaaaatatttgtttaaaaatttactatttggtagatgatggaagcaacagtgatggtccagaagcggccggcgaatgaatcggccacgaaagctccgatcaagggtgtcaaactggcggtgccgccgaaattggtaagagtgttagcagctttggtgagtggcatatgaagctgtgttgttaagtaactaatcatatttgcattgaatcccacaactgctaacttctcacaaatttcatttgctataacacaaaacaaaaaaaaaaggaaaaaatatcattacacaaaatcaagaatataataactaaataaatatcataattatatattaattaagcttacagaagataaagggcattgtgattaatcctcctttttttcttgattttttctccaccattttttccattgttattattttttttctagtgtatgtagaaatattataagagtgagtatataaatatacgtaaatataaggttatatttatatataataaatgttatgatatatgaaagtagagccactatatatagggtgtgtgttcagtatgatgtatcatcaaaacgagtgaatccaagagaatccaactattatttctatgctctttctttgcaatgatatgtacaattttatttatttatttatttatttttgaaagatatatatactacaattactcttatatgttataagtaagtggtatccattggtggaaattatatatatatgcaatggaggaatttatttatttatttatttggagagaaaatgtaatggaggaattggtattttattattttttgtatttttgtggccaggtggatatcgattttaattaataaatattgatagtacatggtgtgcaataatgtgagatagaagagtagtatatata

SEQ ID NO: 17347 - DNA, 5319 bp, Cannabis sativa
  modified_base (319)..(319): a, c, t, g, unknown or other
  modified_base (586)..(588): a, c, t, g, unknown or other
agattcgagtttgttgtgtcaagtggggggcatcaaggatgttcctcatagtacgaaggaggagcattgtcatgaacgctcactgatcgactctttgaatcagagcgataactatcctccatgaaactaactgccctttgttgtcgaggccctcgaggcacatgcccttgctagcaaagtgaaagtattagggggttttaccacaattaaccaattttttaatatcaaataacaacttatattaacatttagaataaaaaaagattttaaattcgcccaaacatcattgacgaaagagaattaaggtggcgtttggttngaggtaataaaatggaatagaaataaaacaattttcattctattcctttgttttgttacattttaaagtactggaatatcattctaatggaatagtttttctactcttttggtagaatgactattccattttaaaatgaaaggaaagaccattctaatacaagattggaaaaaatttaataattttttatcaatttctttatacattttttattcaatttctattcccattcccattctgacttatttttattaattttttttatannntttaaattttattttattcaatttttattcctattccgattcttatatttttattcatcccaatcaaatatgacttaattacttagcatcatcattaaactcaataatttgaaggtatatgcggcaaatttgccaaggcaataataatcggatggttgtcaaattcattaaaaagaatatcttcctcattaaatttgtagcaaaagatgaactatactctttcacttttgtatacaacattttgtttgtgtggctaaccattcatatcattgattgtttgtagttgtaaagatattctgcatagatctcaattgcttcatcaccatattctcttgttataagcaaagtaccgggagttgaaaaagggtttagggtttctaagttctccttagcaagtaaggtttatttcttatatttcttcagtttctggattctcttgcttttgattgaaaatatttgttgtttcgatatttgatttgtattttttggattggttatacttatagtagtgttgaaacgttttgaacacgtatgcacaccaagtgtttgtcaaaaatctccaatgaaggtttttcttgtgcattgagtagatggctattgtctttaagtcattgtttattctgaagtagttttggagttattctaagggaaactgatttatttagagctttattatctatatgacagtaagatttagcaatgatcaatgtggccagtagatgtataaaatattaatgtgtctcagtgttgcaagtaaaaataaaagaactatttacaattttttgtttttaacataaaaataataaatcaaatagtaaagaattgatgatcaatcacaaatttttttatctctgttttctttttccacatatgacttcacaaaccaaacaaaaaggaatcatttttttctatttcgaaaaatgattgcaggtactgttgtcacctctttgggtttttgaacataattttagtttattgattaaaaacaactagctaaaactcaactaaactataaagacccttagcttttctagttctgttttgatttggcaaagatttttataaattatgtcctagtttataacctttctaaaggaaaggattttgtgacatttattggaatatagaatgcttggatacaatcatgctgacttttacagctaaaaaaaatgaaattcttatatttatgatgaatatgaaagagttaaaacagttaataacataaatatgtcttttgtttctgtctccttgacttattgtgtctctctttggttaatggttctaggccatggaaggaaattcagtgaatcacgagaatgataacgaagaagaatatgtgttactcgaccttgattctgtttccgggcagctggacatcccacctgatgcgccttacgttctctctgtaagttttttcgcttgggatttcttttaatggattattgaaaattaaacttattttcaattgatagtatttttatcatgttattttcttttttgttttacatctagtcttgattattagttcctgctacttgttctcactgctgattattgtaatttgattttgactgcttgtatatatgatactagtctttaagttatgagcaaatgtggccgtgttggttaaaatggatcacttctttgggaaaatcttttctatgcttaggaattattcttgtatagctgtatattttgaattctattcaaagatattaggagagtagttaggcttattctcttttttgttgtaattatttatttccctttatagggagctttgtactcaatatatacacagtttgtgtacaaagaaaaaatataagacaacaattacccaatattgtcttcatggtatcagagccaactttttcctaaaaccccctaatagcttctatcctaagtcccaaatcaatattgccatatctcaaaactccaatgtatctgccaacacccaagccaatttcatcactgttgaagccaacgttaagtttgatgagttgagtggaaaaatcattggaaggctgccgttgcttccaattgatgaagtattttcggaggttagaagagaggagagtcgaaggaacgttatgctaaaaaagaaggtaattgggaccactgttgaaggcttagcactggctgttggaggaggttacagcaagaacaattcatatcctcttaaatttgatgaataatcgcaagtttggtgtgagttctgcaacaagccttgccatacttgtgaaacttgttggaggatccgtggaaaacctgcagatcggaagagcaagactgagagatcaggttgtatccctattgccaataaagttgagaccaatcttttcactaaggagcaactgactcatcttcatgcattgttgaaatccaatttgaactcatctgatattctttttgcttctattgcacaattaggtaatgaaatacatgccttaaactgcctttttccatcttatgctccgtggataattgattctggagcttttgatcatatgataagttcttctaaattctttgattcgtatattccttgttcatgagacaaaaaagttaggattgaagatggtaatttctcacctgctccaggaaaaggtctagtaaaattatctaagggaatggatcttaaatctgttctccatgttcctaatcttacctataaccttttatctgtgaataaattatcaagagattctaattgttttgtgactttccatgaatctaaccatttttttcaggaccagagttcggggaacacaattggcagtgttaagatgattaatggtctttattattttaaagataatatttctcagaataaaattgctcaagggtatagtagcattagttctttttctggtcatgatcaaataatgatttggcataatagattgggtcatcctagtttctcttatttgaaacatttatttccaactttatttaaagttttaaatcccttttctttttagtgtgaaagttgtttaatggtgaagagccaacataaatcttatgttaaaacatcttataaatcttcaaaaccttcttacctctttcatagtgatgtttggggaccttctaaggtaaccactagttctggaaaaaaaatggtttgtgacttttatagatgactatattcgtctttgttaggtatacttaatgaatgaaaaatctaaagttgagcagctgttttcatattttcacaaaatgattgaaacccaattttaaataaaaatcaatattttaagaactgataatggaatagagtattttaacaacatcctcggaaattttttggaagaaaaaggtatcttgcattaatctacttgtccatatactcttgaacaaaatagtagtgatgaacgaaaaaatagacatttattagaaatagctcgtgctatgatgttttatatgaaaattccaaaatatttatggggtgaagccattcttaccgcatcttatttaataaataggatgccctaaaattttttacagtatttgaccccattagaaaatctcgactctaatttacctttaaatttttttggttgcactgcttatgttaacattcctaaacggtccaggtctaaactagatcttggggctgaaaaatgtgtctttttggattatccccctaataagaagggatacaaatgttttaatcttggatgtttcgttttaagaaaatgtcccttatttctccaaaagtttaattcacggggagaatgtagcgaaccaaattttgggatactttggaacttttaccaaaaactattcttgatatttcaagcaaggaaactagtcccattgaatacgaatttgaaattggtttgtcagataaagaaatgctacaattgatagaaaatcgtaataatcttgagcgtgtggtttattcaaggaaaaatttcactgaaaaaagtaaggatcctttagtcatccctgcacatccctagatgatggttcttcaagtattctaggtaattcttcttctattcctatcgttgattcatctccacatattactcctaaacctactcctcctgaatcagccccaagaaagattgacttagacaatctttccattgcccttaggaaaggcacccgtacctgtaccaagcaccccatggctaaagacatatcctacaaacacttatctgactcctataaagcctttaccattaaaagttttgaacgtgttgtgcctaggaatgttctgggagcactagatgatctaaattggaggccaacaatatttgaagaaaggaatgctttataaaagaatggtacttgggaaattgtgaagttacaaaaggagaaaaaaattgtagggcgtaaatgagtatttacaataaaatacaaagctgatggacgtgtggaaaggtacaaagctaggcttgtggctaagggttttactcaaacttatgtaatagactaccaagaaacatttgctcctgttgctaaaattaactctattcttgttttgttgtctctagcagttaattctaattggcctttacaccaattagacgtaaaaaatgcttttcttaatagtgatctagaagaagtgttcatgagtattcctccaggtttcaaaggccactttggagcaaggaaagtttgtaaattgaggaagtcattgtacggtctaaagcaatcccttagaatttgatttgagcgttttggtatggtgttttaagtgttatgggtacactgaaagtcaag

SEQ ID NO: 17348 - DNA, 3880 bp, Cannabis sativa
tatatttacttacctctctttcattgcacattggaatctgaacaaggacttttgggaaacttgcagggtcctcagtgtcataagcatttggctctattgtaggctttaatttcttgtacttgatccaaaaacatccaaaacacaaaactaaacgatcaagagattgaatcaagaatagtacagtacagaatcttgagagcatgatcacaacaggagcaatataatcagccctgaatgaaagccatgccatataagtccattgcacaagaccttgaacttcccatggttgaatcagatttaaattccagctcttgaaatgagcaactaattcaataaccaaagcaacaattgacaaagcaagaaaagctttgatgaatctgtagagctttcctctggttttaggctcatcatcattatttaagtcagacaaagcaatccttttcttggctgcaacaaacatggtcttagaagccatggtcatccatgaaagacaagctagagttctttgaactttgagaagaaaaacccatgtgagttgctttggactaactgctttttgcttctcaagaaacaaagatgattccataccagtcactcctaacacagacttcataggtttctcaactgtcactacaactgtattatttggagccatttgagagagaatccacttgaagaaatagtaagaaaaatcaacacccagatcagaaaaatgacctgagactgaagaagtagtggagtgagcagaacactcagctctgagatttgtatgccattgttgttagaatgagagaaagtactactcaaagggggtcaaattttatataatttcttatgaaatctagatctttgagtgaagtttgagaattgggaatctaagtcaaactgagagagagagagagcttgaactcacactctcctaactttcctatcaactataaataaaggagaagagaagagtgttacttttggtaacactttttcatgtgtggtaagttcagttctattattatacctttcttatttttgatcaaacttattatacctttcttaatcatccaataatcaagtggaataatcaactttaaagctgtacaaacttaaactttttctttcaaataatggggaccacttggtgcaaatcctttcctaatccctttgatagttttgacaatactggaactacgtgttaattataagggtcttatgagttatcggtatgcactttaaggattctcatctcattaagaatgacactgtcacagcaagctagccttccaaagaatcaagcacaatctctcccagtgaaagatggtggtggaattcgaaccctgacccgatattagtaaaggcatccctacacaaacttaactttgattagtttgagttagacttttatttagtacgtactaatcttgagttaaaatttaaaatagatacaactaaactacagccaatttacaagtagtaaccccacaaaatgtacttcttgtctgctattttgggcaccatgcattacatcaatggttttttttttccctctttatcatcattatgggttaaactagactaattccttttttcataatataatttcccattaacttaaatgagatctacttcttttatatacatttattttaaatatatattttttattttagctgtcaccttgaaagattttaaagcatttgaaaatattcaatagaatgacaatatctagctggttccattttttaataatatatataaatatttttaccaagaagaaaagaaaaataaaataaaatagaagattgtgtcttttttacactaatagccaaacacttggtatttgaagtttgtggataccaaaactttctaagaatgtataaaagagaagagagtgaccatacaatatttccagacaaagcatgttattatattctgataataaatatttaatttttctgtactctgagtctgaccatcaatctgtaatgtatcattatatatcaagatattgatatgaaaaaactgtactgaaacttattatttaagtcatttttcttaacttaagatataaatataagcagagtcaaacaaagcccatattattaattatcaaaagaaaatttaattttagcttgaaacatcattaaagaagagtagttatggtagctactactattatctttaatcctaattattcctttttacaccttctgcttcttctgggtatattccttttctttaactctaaaaccacaaatcatttctttacctccatgccaatcaacttttttaaagggtatttttgagttcagcattgctataagacatcagtaatatctaccaccacttaaagtttgtattttatgattagttagtgtcattttataaaaattaatatattaaattatataagattcaataattaattatactaataacaatatgacacgttaaaaaatgctaagagctactaataacttttagtatttctcttattaggcaccagtggtgtctaagtagagtgtgtattgtgattaattaacaatactcaaaattattacattaaattatataaaactcattatttaatttcactcaatattacaattgttacatttagattttaccttccacaaccaacataatcaattttatccttttttttttattggatattattcttacatgtaaagaagggtactttttttttacatgaaaaacaaaaaaaaactagatcataaatttaactcaaatttaatacaaaagactataaagagatagatctgacaaaaatgggtccatgtaagccatgttgacagttccacactaataagtatgtaagacaccattattggtttagttgagcaagcatgcatatctccgtgaccataatcacatactacccgggaaaatcttctcttctccacttattgaaatctcaccattattttcttaaaaaaatactaatatttatttttcttgtgacaacatttatgatcttagaatatgcacctactaatatttatatatatatatatacacactttatacaatctttcttgatatgattcattcactcactcactcactatcactactgagaattaagattctgaaatcttaaggttaacatttatgcatgtaatttgcaaatttgagttgttttcactccttttccttgaaaaaccaaaccaaattaaagaccacttattatgaagagagagagagagagagaaagagaaagactatgtggtcaaacttaaacaatcttaagcccttaatgtgtggaagttcaataaatgtagaagccctgaatagttgagtcagttatttcagttattttttttacagcaaaagagtatacattttcactaaactataaacaattcattagaagaaagaaacttctgtgtgggttcagggtaatatatatactagtgcatctatctatataatgatacagatgtatagcaacattaaaaaattggttttatgttctaaacactttaatgtttgtgtctgtgaattaaatgtgtccaggtagaagggaaaacgtttttatcttcctatgattacaagacaccagaacatggctgtcatgaaagtgaccttttagaataataagggtacttcaattttattcacatactcttctcattttggtgtaaccaaaaatcaaagcttttttagttttaccattatatatacatattattccactatattggatagttagtctcttgtctttatatatctgcaattttcaagaaacatgctgcccttaacctgtcaagtacaaatttcaataattccaagttttatcttttacattggcacaaaagggtattgattatggacattggataagaaggaatagtattagtca

SEQ ID NO: 17349 - DNA, 4497 bp, Cannabis sativa
aagtctaattaagttgttaagaatcacattaattaatttcactaaaaccaaaccaaataataaaaataatcgattttagggcattgttacttatagagcatcatttgtattatattttctcgatatatattatttgtcaaagtagtactattaatatgttccatagcaatatgttaaagatgctgtacgtggaccctataataatcctttttgtgatgtataatatatatacacacagtatttattcgacaattttgccatcctgtatatattgaattgaaattataattttagaaatatatttatatatatagctagtgtgaacagaatgatgctgataataacttgtgagaattcattacacgcaataagttttttttaaaaaaatcacttttatgattgattaatttttatattattgctctatttgtttggttcatacaagtaactcaaatttatatatgtatttatggatatattataactatacgtgtccgtgtgaatgcattaataactgagaatcttcacacaaataattaagactttacactaaaaataattaagttcaagttttctccttaagcaggtttctctttaattattattttttatatacaagtaagtaagtaacacatttaattcaaacttaatttatatatatttacgaaaaattacacaattgtattattttacactcttgctactgccagttcattgagttaattaaaactaattaatctgcaactttataaccctgccatacaatttatataccaaatttaataactcataaccatatatttttttaatattctctctgtagatatatgagctgtgttatttttattcatacataattaagggtaataacatttatatttatggcacataaaataattgtaattttttttttgacacagtgtatataatgttagttaggaaaatactattttagattatgtaaataataattcaaattctatatttttttaaaatagtaaaaattagacaattaatttaatttttatcaattattttttattaatataataaccaacttaaacttataatttctaacacaaatatatgtaaaaaatgaaatcagattagtaacaggcacctcaagttaaattattattaagatttaatttgataaaaagaattaatttcaaggtatattttgtgttattttgaaaaatacaagatttaaattgtcatttaataaaataaaaagtccaattaattagtaatttttcaaaaacaggttccaaaataaaaatgtgtttactaattagttctcaatatacttaaaaaaagaaaatatgatacaacgaaatctaaattaattgttttcgaaaaggtaaattaattatttgaaatttttgatagtgagatgcttaccatattaaagtactaatatggaatgtcaagtaataatatgcccaccattaattggagcaattactcactatttttgtttctttcattttcatggtgatcgatatggtcttcaaaccaatacctgacatatatatcatggcatatctataaatatataatatataatatataaatataggactttgcatgaaaaggggtttatttggacactgtaactgtgtcgacagagattaaaagttttgaatgtgaggaatatggaaatgtcatcatgtttccacatcctttgtatatataacccatttctcaactgactataactatatatattcttccaaaaaatattacttttgtacccttaattgtcacaattatttatactcttgtaattattatttgtaaccctaatataacatacatacatatacataattgtatttactaattcccggcctttatatggcaaatgagtcttggtattttgtcaagtatatatggtaaccttaccaaaaaaaagtatatatggcaaaatgtaagaatattccccacaaatgtgctaattttaattaaaagtactgtgtgtacgtatagcattcactatatggtatttatacatgaatggttacatttgcataagtcaatgaacattcttgtattagtggtgtccagcacattttataggtagattggttaatgatattctttaaattttatttttttaagttatatgagactcaatatttaattacaccaatagcgatataatactgaggaaagtgctagttaccagtggtgaacgagaaatactaaaagacatcaatggtgcatttctctaacgagaaatgctaaaagacaccagtggtacctactaccctttatgtgtcattatcgttattagtctaattaaatatcaagtcctatatagcttaatataataatttttagaaaattttactagccaatcgcacgcaaaacgacatatctaaagatgctaaggactactgatgcctaataacaatactcttctccttactaaagccttacttatatatgtgtagacaaggaggagaccaattgcatgttgacattttgaagcacttaaccctagctagctattatactattatactattataagacacgatctaccactaatttttttactaaaaaaaaaagcactaaattttgttatataaagattaattataacactagatctcttttttcatttattatcactaaattgtttcgttatatatatcgaattactaataataataataataaaaaaagacattagccggtcgatgtggccaaagagggacccacaattgtgtccataaataatgacccctctgaaggacatagagaagtcgtcacacacaatacaatccccttctctctctctcttcctctctgggtaatttcttttttatattttttctcccaaataacctcatagtgtcgacataatgtttgtccagcaaaagaaggagaattatgaagaaaaagaggaggaagaagttattattattaataatttagtaactaaaatctgtgatctctactcacaaatctcaagcctcgacagtctaaagccttcaaaagatgtcgacactctcttcacccaattagtccacacatgtataccaccttgcccaaaatttgacattgacaaactccccaaaagggttcaaaaaataaggtctaatttaattaggctttgtggtaaagcagagggacttttggagtcacatttctcaacaatcctaaccacatcatcatacaaaaacccattaaaccatctcaaaatcttcccttattacaacaattacctaaagctaagccaactggagtaccaaatcttaagccaacatttcaaaaacaaccaacaacccaaaaagatagctttcgtgggctctggtcccctgcctctgacctccatcgtacttgccatgaaccacctcaaaaataccactttccataactacgacatcgatgattcggccaattcaaaggctagtgcgttggttgttaacgatgatgacgtgtcgaaacgtatggtgtttaaaacaagtgatgttatgaatgttactagtgaacttagccaatacgatgtcgttttcttggctgctcttgttggtatggatagagatgagaaaattaaagtgattgagcatttgggtaagtacatggctcaaggctcaattcttatgcttaggagtgctcatggggctagagttttcttgtacccagttgttgatactcattctgatttaactggatttgaggttcttgatgtgtttcatcccactgatgaagttattaactcagttgttatagctcgaaaacaccactattgtgatgatgatccaatggtgatgccactgccaggtgtcaacacctcatcatcatcctctgcttctgcttctgctggtgcccccataaatatactacttcctaataagtgctctcatgggattgaagtatttaatcctcttaataatatgattgaggaattggggtttgaggagaatctttcttgatgaattaatatatgatcaaagtttctcaatcggtcaggtccatgctatattatcatgattatatataaaaattattgtgttccttattaattcctatatatatatatgggttggatcatgcatacctaacatatttgttacctgctagcaaattatgtgttgttcgtgctattttgtatcaaaatattcatacacatagatatatgtatatgtattatctctaataatttattcatctttagtactactagctagctagctagctagatttgatgtgtaatgtgtgtcatgctttaattaatcaaaatcatctttctttctatagcttgcactatagctaagtttaattatttctgtataatatatagtgtacaagactctctctatgtgtatatatctatatatatatatactctttctggtttgattttagttatatatatatatatatatatatctttattaactaggtcttgtgattagtttcagttatatatatatatatatatactagtaaacatcccgcgcttcgcggcggatatataaaatattt

SEQ ID NO: 17350 - DNA, 7621 bp, Cannabis sativa
atagtgtaaatttttttttgtatataatataaaattttttaattatttaagcatataaattcaaattaggcatcaatgatgtctagcatcatttataggcatcaataatatctagtgatattttctaaatataaaaaaaaacagagagaaaagcttgaatgcttgaattgttatttgaatttctgtaatgaaacaaggtacaaggggttacattatataaataattggaagaagtgagttagttaggaatgtaactaacttagctgactcaaaaatcaaccaactagtcgagcctagctttacacaacaattaactaacatatatatatatataattaattgtaatattgtaatagcctctctcaaaatagagagtatatgttagatacacctattttggaaacaatgttgttaaaggatgagggtagtaaagccttttgtaaatatgttagctagattttgttgagattaaacatgaagaagtttgagggtgccttgttgaactttttctcggatgaagtggcagtctatctcaacgtgattggtgtgttcatggtagatagagttctcactgatgtgtattcctgcagtgtatcgcaaaatagatacgcaggattgttctgagagatgccaaagtctttgagaagagaaaggacacaagtgacttcagatgttgcgttagccatgactcgatattggcttcagttgaagagagtgaaacaacttgttgcattttttatttttaggaaacaagggattgtccaaggagtacataatagtcagagatggaatgtcttgtatcttaacaactcccccaatctgcatcaacaaagaaagacggttgcacattcgaaggagataagcttgtttctacataagctgacagacttggtgtggagtttgatgggaagaataagccttgtccaagagtgcgtttaaggtattgtagaatgcggtgagttgattgaagatgtggcactcgaggacaagtgagaagctggctgagatgattaacaacatatggtcaaatatatgagtttatcaatcaagcttctataagtttttgggtccgataatagtgtttctttgtccttatggagttttagattaggttccatgggagtggaggctggcttagctccaatgtaacttgtgtcactcactagttgcaaggtaaatgatctctgagaaacatagataccttgtttgataccaatttcaagaccacgatgaacctaagtgaaccaatatctttgaggtccattactctcattcaatctttcttgaagatcatgccacatatcaatggaaagatcgaaatacatgatgctttcagcaatttcaaaagaaacagaattgaattgacaagccaagacatgacgatattgttagaacaaattcaagaattgacatgaggattaccaactactggtggaggaaaggaaccatcgatgaatgtagatttgttctttactgcaagagccatgttgatctagcgcttccatgattggtcattagcaccctaaacccttaagagagtactaatgccttttcatatcattaacttataagtttactaatagtaaactaaatctatatgtttctctgtcactaagaatgacaaaacaattcaaaagtacatcaatacaaacacaaaatagttttttgtgagttcgataaattagatgtaagttaaagataaatcgacatgcttggcaccgactataaaaatgtactttttccacctctctttttgttgtgaaaaatcaatacgtttcatttgaacaaataatataatgaaaagtgagtattgttcccataagaattgttagtaattattaaattattaattttaaattttgatttagctaataaaaatttaattttaaacattaaaaaaaattatagctaaaattaataattaaaaaataagaaaacgaattatacaataaatttatggatataaccggtatttaacttcatcatctatctattctatttataacacaatgtctactattcttcatcttattatgatattgaatcaacatgtaatctatattcttattaggacatataataggcgttacgcaaaatatcctagaactatataaaccgtaaagttactttcgtccaatatcaaaattcacatcgatttaaccctaacatattttgctctcactttttcagattttgaattaaaatcgtaaaacatgtaaatggtgatcaaccatcacaagcattaaacaaaaattgatgaattcataatgaagaaaaagcaatcataaaaattacattaactaataataaagtatcaagattagggctggcaattcgtcttattgtgttgtgttcgtgttgacacgtttatgacacgacacgattaaggtaaatacaaacacgacacgtttattaaacatatcaaaacctcaaacacgaatacgacacgtttattaaacatgtcgaaacctcaagcacgaacacgacacgattaattggtaggtcacacgatacgacatgataacaccattatgacacgattatcattataaatatagaaaatttgaatttttttataaaatatatgaaaattaattcgtgttacctgtcaacacgattatgaaacgacacaattactaaatgagtcgacacgactatgacacgataagattaaggtaaacacgaacacaacacgattattaaacgtgtcgaaaacttaaacacgaatacgacacgattattaaatgtatcatccaaacatatttatttcgtgtcgttttcgagttgtgtcatcgtgtcatgacctatattgccaaacctaatcaagatactacattaaaaccctaaaaaataaaattagttcatgataactataataatatccatcaaattaatattgaaaagcattaaagaagaaaatctttgaaaaaaacttccaatcttgatcatatgtagcctccaaatgcttttatgagtttctcataggtgaaaaactgatgaaaatcatactttgttatactcgctttttgagaaattaaaaaagtcagttttagactttaaccaagaagcaaagagacgaattgaagattaaataaatggggtaattaagtaacatttgaaggaaaacaactcgaacatgcaaccaaaggcctaacccttagtcagtggttgcatattaaaagagaaaacaaggctatattcgaccactgacacttcctagtgtcaatggttgcatatgataaggagaatagagtagccacacgagcactgacactgcctagtgtcaatggtcacccatttcaagaagattgaggaaagctcgcgactaatgactcagtatttacataacacataaaagaagctccttaaaagatattttgggagaagaatggcaagcctatgagcactgaccaaagattgtgtcagtgctcgtatggctttagtaagaaaggttttttgggcatttttgaagcttaaaaccctaaaggtgtcaaccaacttctaagatattgtgaagacaactctaaatggctaataagaagaggttcatgagcattgatatttcttggtgtcaatgctcgtgtgtttcccaaagggttagacttcatttagcatatttttaacatgtctcctgaagaaggaagctttcagaaagttctcaaaagctaaaccactttggcacatgaagaaagatattttattctatgcaatttatttattacttttagttgtaaatgtagaaccaaaagagattttgtaaccattctcccactatgtagggagagtgattagtctaatcctaggcctatataaggttatgatttacacctagggagagaggaccacttctttgactattgcagctactatctaaacggttgcatacttgagagaaaaacttcctaattgtttccccaaaaaattttaaccaccattgagataaaacaagttgagtttcattgtcaataatctttggagagtacatttagagatagacccaaagagatctctataaagagatatcgttgttgtaatcactcaaatacattcttaaaaacataactttggtgtgttcgaacaagtggattagtccattaccattaatcaagggggtgaaccactataaatattatgtgtctaattttttttactctgtaaagcaagtttataatttgacaatcgatatagaatgtctagtttgcttatttacaattttcttagttgtgttgacaaaaaactatatcaacacacataagcatcgcgactctaatccaaaccgtgtacaaatttttcattttgaaatcctgttgtgatgagcgatggtattgtagctataactcactcgatttaactcaaaatcaaacaatttaagatattttataaagttggaagaaaaatctaaaaaatttattcacaatgtttttccagcaagtgaaggaagaatagtcaaaaagctcccaacttgatttttgatataaaatgaagcatattaagcatatcccaaaattaaaaacttccactcattatattgtacaaccccaaacatgataaatccagtattcacattttttaacatgattcttctcatttgaatccatattagttactaacataatcaactaaaattaatctcaaagacacatcataaaatatacctaaaactagcctaaatgttaatacatggtgaattaaattaacaaataatttgtattaaataacctacaaattaagaactcctactaaaggtgtgatatatttaagagaccatttaaccaatcaactaagaacaaataatttttaaaatattaaatttggtctgaccacactacaactagatacctttatgtgttgtatagaaatgtcaaaatcatgtgctcaactaaacaacgaaatgaccaaagcaaaagattataacttataattgtaactcaaaaacaccacaaagcctaaataacttggtcttcaacttaaacatttaggattatcaaaacaaactctaccccaattaaattaaatttaaacaaaaaagagaaacaaaaagcacccctcctttgaataggtgagaattgagaacaggtttggtctcacttgaagcacttggcatccaaaagagcctctccctcgaagggctcttcatcttcaatcatcttattaacgagctccttctggacttcatcgttaatgtcaaccttcttccagtcatagagctccatgtcgtagcactcgtcgattatgaattgaggaacttcttggccacggaagagccacagtcccttcaccttgaatggtggttctgatccgatgataagcatctttccaaaggcatacttgcgggcaagatccatcctctgaaggaatcctcccaccttgttcaaggtcacaaacgaaacagtgttctcatcattgtatttgtattcacagaaccaaagagagtatccctcggggtcatacatgtcccagaatcctgaaattaattaaagacaaaaaatggatcatcattcaaactcaaccgaaacacaaaatgtatgaccaaattgttttccaggaaggggcatactaggctcacaaagattaaatacctttgattgcaacctctctgaagttagttttagtgttagagtagagcctcttccagtcgtccaacaccatcttgcttggtggcagcagatcaagaggattcttgggtttgggctttggtgctgcctcttcctcaactgctgcagcagcgggctttggtgcctctttcttgggctcagccttgggtttggcttcctttgctggagcgggcttctttgcagcagcagcagattgaactggtgggacagaatcagtttgcttgatctcaccaaatatcttcttaaagtttggctgattaaccatggtccagaagtacctctcaacatgagggaactctgaagtgaagctcttagtcatgagcttggtgaacccataaagcaaattgcatgtggtaatgatgtcagcaagggttacagaatgcccaaccaagtatgtgttagaagcaaggtgtgtgttcaatgcacccaatcctctcttcaaagctgcaattgcagcttcctcaacctagattagtacgaaaaacatattcatattcataccatcagatataggcgaggaaaataattaaaggagctaaactatcaataactaaattgcaactcaccggaggaaggtatgtggcccaacccattcttagtttaaaccaagtcaaaaggttagcatcaatctccagagtagagaaatcaatccactgctcaatgtgggcctgagatgaaaataataataataacatgaattaattataacaatctttttattttcatgtacctgaatcaaaactgcataaaaaaataggcaccgaagtaagaaggaagagcaaatggaaagagaattttacataatcaatcaaagaagagccataaagagcattgtctgccttggagcgtgcaactgcataaaaaataagcacccgttaagaatttcacctatgcaaactccaaaggaaaatgatagaggaaaaagatttgcatgcaggcataccataacgtgcgatggcgttgctctcaaagacagggccatctggggtttcgagaacaggaacctgaaaagagaagggtctttaacataagtctgactgaaacatacataattgtaatcgtgctaaatatctcaggcgactatgttacctttccaatagggttcatcttgataaattcatgagttttgttggtgacacccatctcaaagtcagcagctaactcaactttaacaccagtatactcagcaacaatgagtgccttgtaagcattcttgttaaagctccatgaatgcaagacctggacaaaacgtggattgttcaattcagcgaaccaaaaacacgtatctaaaaacctaatcaactcaaaagaatctcttgatcgatcggaaaaataatacagtaacgaacttatacctagaagacgatcctagatctaaaaaataagtaatatatcaaaattaagttaaataaagcaatcttaagcaaaaagtaataatgattgaataaaagaaaaatcagatacgtaccagagccatagctacacggaaaaacggatcgctaggatttcagatctgagcagataaaaaaacaaggaacagcaaagaagtaataatcaatacataagaataaaattgattgataataaagaaaaacaagtatagagattgaaaatggaagaggaaatggagatgaagagacctgaatgagcaagtgtgcgagcgttcttccgagagcagagaaagaatagtgtgaggatggtgttagggtttttgtaggagagaaagctcgatcatccttttaaatattcgcttggaccgggtctcggtgctccaacgcctcaggcccaatatcataattcatgggccttcattttcatccaagcccaacactacttggcacgtcgtttgcaatatataggagacataaacgacatgtcgtttaaaggagggcagagagagtaaaagagaggggctatattcaaaaatatgggaaaaattattaaagttatgataaatatggcataaaaagtaaataccactaaatatggcattatctaaccaatca

SEQ ID NO: 17351 - DNA, 2619 bp, Cannabis sativa
  modified_base (998)..(1004): a, c, t, g, unknown or other
  modified_base (1030)..(1031): a, c, t, g, unknown or other
gcgtataattaagttaatttatatgattgggttagggcataaataatctgttcagttttgacaaatttttcctctgaaattgaaaacgtgtggtgtggatttatattctaatttggtggagatctttcattgaaagttaaataaaaaagggaagaagaaagggggactcaaaagtcaaattaaagacaactcaacacacaatatatattgacactattcactgtttggggaaaatggagaatggagatgctttgtttgctttgctttttgactaggaactagtctcaatgtgggtctcccaaatctgttttacttggtttctaattgtttctcatttattgattattaaaaacctctagtaattggctctttctcttaatttatatatatttctttaacgttaataaaaaaattcaatcaaactataaaataaattagaaaaaccaaaatacacaaggtttgtttatagggaatgaatgaatgattagcataagaaatggtggcagtgggtggtgtggcatctcgcatgcgagatgtgtcattcacatgacatagaattggaaaaaggaccatctcttttattttgttctttggagccctgagaggctgctcattcttcttacttatactaaaatgtagtgagtaataaaagtagtaatgttttaaccaatgagttttggtaatttttttttttgctgctggaactaaaagttccaatgaattttagtaattagattaatattggtgattgaaatctatttaaaaaatagtagtagtagcaatgtaggagtaagtaacactaatagatagtgtttttgtttagaggaagagtaagcactagtagtggtgtttagtaacttgtaaataaataaagagagtttattatttatttttacattaaggtggggtttggttggaggaatgaaaaaatagaaatatgaataggaataggaataggaatgagaattggaataggaataggaatggaatagaataannnnnnnaatgcataaaaaaattaataaaaaannttattaaattttttcaaattttgcattggaataatctttccttctacttcaaaatggaataatcattccaccaaaatgatggaaaagtcattccatcggaatggtattctaatagttttaaatgcaaccaaacaaaagaatggaatgaaaattgttttctttccattccattctattttgttacctccaatcaaacgccacttaaaggtggaaggatttttattgtctatttaaagagtaagagtatgcataatattaacattgcgattaacatagagagatgcccttaaagctaaacaataagatattaatattgaaacacctaaaatttcttgtaaataaatttataacacaaaaccatctaataaaaaacaaattatgaataaaataattgtttaaataagttctcaagttacaaggttgaaggaacctggtgcaatagtttttgttgttttgtcttctgaatagtaaataaaactgaatatagttgttgttaatgttcattgtgatgctacaatctttttaatttaattttatttttaatattttgtcaaactgattatttgactcgtttttctaatactatcctagtcgtgtctccaataacgagatgtgtcgattcaattacagaatattattttagctattgataaaactatatgatttatttaaaaaaaattgattcatctttcaaaaaataaaatataaatttaatttgaaaaattttaaaaatatttttactattctaattaaaaaaataaacaaaatttaaataagtgttaccaaatacactaataatctttttttagataataaatttcttaaaaaatataatattattatgttattaacttttcaaatttaaatttaaaaaaaattacgatttttcacacaatcaccaaacaaaaatttaacaatttaaattatttaattatgaaaaataaatatttgccttgaaaataataaaataaatatttgaacaaaaagagcatgataacattaacaaattacaatctcatattcatataaaagaaaagtatatacatctttttttgtagccatatatatttagtttcacatgaataaataaataatgcatagcttttcaaataaaataaataataaatagtggagcaaattacaattcccacttgttggatcctatctatctttcattgagtggcaaccaattttaaatttatttttaatttcagataaaaaaaaaagatattttatattaattttaaatttcagaaaatcccaaaagaaaaggagggtaaaaatgccaattccgttattttcatatgattattttttggttttaagaaatattattaaataataataataataataataaaggataggaaatataaatagagagtagggagagggcaaataggggagaaggaatagaagaggctttaatttctcttcatctgttttgttttgtccttctccctaatctaaatctaatcttataaaatcgactctcattacgattctggttttgctttccatatacaaactctccttttctctttcttctcagtttttcccatctttattcttctctctctctctctct

SEQ ID NO: 17352 - DNA, 4923 bp, Cannabis sativa
  modified_base (28)..(31): a, c, t, g, unknown or other
  modified_base (66)..(69): a, c, t, g, unknown or other
  modified_base (101)..(104): a, c, t, g, unknown or other
gtattatttttacattttttttaagaannnnttatttttacattttttttaagaagcatataaaannnntttttttaagaagtatataaaaacaatttatnnnnttttttaagtatataatgtcaaatttcccttttttttattctaaaaattatgttaagcaaaaatttcacatttaacatattaaaataaatgtaaaacataatttcacctatgctgaatttatagcattagagattattctaataatcttagatgagtcgaacttaaattaataaactcttatgctataaattcagtgttttacatttattttaatatgttaaatgtgaaatttttgcttaacaataattatacaaaatattattttttttgttgtttcaaaacaatattattgtaacccataaaaaactgtaaaaaaaaataataagtgttaatcaaaagaaacataagaaggtttgaagacaaatttgtgaaagattaaagaaggtaaaatgtagatgaacaagcagcgatgttgttaatttcagttacaaggaataaataggtggacgaaaggattgacgaagtagcagttccaaattccaaacagaataatagcaaaatgtttggagttgaagccaattgcaggctcatatgggttcgatctcccattatttccagacccaaaatttgtttactgaaaacgaaatccattccctacttacggttggatttggatttgggtaaaacccactattcctctgccttctcatccccatatgctttgcattccactcttcccaaaaacaatgcatctcagacccatttcatcattagtgcttcatcatcttcaggtgaattgaattgagctctcacgttttcctttctacttctgtctttgtttcctatacattgtttactctagttacgcatggttaatttctggacttgctttacatttcttatgttttgcctgaatacactgaccatgttgaagttgaagtcattcactgattccataagtgtcaattggacatttgggttttagttttaggagttaagttgcaatttttatgatagagaagtaaatgatccatgattttacaagttctacgcatagtttctcgttttctttttcttctctgagaaaatttccaattattatggaattgtatggacgggatactttgttgaattgcgaggaaaattaacaatgaaacttttggtagactagtgaaaaagcaagggcttcctaagatttgttatctagttggtagtggataattaaggagagctgaatttgttcctatagtgggacacttacaggggaaagaatactgtatcacaaaagtattaacatgttttatgatttaaacctttccatgtctgcagttggaagtgtagaatacactgaggagccttctaccaaagtaaaatttcagaaaactttgaattttccaggttgctcaagttctttgtcattgcttggaacaggttagtttctataataaatcgcattgcattctgttaatgattttttataaattgagatccagggtcaatgtagtttagtagtgtttctatttattgtgaaaggaattgaatgtcttgttagtaaggtgcagttgcttcacttattttgtttatcaagaacaccatacagtaatgtctttatatgttgcaatatattttacttaaagcgattgatgtcactttcatacaactaagacagtttcaatgtttcatattcctatactgagattgttacattccaatttttctaatgttgtttctccttttttcctttttgaagactctgtggcattatagctaatgtgactacaatttcaggagtcagggaaaaggtttttgcaattgttggcgttaaagtctatgctgccggcctttatataaaccctgacgttcttagtgaactaggttcgtggaaaggacgttcagttgctgaacttcaagaggattcgtctttgttcagctcaattttccaaggtaataaggaaatgaaaatgtgtacgatggagagaggaatagagcgatggtaattgttgagatatatttttattgatccagctcatttgaagagagagagagaaggattagaagacatttgaaacatattttttttttgaatgcagctcctttggaaaaatcattacagattgttcttgttagagacatagatggtaaaacattctgggatgccttggatggtgccatttctccaagaatcaaatcaccaactcctgctgatgaatctgcgcagctcacatttcgtagtatcttccaaggacgacctcttaaaaaaggaacttgcatttatttgagttggctaaacccgtccaaaatgatcgtaagtctgtttctagcagtcacatgattaatgatttttctcttcaattatctaccagaatatgcacttaatgattttcatttctttttgtcattttctattttgtttcctttttgcaattttgaccttctgttttgttacaaaggaaatatatttaccatggactaaacacttacctcatctgcattctcatcttattatgttatttgtgattttcaggtttctgtttcaacaggtgggcttccatctagtgtggatgctacagttgaatcaggaaatgtaagttcttctctctttgatgtattctttggagatgttccagtttctccttccttgaaagcttcggtcaccaacgggatcgcgacaatcctcaagtagtttctgtcagtaaagttcttaaaaataattatgtgtccggcaaatttcacttcattcaatatgtgtgtgtatgatcaccactccagtcttcattctctttttttgtgtctatgaatgtaccttggacttgacctaggatatgtagcatactttcaatgataatccttgaaaattaaaacagaaacgggtaaaacctcagtactacagtttctaacagacttgcgttataagatctcttatctatcaacttccaacttaaccttgtttataggaaatttaatctgtcttttgacatgagtggtgattaggtgaatgctaacttctttgccagctactataccattccccaggaagattagaatgcatcctatgaaagcaatatccatggccattatatagatgcaatctaagctctattatctatgccttaatctgggagggtgtagagattcgtttcagagaccctgccatggagtaattttagttactatgcacttttttaataacaaattgtgaaatcagttgagtttacacattttttaataactctctcgcacttgcagttctcaaatttgtgacaatcatgcaactttcttgtatgattttgtctagattactaaacctataaattttgttacccttttggcaagaattcagtaatagtgattacatttatttatttatttatttatttttggtggggtttaaagattggttttgctgatgtgattgaagaaaataaaattcaatagatggcaaaaatattaaatcaataaatataacaacaagtatattataactctgcttttttaacttgttcaagcatcttgacaatgtcagccatggaaggcctcttatatggttctggctcaaggcacattaatgcaatattgaatgtactgttgatctcctcaactgggaaatcgtctaggtttctgtcaagtacaagctcttcccttttctcctgaacaactgtcttcacctgattccaacaaataacaggttaagtttaacacaacaattaggaagaataatctctcttataaccactcgatgatatctacaactgagatgaaatatagcagttctcacccatgttacaagcttggttccttcctcaataaacgcttcatctgttggcctctttccagttaagagctctaataaaacgacaccgaagctgtaaacatcccctttcgctgttgctcttcctgtgtcaaaatattctgcacaccaaaccaacaaacagttaagcttatcatacatgtacttggcaaaaaagaaaatggaattagtgactcaagagaagttcacattgtttttataccaggagctaaatatccaaatgttccagctacaaatgttgaaacatgagtcttatccggttccatcagcgtggctagtccgaaatctgaaactcgagcctccatgttttgatccagtaaaatgttgctagatttgatgtctctatggattatatgagggatgcaatcatggtggaggtaagcaattcctcttgcagcacctagtgctattttgtatctggatggccaatccaaactcttcttgttcatagctttccctgcattacattacaggctctaataagcttaactcttgggatcatcacttatctaacaatgtataccagagcagattattatctttagttaaaatctacgcaacttaacttgaattacaagtaaaactatgagaagaaaagaagtggtatagcatggtttggcttgaatcttcaatgtatctttttttttttgttttgagagagagagagatactgcataccatgtagaaatgaatccaagcttccattaggcattagttcataaataagaagattgtaatgagaagctgtgcagtatccatggagattgacaatattcctatgcttaatgtctcccattgcttccaattctctctcaaaacctctatctctttcgtcgtttgctcctttgttgagtcttttcacagcataggctgtggactcatctatcatcactttataaactgtcccatagcctccacgtccaattatgtccttgttgctaagtctaagtgttttcttaaacaatgcatttgatttttgagactcctttgttgaagacctaaacataacaattttcccacctaaaaaaacaagcctttcataaccacatcaagcttattatacataatat

SEQ ID NO: 17353 - DNA, 3417 bp, Cannabis sativa
ataaattaagaaatttgtatgaaatagagtccacatgcaagactatttagatctgatataaatgaaaaaaaaatatatcaacttttgacttaaaagaaaatactactgaagattaatcttaaaaaaaataatagaatttgataagtatttacaggcagatgaaactggagcaagcaagtagaagaatctagtagtagaacaatagagtagcaaaagaaacaatgtaagagaaaagagagaatgtaatttgaaagaaaaaaatacttataggaaaaaaatattgaagcaaataataaaagacagatgttaactaagtgatgataatttgctaaagatgtcaattaagtaaatatttagaataacaaatgacaaccaaatgtcaaataaatgataatttacacagataaatcactacttagatatatatgtagtagaaaataagatatataatataatttaaaaagtatttagtaatcatataaattagtgattatggaaaaactgatacaaataatactcctctttgcagcatcacttctagctccactcttttaagttaaaagaaactattgtatattataccaatcataggcagccaaacaaggttagcatcgaaaaagcacatggaggtttacctccattgtggcacctctctttgtaaatagcatctgagtaacatgatttcagttttccttttgtctgaaaaagtcataactcatcggttaagatcacaactggacagttaggatttattaaagaccaatccatttctcaccttctggtgtgaaaggaagaaaacactggtttggaatacggtacttgtcagaatctgatggaaaaactccagtccattttatctctgggaccctcaaattttttgaatcgtatgccatttgcttaaataacagaagagtgagtttagattggatgagaaaactaagaattatgtacaagcaagcaaggaaaatagatcattcagtgtcaattttgcttgattaaaggtattatcaaaagaaaaataatgtgagaagagaaattgtacctttgttgaggccaaaccactcatttttagttgctcctccttctttagttgatgtattgcagcaactactattcataatttccatacaacaatatgaataacatataaatacacatacacagcaattaaaaaagaaaaatgaaaatcattaacaataaaagtgggtatttagtaattagtataattcattactttactacccatgtttactttattttactacccatgtgagcaaatcgaaaaagtattcaaagaccaaaaataaaaagtccatatgcatctattaaaacatacttgagaaaaaagtaattataaatcaatcaatctataccatttatataaagttcaaaattataaaggtgatgaaagaggaccaagaagatcaagagctgataggcaacagataatgggcataataaaaggctgctcagtttcctttgggattgaacccttaaattctaaatggaaacaaaattaaacagagtaagatccactacaactctcaaatgtataattttaaaaaaatcagacccttttcatcaaaaccctcaaaatctaattggaattgaaatatatagaaacaaaataaagaagaaatacctagagttttgagttttttcacaacgattgaacttgaggaaaagagaaagtgtagatgtgttattatcaatttagggttttataaaagggaacctaatatatttagtgggataaaactaaataagtgaggtgactaaaggcccatacttgttggttcaatattatttctttgctaagttagcgattttttttttttaataatatgaggtggcagaattttgaattgtttacccttgaaccattgaattttgtgtattttacttttaatcccaagatgatgtgtagaaaatatataataagttgataaaacaaattttaaaaaattaaaatacctcaatatgaacaggttggaattggtaggtgggtagatctttgatttgaagcttatatatgtagttgtgtttatccctcaaatattagtcctcgtaaatgattaggttaaaaattaaagatataatatttttatttataacattaatataaatttaaaataacatttaaaaatacctgattatgatccacaaatgttagtatttcattgtaaacaatattttttgtacgatcacaagaatcaatgttttcggaagatgtctccaaaagaatctttatagcattagtctttctaactctagataatgcaatatacaattgtccgtgtgaaaatactggttctagaagatataatccaataaaatctattgtttgagcttgagctttgtttattgtcattgcaaaacaaggacgaattgggaactgcgctcgtttgaaagcaaatggattgttattgctttttaagggtacaaactgtatgcgtggtaagaaaattcttttgccacaatattctccaatagcaatctcagcacaaataatatttcgttcaaagtggcgacaaattaatcttattccattacataatcgttcagcagagtttatatttcgtagcaatatcacaagacaattcagttttaacactaattcatgaggtggaaatccatttgggatcaaattgttgaaaaaatcttcttcaaatgtgttttcagtcttatccatgggctcatcaaaactataatacacgttagcatcaccgggaaatcggtctatcatcatattatttatttgatcaacataaataatttttggagttaaaataacacggttgaccattttatgaacatctttaaagtaaagattaacatcaggaaaaacaacatttaacaattttgttaatgatatatcatggtcttcaaaaggtagcataatctcacttgggagttgaaccctatcaaatgaattagttttctcatcgccatttccaatgcgtaacaaatattttgagaaaactagatccaacattgctctcatattttgaaccaacttgatttttataaatgattgtcataaataagaatggagaagacttgctttaattacatcctccttccttccctttggtacaactggtaaaacttgacgaaagtcgcctccaagaacaactacttttcctccgaatggtaaattcgagtcattaatgtcttgtaacattttatccaaagatcaattgcatgtcggtgcaccattggagcttcatcccatattattaactttgttaattgtaaaagcgaagatagagcagattgcttacttacattacaagttgtaccctcatcaaatacaagagggatcttaaatctagaatgtgctgtttggccacctggtaatataccagctgcaaccctagatgatgctgttgaaagaccaacaaaatttttagatct

SEQ ID NO: 17354 - DNA, 3031 bp, Cannabis sativa
  modified_base (688)..(695): a, c, t, g, unknown or other
  modified_base (2407)..(2413): a, c, t, g, unknown or other
caagattacaacttacagattgttgagcagcttcttgacagccacaggagtcccgttaatcaaattaccgcgataaacaacaccatagccaccctcaccaatgacattttcagttgaaaaccaacctgttgcaacttctaagtccctcagtgtaaaccaatgaccccaaccaaggtgagaaaactcaggcaaaccagagagtggtgaaggagcactaacaggatttggtgaaggtttgtgaacagaaaccatcctgataccaccttgttcacaagattgagagcccataataacttccttctctatgtttgtaaatgagccagattggctactattgtctcccatctttgaatggatcaaaactttctccaactccttatcactaaatttatcatcaaaagtggcattgtgatggatgtttgcaccaacttgatcaactctaatctctttgatttccctagagagattaggaatttgggtaaagggaattgagctcttggcccttcttgatctttttcttgaagaaagacagaatgatagcactacaagaatcagaattatgaacaacccaacaataatggcagttagttcccaaacccttaagcccaaaacagaagttttccgggataatccttgattgagacctgatgccattttctgggtgccaaaagttctttgctgcataatnnnnnnnnaaaaaaaaaaaaaaaacttcacaactaagaaaattaatagtatattattcatactaaacaattaaacatagcagaaactccagctatgcaaaaacaaaaagatgagatttgagcataaaaacagatcattcaatgcattcccagagcaattaaagtttttgagccaatacccaactgcctcaacaagattaaaaatcacatttttaacacagaagaaaaaaagttagaagtacctggagagaagggtatttctcagaaacaaaaaaagaagatgagatgaagccctagatctcttgtaaagttgaaatctttttccatgattattagagaaaataaggaaatggggtatgagagagagaagtgggaggtggggttgttatgtttaataacaaagaaagtagaaagtccaagcaatggcaatagcactggcaaatgacaatggcagtggcagcatggagaatagagaatagagattaagagcttagagagatgatgatgatgatggtgggggtggagttatcagtggtaggtagttgatgatggatgggggcactttcatttcattcatatacatataatacactttgattagattacaatttacagtaaaacaaaagcaataccaaagtctatatttttataaatatataaatttaaaaatggaacctttgtctttctttgctttgctgtttcttcaattctctttcttttcctctaatagtataatagcatcttctaatctaatctttgaagctgatgggttatctgaatttttaatcaaaaatcaattttttttcacatttactacatgcatacacagttaatgaagttaattaccaaataccaatcatttataatccctttaattgcttccccttagctttaaattacatccttttttgctagtcaaactttacatttttgactagaatcttattacaatcaataattaaataaaaaaaagtaatgttaagagcaaataactacaattaagggaaaatccatatacatataaaaaattcaaattagaatgatttagttaaataattaaataatttaggttgatttgatatggtgattaatatgtccaaatttagtatgttgtaatagtcaaaaagaaatagactagacaccatacttgatagaagagtccatacctaaaatgatggtatgaatgaactatgaataagcaaccacacttttgttattcagatcaaattgaatgtgagtgaagtagaaaacaaaccaacaaaataaataagtaaagtttattattatgtgctcttttctttttttccaaaaaagaaaaaatggtaaaattgcttattcatacctttgctaataaagtgggagattattagtaaaatggtatccaatgatgaaacttgtgttgtgttgtgttgtactttgaaaaaaagattaaaaatcaattaaccaaagctaaacaaagcaaaagggtttattagttatattattctaacttatataagaatggtttgaaatcgtcggcaagaagcaaaaaccaaggtcaactgattttattataatatggaaatagaaaaatagattcctcaaatcattatttctctacaccaataccaataccaatacccttctggaagggacctccatgtcctatgtttttgggggcaaacgtgcaataatgtatagaataagtttagagggatcatatacatatacatatacatatnnnnnnntatatatttttatatatgtatgtttgggcaatgtcaaaaatctcctactttgtctcctaatacacaaaaacatgttacatgtgatatgattaattaaatataacaaagctaagctatgctaaggtaagctatgtagtttggttttggttgaaaaagaatctaattttggtcaaaaaggaaaattcttggaaattagctaaagccaattggcaatggtgatgagtttatgtttatgtttatgttcatagaatagaatgttttgggtttgagacatgtgaatgattagtgtctcaattcacatcaatactaataataaataagtatatttatgtgtgtatatgtatataaatataaatatgttatttctttagtggttgttgaaacaccactatcttttcaacatatatggtaggtgggtagtagcatcaaagattgtctacctctaaactttttttaacatattaattgtaattaaatactatctttatacatttatattgtataatagtgcttttctttcagattttgtacctaattatccttttgagggattctttatgtctaactctaaactcatcaaagatcttttttggttaacacacatcaattacttgaaaa

SEQ ID NO: 17355 - DNA, 3190 bp, Cannabis sativa
  modified_base (3140)..(3165): a, c, t, g, unknown or other
ccgagttttctgtagcgattggtagaattactggccgcgccatactcatcggaaagagcccgatattacacggttgaggtgggtgagacagtactggtagtgatgatggtgattcctgaaggattgtcagatcttccattgatgatgatggattcatgaactgcaaattaaaaataataaatcggtaaataatgaaatttgaaacaaaaataacgaatcaaagattatgcatatcatatttaaatttatatatatacatacagtatcagttgtaatatcaaagagactagatctcctgcgtcggcgattatggttgttacggcggagaaagtacttttgggcatgactagccacctgagttggcgtacgagtcttaacgaagttacgggagattcctctccaatctccttttcctaccttctgtaatcccaacaagaaaagcttgtgttcctcttccgtccatggagtacctatttcatttttggaaaagaaaaatgaattccataacaatacatcatttgagaagaattaaatactattattatattgaaatacctctctttcgctcgcgactgcggccagaggcatgaacgatgtcgtctgaagcgtaaccggcttcggcgttagagtcgtgatgaagaggaggctggtcgaactgagacagattcgtcatactagcgcttttcctgaaggagcttccggtggcttcagtgactctcacaccgaatagcataatcccgttctcgccgggggcggcagatgtgcctccttcgccgccgcagagctccgtgcacgtgcgagcgttgtggccattgttcccgcactgcgagcacgtgcgagacatctctacttaatcctaccaaagtcgccaaaaggggttatacgagggtgtagggacttaggagaaaggatttgtgatgttgagaaagataatagaaagggagaaatgagggctgcttccttgatttataatatgggagagtcgttcttagggttttgtttttgtgtgaatgcttttttttattaaatacaaacaaacaaagacttaacaatcggacaataataataacaaaataataataataataataagggaattaattatttaatgtgtcgcaggggcatcacatgaatttaaatactaccgacaaactaaactcttaatcaggaccgttgaaatcttatcagatgtcgtcgataaaaccaaggctgggtcgtatcgtaatatcctgtgatcttaagttttcatggatgagatttatctatgtggtcagaaagagtactatgataaactataatacaactatctcatccgatagaaagaggactgtattttatattattattggaccgtattttctgtcattattattattattattttgatggaaattctatgattattattatgctaatgttattaattaaaatttttaatataaacatggacggtatattctagtatttttttacaatgctcaaatggtttggttggtgcaaattaaatttagataaacaaacataaaaaattataactagaatgtctaaaatactagtgtcactcttctatcttttaagtattattggtgggaaatgtctgaatataaatagtaaagaaaattaatgcaagagaaacaaaatagttatacataatataattaaaaaaaaaatgaagtagaaaaaaaggaatggtggaggatcaaaagcttgtctccaccgtcaactaggcatattcgatggctctttgagaaagatttggttgtcgtatatgggcatggctcatgaggtggtcttcttcataaatcccaagaaagccaaagccaaagccaaagccaatgtggtgggtggagttgaaatgtggtgtgggtggggataagcagtgaagtgatccatatggtcccacctatcacctatgctccattgctcctttcccttttatctctcaacctttctttgtggctgcgctagtgctagtggatggatagatgcccttttatttgcttttctttcttacttttctatacttcctacatgccccatcgacctttttcactcctttatctttatcttttcctgttcttttcttttcttttcttacttaggttatattattatatggtagaatagagggggagtagtatggatgaagaatttagaaacaatagagagtataggaatggagaggaaagttgttctccttgtgttgcttggtattaagaataaagttgaaaggataaaataaaataaatattgaattattattttattatttttgatacaattttataatttttttttaaaggtaaaaaagaaattttatatgatttttttttttttttgaatttctctatttttagagggattgaaaattgtgtatttggagagagaaatcatccctttatctcttttactaagaaacaaagcgcgcttcgcgtgcggttgtattttatttagttataaatatcgaatttcaaattttcatattttatgtataattttctaataatataaactttcacttttttttttatcagataaataaataaatattgtaaaaaaaatcaagcatacaatttcttatctaataaagaaagcaaaaaaaagatatctttgtcatcatcgtatctcatcacttatagtcatcattatattcaaaattattattatcattaatcctgtatctcacttgtagtcactactacattcaaagtcattgttgtcattaccgtattttacttgtagtcactgttgtattcaaaacatttgtcatcatcgtattttacttgtagtcactattatattcaaagcatatgttattattgtatctcctttatgcatccaagctaatcaaatgtaaataattatataagttcactttcaaataatgcgtatttaaaaaattagagtatctttataaatttacactctaaattttatagacttgcataaatctttccatgaaagttagacttaataaataaatgcaaaaaaaaaaatgataagaagacaacaaagaataacctcatcaaaccgctcaaaccgctcacaccacaccgcacccaaaaaaatatgcggtttgaaattctttgcggtgtggtgcagtcgcggttgaaattttctaagagtggattcaacgaagnnnnnnnnnnnnnnnnnnnnnnnnnnaaatttggttcacttattggaagct

SEQ ID NO: 17356 - DNA, 4056 bp, Cannabis sativa
  modified_base (3865)..(3872): a, c, t, g, unknown or other
ggtaggcgaaaatcaaggttattccatggcaacacctcaccttgcgggggccttagaaatctttcccgaaagtgaatctactggtgagagaggtcttcttgtacataacaggagcagcgaaagggggaaaattccttcaccagtgtaggtccgtcctgagtccgtatgggagatggaccaaaaagctaattgcttttgatcttatgggatgttgcaagcgtattctgaagttgctacctccataacgctcctgtattgatgtggcacaggcttttcgtccttggggagtctgcatctgccagtgttgatgggtttagtgcatggagttggtcccatagttacagtggcgctcacctccctttgagaacttacttcgcgagcctaattgtgaaaattaggattgcgccctttcagatgattccttcatcatacagactcttggtcgggtggtatgtgttttgcaaaattaataaactggaggttccttccccagaggagatcctttacttttactgtgtcaaggccaatcccatgaggatagataggtcaaagctggggttcttccaactagataagcacccagactcctactgttctgttttgtcaaatggatcgcacccatgacctccaagaatattagttcttttcctttgggtttctaccagtagggtaccatcgattcagttgaacttcctactcccaggtattctagcagttcatttagagttttttttttcaaacattgtcaatttctgtgtatgggctaacatttttgacctgcagctgaacttccccttcagagtatttgaactaaggagatagtcaggaaagagggtcagtaaaggtccttctcagaagagcaattgaaggttgagggcttggtgacaactgaacttctttgtaggtctagcttgatcaccaagttccaaagcattgaccctgtcaatcttcgggaacaatgtcaacccctaaggaagtgaagcaagcgattgccacgagcttggctattataatgaccattccctacgcttcgaatgggtgtcgcaccatcctaatcctctgtctgaggaagaagaaatcgtagagagatttgctgttgcataccttgacgtgggggcaccaggttccagtacttcgagaagagataatggacccttccgcatcctccgtaccccaagcctgagtcgcatgtccaagaggaattagggaggatttgaaaaatatttcctgggcataaattgccatagatttcacatggaggagtacatagaaagggtagaccaaataattaagagacctagtaacttggggactccttcggacaccgtctgagtttaccctttgatggttatgtccctatcagaatttgaggaatatggtagcttcatgggtgataggagcattttagcttttgctcggggacaatgttatagcactttactgaatggttgcacccacgcataagctacttcactaaattcttttttctgttgttgctattgtttactatgattgtatgtcttgtgaaggttttttttttacccatactgttttcttgttgtgcgtacacatcaaaatccgagatgttgaagtcttggaataaccagattacgactgctatggacgaggccagaaaatcccaagagaaggacaagaaaaagaccaagaccaaggcttcggggactcgcaaaccacctcctccattaacttcctcatcgtcagacgtcaaggagattcctcctcctgccaagactaggcacaccacacctggccattccgcgccggctagtgggggaaaaaggtctggcacctcccagaaagctcatgaggtttttgctgctctgggagaacaatcctcccaagtcatccctcctagaagagagttagtcctggacaccgtactaaatgtgaggggttaaaatgacagcctggacgaactcatcttttccccaaaggggaccctagccaagtcatagtgtaagggatcaaggacttcccccgaccccggcgtgaagagaataaaatctttggtcccaaaatctggggcgactgacgtaccgttgactaagctatctttgtctcaacactggaaacagtaccaacaacagcaacaagagccaccgcaacaaccacaccaaccccaacagcagcaataattacaacaatatcaacaaccacgataactataacaactccaacacctagaacaacaacatctgccacaatcaccgtctaagcgagtatccctaccgcaacagcagtagtctctatctccccatcacttgcagatagtggcatgtcagtctacctctcctccaccttagtccgtcgcaaaaggtaaggatcattcattgggattttcctttcccatgatgccgccattctaaggaagatccatgagcgggaatttgccagcctccgcctctaggccctgtattagatctgtctgtcgtgagtcataatttggtacctacggtgggtagagagatcgcccttacgctgtgaaatgatagacagtataggctgcagtgtgagcgagcttactttgaagaagtgggcgataagcaacagtgctaatttatacactctgtccatatccacaaggcagcaagcggtaggggtaagtcttaaccctctaatttattctcagttgccatacaaatctttttacccttttataggcctagtattttattagtaatttatccctatcttttattctttagatggtactgttcctagagaggaccaccaaaaaattagggaatgtgaccatagagctaaaccaactttgtggcaaggttctgtccttgactgccaaaaatgaggctttacgtgcccgtattgagcaggctgaaacctaggtagcctccagcaactagaggactcaggaggattggaaggctaagctggcagccgaggaagagaaacaggatgccaaatacctaaagaagtatttagatcacaaggcccaaattgagcgggagattgcaaagtcagtacaagaagccaagaaggaggtacgctcccttcgaatggacttgactaataccacaaaagagaaggatgtagctgaggcacgcatggtggctaagtctgagaccatcactgaccaaatccaacagctcaacaacctgcaagaggacatgcgccagaatagcttacgcattaagaatctcgaagatgaagttgaaaaagagaagcaacgagcagattcttgggcaaaaaaatatgatatccagacccttcttctccaaggagcccgtctgtaacgtcctgactctcagggatgccacatgtgtgcttttgtaattttattattattaatctattagtttaggaaaaagtgtggtttgattaaaacttttattcaaaatactgtcttaatatggggatcccctgctaataaaattattttaaaactaattacaaaaccgttataacaaaattaggttacatttccaatcatagaaaagggattgatcctacttcacggaagccaagacaccacggctgatatgtacattactgagtgatctctgactcatggtcgaacacaattgttattcttcatacctacaccatgaagcacttgtgcgtcacaatgactcagcaagaaaagctactagacaaaaagcatggaaagtgctagcattctcattacaagataatatacatattgttatcccaatttttgcactctatcgtggcatcacacaatggtgacacgtggattcaactctgggtacctgctcgcaagaaatatgccaaataggacaccacgcacatttgttcggaggaattcttcttagccgggcagtaacatgccaacacttagccaatttagctttcgcatcgtgagtcnnnnnnnnaatccctataactttgggatcagattaacagagatatggcaagctctccaaatcccacgattagtgtattctgtatttactatgcaatctttctacgtatatcaattgtaaccagaagagcaaaacttcccctccaagcttataaccctataattagtgatctatactcactgggcaaaaagtc

SEQ ID NO: 17357 - DNA, 9305 bp, Cannabis sativa
gatcctcaggcccctgccaccattaatgcaaatcgagctcctctggcacctgccactgctgctgttcatggatcttggaatcctttctccaactctctctcatcgtctcttacagtcaaacttgatcgtgtcaatttcctctcttggaagtctcaggttattcccacggtgattggacaagatcttgatgagatcttgttcactggtgttcctccccctgctactctgctcaacggcacctccaatccagaatttcttcaatggcgacgcaaggatcagcttcttctctcctggttgcgatcttccatgtctgaaactgttcttgcctctgtcgccaattacgatagctcttacgcggtctggtgcgcactcgaacaaaaatttgcttctcaaacaagagctagacgtctccaactgaagggacaattctcccatcttcacaaaggaaattcatccatttctgaattcattgacaaggttcaaagtattgctaattctctggccatagcagggtctcctgtagacgatcaagatttgattcttcaagtcctaaatggcctcagacccgaatttgactcagttgtttctggcatcacctcaagaagcgatgccttgtctattgaagaggttcaggccttactgctgtcccacgaaagtcgccttgaacatcatctggccatgaacgatatcaatgtcaaattgcaagcacacttagctcttggcacaaatagatcaggaagtgttcgatcttttgtcaatcctacttcaacaaactcttctgctccctctacaggccgtggtcgcggatacacaagatttccatctcagagggttgtttgtcaagtgtgcatgaagataggacacactgctgctgtgtgtcactatcggttcgacaagaactggaccacacctaaggcaggtaacaactctaatcgtgcctatctcactgaaattgatcttgattgtgatccacaggcatatcacaccaccatgatccaagattttggagatgatggctcctggtatgttgattctggagccactgcacatgttgctcttgatcccaacaatcttgatgaatccaaaccttttcatggtcttgaggctctagctattggagatggtaagagattatccatctctcacactggttatgtttctattccatcatacaataaagcttgtcctatacatttgcataatgtcttgactgtcccttctattacaaagaaccttgttagtgtgtctaaactcactcacgataatgacatttttgttgaattgcacaaaaactgttgttttcttaaggacaagacaaccgagtctgtgttgctcaaagagaaagctaaagatggactctaccttcttggtgatccctcctctcaatcgagatcaactctgcagtgtcacttggccacttctgagattgactcatctgaatttagttccaataataaatgtacttgtaccaaaatgtgtgatacttcacaccatctctgtaatacaaaatactgtaataaaagtacatttttttccttctactgagcattctgtcttgcatgtgtcaacattatctgatgttaatctgtggcaccacaaattaggccatcctacattgtccactttacaaaaattactgccttctcttccccacagtggcacaataaaacaatttcagttctgtgatgcctgtcaacaaggcaaaaatcacagacttccattctcccattccccaaaaagagccactcagcctctccaactcatccacactgatttgtggggtccctcccatgaaccttccaaagatgggtatagatattacattcacttgttagatgatttcagtcgattcacttggatataccctctaacactaaaatctgaggcatttgacagctttattaagttcaaaagtatggtggaaaaataatttggtttgccaattaagagtgttcaagctgatgttggtggtgagtacaaaccttttgctagatttctagctgaccaaggcattttattttcccacccttgtcctcatactcaccaacagaatggtcgtgctgaaagaaagcatcgacacattactgaaacaggccttaccttacttgcacaggctaacttaggactctcatactggtggcatgccttccaatgtgccacatttaccattaataggttacccacacctgttcttggtaacttaagtccttatgaaggtctgttccacactaaaccagattactctatcttaaaaccctttggctgtgcttgctggcctcatttgagaccctacaattcacacaagatggacttcagatctgagcagtgtttattcttgggatactctccaatacacaaaggctatttgtgtgaaaacaagaatggtagactgtttattgccagaaatgtcatttttaatgaacatttataccctggcaagtctcataacatcaacaaatcagaggtacattctgccacttgtaatcaattttctcctactgcaagtttttttactacaccttgcactaacattgattctactgcctctttcaacactgctactgagacaatggtggcctcccctgttccaatacccgagaatcactcctttgtaccaccaatatctgaaaatccaatacagattttaccaagtatctctgaacatcacatacagcccttaccaactatccctgagcattctcctctcttgaataactccaatatcacctcttctgcagaaccacaagtccctgctctaacagaaaccaacaccaccatagcagacccacctttaccaaacctcactcaaaccaatacctcctccttaccatccactattgtctcagaacacaatgttgctcccaggactcatccaatggttacccgatctcagaatggcattgtcaagcccaaagcatttctggcaacaaagcatcctttacctgagtcattgttgccctatgaaccaaagtctctacaagctgccctcaaagatcctagatagttcagttcaatgcagactgagtatcatgctcttaaaaatgctggcacctggacattagttccacgacaacaaggcatgcacataatcgacaacaagtgggtacacaggatcaagttgaattctgatggttcattggatatatttaaatccagattagttgcaaaagggtacttgcaagccccaggaatcgactatgaggagactttttctcctgttgtaaaaccagtcacggttcgcactgtattatcattggctgtgacttcaaactggcgtgtgacacaactcgatgttagcaatgctttcctcaatggattactaactgagactgtgtttatgcatcaacctcaagggttcattgaccaggataaacccgatcatgtatgccttcttcataaggctctttacagcctcaaacaagctcccaaagcttggaatgatacactgcgtatcagtttacttcagaagggattcaaagcttctaagtcggatacatccctctttgttcatggatcgggttccactctcataatttttcttgtttacgtagatgatatcttggtaacaggccctaatcagctgctcatttctcagttaatcaatgatctcaatgttgaattctctctaaaaaatcttggtgatgttcactactttctcggggttgagatttttcgagattcaaagggtatgttcttgtctcaaaccaagtacataattgatctcttgattaagctgcatatggaaggtgctaagacctgttctaatcccatcagcaacacaacaaagctgtccttgcatgacagtgagttatttgaggatcctactttgtatagaagcacaatcggtgctctacagtatctcacactaacacgcccagatgtagcctttgtcatcaacaaattaagccaatttttgaaggctcctacagtatctccttgggaggtcggcaaatgcttgctgcgatacctcaaaggcaccatttcagatggtttatttctcaaaccagcagccaatatgatcctcgaaagttactcaaacgctgactgggctagctgtgtggatgaccgtaagtctactggtggctatgtaatttacttgggagaaaatctaatcagttggtcagctaagaaacaaaatgtggttgcacgctcaagcaccgaaagtgagtttcgtgcattagcaaacactgtagcagaactcaagtggattgtctcactactcactgaattacaagtctccttgcacacttgtcctgttatttgggtggataatcagagtgcttctacattggcagccaatccggttttccatgcacgatcaaagcacattgaaatcgatttgcactttgttcgtgatcaaattttggcaaaacaactctcggttagatatgttcccagccatgatcaagtggttgatatgctcactaaacctttgtcaaaggatcgctttgtatatctcaagtccaaactaaaaatggcttccaccccttttcgtttgaggggggatgttaacattgtatctagtcatagttagttatctgttactgtgattaggtgttagttagtttgttatttctgttactagttagttgtattgccttgtctgtttgtatttttcatctgtataaatactggtgcataatcaataataaagtgagctctttctttgtattctttagttcttctctgcttttctctcctctacatggtatcagtagtcttgactctagactatgtcttcgtcaaccaccgatcctcaggcccctgccaccattaatgcaaatcgagctcctctggcacctgccactgctgctgttcatggatcttggaatcctttctccaactctctctcatcgtctcttacagtcaaacttgatcgtgtcaatttcctctcttggaagtctcaggttattcccacggtgattggacaagatcttgatgagatcttgttcactggtgttcctccccctgctactctgctcaacggcacctccaatccagaatttcttcaatggcgacgcaaggatcagcttcttctctcctggttgcgatcttccatgtctgaaactgttcttgcctctgtcgccaattacgatagctcttacgcggtctggtgcgcactcgaacaaaaatttgcttctcaaacaagagctagacgtctccaactgaagggacaattctcccatcttcacaaaggaaattcatccatttctgaattcattgacaaggttcaaagtattgctaattctctggccatagcagggtctcctgtagacgatcaagatttgattcttcaagtcctaaatggcctcagacccgaatttgactcagttgtttctggcatcacctcaagaagcgatgccttgtctattgaagaggttcaggccttactgctgtcccacgaaagtcgccttgaacatcatctggccatgaacgatatcaatgtcaaattgcaagcacacttagctcttggcacaaatagatcaggaagtgttcgatcttttgtcaatcctacttcaacaaactcttctgctccctctacaggccgtggtcgcggatacacaagatttccatctcagagggttgtttgtcaagtgtgcatgaagataggacacactgctgctgtgtgtcactatcggttcgacaagaactggaccacacctaaggcaggtaacaactctaatcgtgcctatctcactgaaattgatcttgattgtgatccacaggcatatcacaccaccatgatccaagattttggagatgatggctcctggtatgttgattctggagccactgcacatgttgctcttgatcccaacaatcttgatgaatccaaaccttttcatggtcttgaggctctagctattggagatggtaagagattatccatctctcacactggttatgtttctattccatcatacaataaagcttgtcctatacatttgcataatgtcttgactgtcccttctattacaaagaaccttgttagtgtgtctaaactcactcacgataatgacatttttgttgaattgcacaaaaactgttgttttcttaaggacaagacaaccgagtctgtgttgctcaaagagaaagctaaagatggactctaccttcttggtgatccctcctctcaatcgagatcaactctgcagtgtcacttggccacttctgagattgactcatctgaatttagttccaataataaatgtacttgtaccaaaatgtgtgatacttcacaccatctctgtaatacaaaatactgtaataaaagtacatttttttccttctactgagcattctgtcttgcatgtgtcaacattatctgatgttaatctgtggcaccacaaattaggccatcctacattgtccactttacaaaaattactgccttctcttccccacagtggcacaataaaacaatttcagttctgtgatgcctgtcaacaaggcaaaaatcacagacttccattctcccattccccaaaaagagccactcagcctctccaactcatccacactgatttgtggggtccctcccatgaaccttccaaagatgggtatagatattacattcacttgttagatgatttcagtcgattcacttggatataccctctaacactaaaatctgaggcatttgacagctttattaagttcaaaagtatggtggaaaaataatttggtttgccaattaagagtgttcaagctgatgttggtggtgagtacaaaccttttgctagatttctagctgaccaaggcattttattttcccacccttgtcctcatactcaccaacagaatggtcgtgctgaaagaaagcatcgacacattactgaaacaggccttaccttacttgcacaggctaacttaggactctcatactggtggcatgccttccaatgtgccacatttaccattaataggttacccacacctgttcttggtaacttaagtccttatgaaggtctgttccacactaaaccagattactctatcttaaaaccctttggctgtgcttgctggcctcatttgagaccctacaattcacacaagatggacttcagatctgagcagtgtttattcttgggatactctccaatacacaaaggctatttgtgtgaaaacaagaatggtagactgtttattgccagaaatgtcatttttaatgaacatttataccctggcaagtctcataacatcaacaaatcagaggtacattctgccacttgtaatcaattttctcctactgcaagtttttttactacaccttgcactaacattgattctactgcctctttcaacactgctactgagacaatggtggcctcccctgttccaatacccgagaatcactcctttgtaccaccaatatctgaaaatccaatacagattttaccaagtatctctgaacatcacatacagcccttaccaactatccctgagcattctcctctcttgaataactccaatatcacctcttctgcagaaccacaagtccctgctctaacagaaaccaacaccaccatagcagacccacctttaccaaacctcactcaaaccaatacctcctccttaccatccactattgtctcagaacacaatgttgctcccaggactcatccaatggttacccgatctcagaatggcattgtcaagcccaaagcatttctggcaacaaagcatcctttacctgagtcattgttgccctatgaaccaaagtctctacaagctgccctcaaagatcctagatagttcagttcaatgcagactgagtatcatgctcttaaaaatgctggcacctggacattagttccacgacaacaaggcatgcacataatcgacaacaagtgggtacacaggatcaagttgaattctgatggttcattggatatatttaaatccagattagttgcaaaagggtacttgcaagccccaggaatcgactatgaggagactttttctcctgttgtaaaaccagtcacggttcgcactgtattatcattggctgtgacttcaaactggcgtgtgacacaactcgatgttagcaatgctttcctcaatggattactaactgagactgtgtttatgcatcaacctcaagggttcattgaccaggataaacccgatcatgtatgccttcttcataaggctctttacagcctcaaacaagctcccaaagcttggaatgatacactgcgtatcagtttacttcagaagggattcaaagcttctaagtcggatacatccctctttgttcatggatcgggttccactctcataatttttcttgtttacgtagatgatatcttggtaacaggccctaatcagctgctcatttctcagttaatcaatgatctcaatgttgaattctctctaaaaaatcttggtgatgttcactactttctcggggttgagatttttcgagattcaaagggtatgttcttgtctcaaaccaagtacataattgatctcttgattaagctgcatatggaaggtgctaagacctgttctaatcccatcagcaacacaacaaagctgtccttgcatgacagtgagttatttgaggatcctactttgtatagaagcacaatcggtgctctacagtatctcacactaacacgcccagatgtagcctttgtcatcaacaaattaagccaatttttgaaggctcctacagtatctccttgggaggtcggcaaatgcttgctgcgatacctcaaaggcaccatttcagatggtttatttctcaaaccagcagccaatatgatcctcgaaagttactcaaacgctgactgggctagctgtgtggatgaccgtaagtctactggtggctatgtaatttacttgggagaaaatctaatcagttggtcagctaagaaacaaaatgtggttgcacgctcaagcaccgaaagtgagtttcgtgcattagcaaacactgtagcagaactcaagtggattgtctcactactcactgaattacaagtctccttgcacacttgtcctgttatttgggtggataatcagagtgcttctacattggcagccaatccggttttccatgcacgatcaaagcacattgaaatcgatttgcactttgttcgtgatcaaattttggcaaaacaactctcggttagatatgttcccagccatgatcaagtggttgatatgctcactaaacctttgtcaaaggatcgctttgtatatctcaagtccaaactaaaaatggcttccaccccttttcgtttgaggggggatgttaacattgtatctagtcatagttagttatctgttactgtgattag

SEQ ID NO: 17358 - DNA, 2500 bp, Cannabis sativa
atcttcactcctcaagtcatgttatcctatactaaagtcatactatatataattggcattagctaaagatgctcactaagattgcaaagtaaacactataatcaaattaactggtaaagtaatcatatctacagagtcatgaatgaacatttgattagatgacagacctgccacacacgcaacacttcaaagtagattccccttcttgatctaaatattttcttcgttgagctgggtgttcatgcaaattcttaatgaacttaaagaaagctttttcaaccagcctgtggaattcatctgaatcttcagaaaccggagtctttgaaggctttacaaccttatccaaagagccattaatgttgttatcagttgttttcctcaaggaatctttctttttcctcttcaagaacaccttattactcggttcaagtctcccgcgaaatgataccgaaatgggatccttttgaataggccctaaacgcttctttacatctcctctagctttgttatcaaaacccccatatccatggcactgataagaaccaccattagagtcatcattaatccttctcttcatactctttttcttcttaccttttcttctaacaatcctttcatattggtcatccctctcaatcctctgatgatgcaaaactctatcatcactctctggcatagctactaacctgcccaagctaccaacaacatctttttctcttcccaaccatgaaatctcactatccccaccatagtttgaaccttcataatcaacaagcctccttttcaagcccaacacttcctcatcttggtcatcccttctaaacaaacctcctttcacatcatcatactcattactaaaaacagcactaccttgtcttgaagattgaccaaaagggttgttattagcaacattatcaaaattatgaacaataatagaatcaacattactaggtctcatactcaaacaaccttgttgttgttgggtcctaaagttttctccaacatgatcattaatcaaataacccatttcaccatttccatgggattgtgaaacatcattaaaatatccaagagaatcttctttcacatacctactaccaataccaagatgagattgaagttgaaccacttctttgttcttatcaagtggatgaagaaacccttgtccttgaccgtacaaagagttatcaaaattgataaagctctcatttttctgaatacccacatcgagttttcccaatggtgacattaacagaccattagaatacccagagaacacagtacgatccaaaccctcatgaaactcgcttttccgataacccatttccccttccgccatgtacggacgatgaagcattgtattccgccattgaagggtttccaaagaagaagattcttcacggacatcggagcagtaagaagaaggagtgattgttcgtattccataccgacccggataaccaaaccgggtcgtcgggtcgtaataaccagtttggtggcctaattctctgtctcgagaactaccctccattgttgatgaccagaaaaaaaaaagctttgaagaagaagccaaagaaaaggaacttctgagaagccaaatagggaaatgtagtaaggtgtcagattgagagagagagagattatggtaaagaaactggataatgagaagagcttaaggaaattaaggagttgtgtagtgagagaggaagaggaggagtgggggagtgacacctgattttttgcatggaaacgcaatgatctccttttcccgctctcactatatacctaattgctatctagtaaccaagtaacttaaggtgtccaacaccataccgatgtgatattttagggcttgtttggaacgccgccgtaataagtcgtattgtattatatatactataaatattatcatctttacgtaagaaattaaaatcgagccctaaaataaaaaaacgccattaacgttcggactaaactttaaaaagttccaaactcgatttttaacttaaaattacttcaatttcaataagtaaacagcaaaactagtctcatagttaccaaagaacaattctatgaagtcagaattttcataaccactctaaatcacaaagcccctatataaaaccaatcgtttttagcttaaaacgtaattaatttataccttaagcttttcctcttcgaggatttgttatcgctactaccagagcttagatcgttaggtttcgagttgaaataaaaacaaatagatataaaagaagaaagtttgtcaaaacgagagaacaaaggtttcgttcgtcatatatgtactaaacttttatatatataaaacaaaacagtattataataatatattaataattaatataataatattaataaaattttattattaataattatcttattatttcttaactactaagaaacttatacttttagtgtatttagccaacttagagtatcttaaaatacttcggtattttcaaaatcaactaacccc

SEQ ID NO: 17359 - DNA, 8447 bp, Cannabis sativa
gatgccatgtctattgtagaaatccatgaacatattagtgtcaaactgctttccattgtctcacgcaatattttgtggaattttgaatcgacatatgatgttctagataacaaagtcatgtactttctgaggtgattgttgctaggggttcatcctctgcccacttggtaaagtagtcaatagtgactatagcaaactacatccctcttttttcttttgggagctgactaatcaggtctaacccgcactctacaaaaggcgaaggagactgcatcaacgtgagctcattaggtggacctctaggaactttttagaatctatggcacttctcacatatttttatgtagtccattgagtcttttatcattgattgccaaaagtacccctgtcatagctttttggataggccttgccccccagcatggttgctgcagaagccttcgtgcacttctatcatcaatcgctaggccatagccccccagcatggtcacacaccttaagagcgccattgtgaagctctgtgtgtacattactctgtcaaggattagatacctactagcctttcttcttatctttttacatcattcttgctttcaggaaaggcttcaatttggaggtaattgcaataggtatcatccatgttggaatatcatccaacatgtcaactattttaaggatggtaatgcttagttcctctaggaactgtattggcaccaggtttgccttgtcggcaatagtgctacttacagacgggcaagtgcatctgttgtggcattctgttttttgaggatctacctgattatgtagcctttgaggttacttagcaagccttggatcttgctaaagtaggctaccattctttcacctcgagttgtgtactcaccaacgacgtgattcatgactgattgagagtcatttaatatgtggagctggttagcctgtacatcatttgcaagcttgagatcgactattagggcttcttattcagcccccctgtttgaggctttgaagctaaatttcattacttcatgtagttgttgccatgtaggtgttataagggcaatgcctgcatcggacaattattcagtgcagcttccatcaatatggagtttccacgttagttcttcaagcttttgcttctgctgttgcttcttaactatctcctatttctcctaaatcttgagagatttcaaaagatgagtttttgcactcagacacgatgtttgcgagggcttggccctttatggccattcttagtttatatgtgatgtcgagctagccaagttcaataacccacttgagtagtcgacctgatgcttcaagtttttgtattatctactgcagtggttgatcaatgtacatctttattgggtgtgcctgaaagtacaaccttagctttctggaggccaagagcaagctgtaggtcagcttctccatgaataggaatcgactttcagtgtcaattagtcttttgctaatgtagtatattgggagttgtacaccatcttcttctcttgttacgactacactcacaacatgctctttgactgctacgtacacgcctatctctttattttctaagggttttgaaaacataggttgttgagcaaagtgtctttttagctcctggaatgctttttcacattcccaaaaaaatgtacaatcagaatctcctccaagacgtttttaggtttcatagtcaccataaggggaattgaagctaacctggagaagattgaagcttttatcaacatgccttctctcaagaaaaataaggatgtacataggtaaccagaaggattgcaactctcaattcattcatttctaagtctatgtacaagtgcatcccatttttcaatgtgttctgcgaaagcaagaagtttgaatgaattgaggaaagtgaggaagctttccagaaattgaaggagaacttaattaaagctctaatgtgattgaagcttatagaaggagaactattatacttgtatttggcagtgatcgatcatgatgtgagtgctaccctagtgtgagaagaaggaagggtccgattgtcggtgtattacatcagcaaaatactaccttttataaactcaatatgtcctatgatagagagattgtacgtctgcttgctaatcacctctagaaaattaagaccccgatttcaagcgtacgccatcaaggcattgactaataatcctctttgcaggtgcttaagaaactggagtcttccgatagattgctaaaattggctatggaacttagcgactttgatatccaatattagccctagatgtcaatcaaggggtaggccctaattaattttgtagtagagcattctggaaagaatgacctcccagacgatccagtcccagaactggaagtctagaaggtctacattgatgaagtgtcgaatgagaagggagccaaaacaggaatttaacttatttctctcgaaggacatcaattccaaagggccatcaattttaatttctaacctcaaacaatgaagtagcacacgaagctatgttagttggcttacaatttgctaaggaagtaggagcccaagtgatcaaagtgtacaacgattcttagctcatggtaaaccatatatcgaggaatataaaaccaaaggcgagaagatggttgcctatgtgacacggggtagggaactattgtacatatttaaaagatgcaacatctaccaggtcctgagaaataaaaattcattcacagacatgttggctaaacatggaacaaactcgaatatcgtgcagtacgtagcaatgcatgtgggaaatttacaagctccgattatttaaacactaggggtaaatgttgtcaatgatcacttaagttccttgataggctcaatctattagtttctaagtttaggggtgcttcagactaacaaggttgcttccataaaaattcagtatcaacctcctcgatacgtgattctagatatgaaactttcttgcaggggttgtttgtacgtatttgaggtgcatagtgggtactgaaataagtgcaatcttccatgagttttatggaggtttctatggatatcacatctctgaacaaatcccgtcaaaaaagattcttcgtcaatggtatttcttaccaatgatccagaatgattgtgttgagtacatttaaaagtttgaatagtgttagagatatgcaaaggttttatgtgcaccatcaatcgagatcactctcatgcacagtcattggccttctggagtgtggggaatacacctagtgggatcactacaaactacaaaaggaggaataaaatacgaaatagttgttgattactacaccaaatgggtagaagctaagcccattatcaatgaactagggggtgtccgaatcgaaatgtctctcaggctgaattgtaaatttttgtaattttctcttcttaatgtacgtgcacaatgacatgaaaatcaaagaaatttacaaagcaaaaatcgcactttttgtctccaacttcaagcaacatttaaaataagtgacctggaatttaggggtagcatacttagctatgtgcccttgcttggcggtagtatactgagctatgtgccctcaaaaatgtaaagtgtccactgatcattttaattatgtttgtttaaatttttgttattagaaggaaagcatcgcctaaaattcaatatgttttcagcctttttccttaatgtaaatatcacatgaattccattgcagttttagcctgttttcttaccccatttaaagtaaagttttacggtcttatgaaaacgtggaagtaggatgccttgcctgaaatctttacgttctcatctgcttccttatcacattttggaaagaactaaatctgttatacaacaagtgagctttgttatttaaaattatgaaagagaatatattgcctgaattttgaagtgtttttagccttgattttgtatgaaatattgcctgaatcccatcgcacttccaacccttgttccttatcaattttatgtaccaaacatttctgcataagcaaagttggtattatatttcatgtaagagatgatgatatgcctagaacgtggaagcttagccttctgtgataaatccactttattagtacgagcaaatttattatcatgctcaaatagttaattaaaaaaagtaccaaagggaattgagctccgtaatcctatggtgatccaggactaagcttaaaacccctctacactacttagaaataaactagttaaagttattcgtgttgtgataaggccctaagtcattagaaatgttgatgtctagaagtggggcttgctccaaaagaatttctaaagctcaactgatgactttaaactgctcttatgaaaggacataagatgtaatgttttggtcattagaaccagatgccttaaacatccgaccaattaagtggccaaataaattagaaaaagacgaaggataacatggctacattttaaaagcgagataaaagtgtcttaagctactacatgaagcctcacaattaaggcataatctaattggttttgcaaaaggaaaaagggagccaaggaaactaataatcaaatcaaaataaacaagtaaagagaagaagtataaaagaagacataataaatgttgagcaggatcttgaggtggatccttgctaggtggaacatctgtctttgaagaaagctcaaggacctctacgacatggtttcctctagattcctcctcgaactcatcatagtcaacgctacaagtatgaaagtaagtgctagtttcaatggttgtcaccttacttgtatactctaactcttcatccccacgtaaccttagaattgtggggtccttctacaacaattagtgaagactagccacaagggaaatctccaaagacatatgaaaaaatttctccgtgtgagctttcaccacctaatggttgcttttccagcttcctttgcaagttgagaagaaacatgactcatcctagccatggccctcatggctaatatagccataggagatttggcggtcaaaaatttagcttttttccccagatgcttttcaatctatctttcttggtttagatttccttattcaaaccctccacctctgttttgagcacttgtgagcaaggcattgacaattgaaacctaagtatttagccctctgattccattgactttgttctaaaaggttatgttctttgccaccacataatctttagcatcatcctttattatggtaagggaccttatttgagcctcaagtttctcacaggcctccttgtgagataggttgactttgaccacatgcttgttgtatttgtactgatatttcttattaccatcattgcatgccttgcttttgagttcttctaccttcaacttgatgtttttagtatcagctctagctcgagatttaatgtgttaaattttagagttctaggtcttattcttggtctagacttgctcatgttccacggccatagctctagcttcatgagaagccctctctacaatcatgacaatccaacctaacaaagtgtcataagataatatgtatgacaacaacaagataaaaatcaaaagtatgagatggtgaacttaccccatctacatactgtttgattgcatgagttaaagtgataggatcaaagttgctacacacaactcacttcaaagtttttaagtcacagacattgtctcccacctagtcaataagtttgtcaaaagatggcaccaagtcactcctaacccatggcgccaaatgcttcttgaatgcctcccaatttaacataggtttgggacccttggtgcattttccatcagcaatctcaaccttctttggggatttgatgagagtggttctcctttgagccaatccaacttttttccctgtgcctcttaaggcagtgatcatcctcctacacctgtttcaagaagttttcatttatgtccttgagctttaaaggaaaactacactttagggttgggatgttaggaagggcagtgcgggatgattgtttttgaaattgagtggcatgtgcttgttaacccgtttgggatagctgtgtagtcagttgttgttgtttctgcttatgaggctgaatttgttgttgttattcttggggttggatgattgtttattgttgtttttcttattattggatcgtcgtttgttgttgttgttgttgttggggttgttttattggttgtgtaacttgtggttgggtttgttgctggttagtggcctcactcttaatcaattctccttcctctttaggagagtttttgcttacccctgtcacctttgcctttttggcttccttcttggggccatatgtgttggaacatttacgggaagtgtctaccttcatgggaaacacgtatccctcaccaatctcttcgaatggtacagtggcctctgcaccactatggtttgttatagggatggtgttcctagaaggagcttgctcttggttcaactcaaattattgcagagactaaacctcttcgaacatttctccagtagaaatgacccagaatagagaagcatccctggaagccttctcttccctggctgaagttcgcttagcctgaggagtctcctgatttccaaatgatgagaaagagttgggaggccttggcttgcaaaccctttttggcctgctcttggtccttcccttcccttttcctctagaagcttgagacacaagctagttaatggattcgactaaggatagcaacatcttggattctgaaattttcatagtaccatagacaacaacacaattataaatcaacaattaaatgacatctgcaagcaaacacaaacaaacatcaacaaattgagacttaggcgtgggtgtgataactaagagagttattatatggctttctttaagtgaataaaccaatgttttcccaagccatgaattgccatgctctttgaagcttgggaaagacatggactggaaagggtctaccataacaatatctatagacagtatgtaattactgcaacccctaatggcttcaccctatcctatcgaggatgggggtacaaaacaaacagaaaggccgtttacgtcttcctgtacacccacattcgggcatgaagtgtaaaataactttgcgagttcttcatctttagccaaatgattaggatgacgatgtgcccaatccaccatcaggtgtttgtcctctttaagggcccccttcattatttttgtgcaatgtccgagattggggcataacaacgcaacctctttaagggccctctttagcacctcgttcatcagagttcaaggaaaaggtgttgttacgaatgggaaaaattccatcagtcatgaattataaacaagaaaggaatacagaatagagataaaagataaaaccaatattctcttcactgagaaccttttaggaaaaaactaatattctctgacgtcatgagagttagatgttaagttgatgggacattgcatgtccggatgcttctctaatttgtaaaacccaatcttttgttcctcatcacgcatgatttggggtttaagagcataggaatgcaagatctctttcagacatgggggttcaagtttccccatcttacatagaacatacagccaatacagttgcttgtaagatggtcgaataagctggaagggtacaattccgacctgcgcacataacctcgtcaagtaagttcttaggggaaagtgtgccccacttgaaatatgagctcagcttcattctttaaacccatcttttatatgggaagcaaattatcccatgactaatagcctgttccacactagcccttgaatattacagactcccccattgacataaatgttctccatcatttcgttgcacctaaacttgttcatgttttggtccatctcaataatgaatcatcataaaaaatgggagatgaagatgtggcttttgctttgccctttatcgtggttttcttgtttttccctctttcgagcaactttagaggtagggtgttgttgaggcccctccttgggcacttcaacccttactcctcaatattcaattcttctatatggatctcatcatttaagtcaggcactagaatagaaaataaggaaaagaaacccacgaaattaaataccatatattgtaacgataagtagagtatcgaggagaggctccccaaaaatttcttagagaggtcccttcaagacccatcacctagaaatgtcctccttgtcagacgttacctctagatgctaggttgggaacccacaaaaaagttacaaacacaagatggatagctaagcaatacttccatcaaaggccttaatggcccctaataggaaaacaaaaaatatctaaaatatgtgaaggcattccctggaagactcaatgtttcgaacaactctaccaaaaaaacatcagcatacccacaacaagataaccaca

SEQ ID NO: 17360 - DNA, 3284 bp, Cannabis sativa
agggcataaaatccaacacaaggttgtgtctattttgcaaaagatggtgaaataactatcaagaaaggtgacttggtagttgtgaagggtaagaaagagaaaaaattatataatctagttgagaagactattttaggtggagccatgaaggtggagtcaagtcacaaaaggcattcagttagtgtgaaggaatgtgacaaggtggagaagactctaatttcagttaaaagttatttgaagaaaaaagacatcagtgaaagattaaaaaatgtgaagacaagtgctcaagtgaagtccaatgagagtatgaattctgtgcatatatactcttattgatggtttgagttgtgggtttagagaatttgagtcaaggtggagattgttagagtttgactcaaattattcatttattattcatctatctttattaagttacaatttcttttagggtaattattaaatgtggaaaaaagaaagtcttgatgaccaagttttaatgagtcttgtaaagaaagatttggaatgtcttggtccctaaattttcttgatgcccaagttttgtaactttataaatatgtgttttgtgtgagagagaagtatgtgtggggagaaaaatagtgagttgtgaaaaagagaagtgtgtgagtttattttgtggtgacaatgaggaagaagcaaagattatattgggatttggatggagagattgagatagagaacatatgtaatttttgaagtgataagtgaaatatagctctccttttaggtttggtagttttaccaaattgaataattgctttgcttcgtttctttgttatttcactccacttgaaatttattatttttctctctcccaacacttagtcaaattaccaagtgttgctccctctcccaacacttagtcaaattaccgagtgtcgctcgctcatcataagtataggtagtgatggaaagaatacgaaagggatgtacgaccaaaggcgagctcgttaaagctggcatgactccgacaatgcctgaagagagaaggttgttgtacaatgaatacaacaagtacaagcactgtggagatactatttatctcactctaggtacaagctgacatctgactatttcacaacccatcaaacacgctgaccctcatggtacaaaaagaattttgtcctctaatttttaggtccacttgtattctggagatattagagctctctatagatctctctctcttccattgaagaggggttggaaaataatcatttataagggagttttagataattaatacaacactatttttctctattaatgttctatgtttctcttgagattttcattttcactctttcacatttgattttttaattaaagtttagttgacgagttttcaccgtcaacaactaattaatggtagattacaaatccaaaaaaaaaaaagtggtaagcaaaaatgtcgaaaatgttgatacaaattaaaatataaggtatattataagaaaatgtcatatctgtttatattagtgatgggtaaaaactaaaaaattagaggatttcccacttgtgtatatagtaatcatgagcttgaaagataaaattttaaataatttcttgctagaattgacttataaatgagtttggtgatatgcaagaaagacacttgtgttttaattttaattatcaatttaataatatttgttgaaatatttttttacttaaattgtagtatagtttggctccttaatatctatctccgcccctgattcccctgctagaccctatgtagcgtaggtactttaatgctcaacgattatcatttccatttagttgaatgcttgctaactataataaatgtaagttataataaaatcagggataatatatgcagtggaggtggaataacaattttttccagtgccaagaaaaacaaaattattagcaaccaaataagagttaaaaaaacgttcgcaataaacgggagaaaagaatgtagggataagtaataattaatggttgctttttttcttattgaaaataataatggttacctttattgatttggtaacattatgtgggtatatctgcttcaattaaatgctcatgttatagaaacctgtacctataaatattttgattgtacgcccaagcattgtcaggtcaccaatcgcaggccttgatgtatgtagtaacaaatgtatgtactatattcactttaaaaaacaaaatatgagacttgtttggtaattggtaatatttttatttgttttatttctaaattgtgcagatgagtaaaaatatttgttattaaaattttattattaaaaaataaaaatatattcgataattatttttattttttaattttaaaaatagaaaataaaaatatattttataagtttttcttctcattttttattttattttatttaagataggtctaggttttggtctggggccagggccgtggtccgtgtccgtgtctgagactggggccaagatcggagtctgggtcccaaagtccaagttggggtagtagtcaaaaataattattaagaaaaaaaaattgtttaaaaaaaattggaagtatttttttcaaattaattttttaaaattttgattgtcatttaaaaaattgaaaaagttacttttttttttttataaaaaatatttttagaaaatattttcacttttatatttaaaaaaaaaacagaattttttttaaaaaagtgttaccaaactaaaaaaatttctatattagacaccttatttggttcagtatagaaaaaaagtttaattttttttatgatcgtattcgttaagtgtaaattttcaaaaaattctgaataatttagtgtgtcaaaagtaaaaaatctaaccagttgcataacacgagtattagaaaaaacatcaatatatacaatcataaaaaaaaaaaactaaaaaattcttctaaatgccgaaataaataagaaaagataaaaattatttcagaacaactcttttataagaatgtaatataaacttaccctaaataatgatttttatgtgtacacatttttataaggatatagttggtaccgagacaaatttcacgctgtttatggatttgccagaggttactttttttttaaaaaacaagcgtaggattatattataataagaaaagctagacctcatgttcgttacataaaatatttgcaggtacagaattgatcgggatagatccataaacttggtgggtaaaagcccacttagcgacattatgagccgcaaaattacagttcctacta

SEQ ID NO: 17361 - DNA, 3976 bp, Cannabis sativa
gttcacattgctgaatcgaaaaacaatgaccacgcatataatactgttgtagatatgccagcagcagcaccaacacttggcgttcaaatgccgagtgttgttgctgattatgttggagctgaagaagaatctggtgatttgaatggggctggtggtcggggtagaggccggggtgatgttcctggaaaagcgtggcaacaagatggagattggatgtgcccaaatacaaggtctgtgatgtgatattggtgagctgctcattcttgctcctttagtaatttgttgcatagatatgcttatagattcatcactgaaacttctcatgcttggttattgtagtagttgttccaatgtgaactttgcgtttcgcggtgtttgcaatcgatgtggaactgctcgcccaacaggagcttctggaggtggcttcgggggtggtggacgtggccgaggtcgtggccaagaatctggaggtcctggccgatcagctggtgctgctgctcctgcaggactctttggtcctaatgattggtcttgtccaatgtaagcttatattatgaacttctgtgttggattttcttaattctcatgctttttgttgatggattttctagtgtaagctttggattatgatcttgtgtgctggattgtcttaattctcgttctttttttaatggaatttgcagtattaattatttagatgaagataatgtgaaatcacctgtaaattgtgacgtatgagagctgaacaaaataataatcgtttgctaaacactttttaaacattttattattatgtgttaaggacattgtagaacttatttgatcaatggttaatgaatcttagttttatgttgtgttatttgctccaagtattttcatgacagatatttagtacgcatgaaattaaaaaatattatacgattaatgtcatgaatgcgctatagagtgcaagtgcatgtggcaatttacatattgcttcttcattattttgctaggtgtggcaatatcaactgggcaaagcgtacaaagtgcaatatttgcaacacaaacaaacctggtcacaatgaaggtggtgtaaggttagtttgctttgtttttgttcatatcaactctcttttgttaatattaatttatggtaccggagacactagagttgtttttatttgaaaatgtatatttacaattagtggttccacaagagaattgcttcacatattcagtatgtttattttttttaacttgtggtactggagacacaggagttatgtgtcaatttacaaatgaaaattaggtatattttaactaggggcactggcgctttaagataattgcttcattttatcattttgttcatttttttgccttgacttacatcaaatcatgctagaaaaagggctagtgtatacatatatacacatttttttttataaagacgcatttattaaattatttgacagaggaggacgtgggggaggttacaaagagcttgatgaggaagaactagaagaaactaaacgccgtcggcgggaggctgaggaggtaagagctatttgttccagcaggggatacattcttttgggctcctttctttccttttgttttttttttttgatcttttttttttctctttgctgatttcaggatgatggtgagatgtatgatgagtttggctatctcaagaaaaagtttcgtgtgaaaacacaacaagctgatgctggaaggacacttcctggtgctggacgtgctggttgggaagtggaggaactaggtaatttcttcttggcatgtaaacattcaagagtacttgtctagattctcattcgaaacggaataacatggaaattgtgcttttaatctgctgatattttgaaaggctgttgcattttatccattgtccattaggtttgattaaaggagggctttgtcaatttgattgagcactattaatttttcatgatttagctcatttaatttgagttgtgctctcaccatgtttgagctgaaaactatactttgcccaaccagccttttccatttgtatctattgaactgttagattatgtcatctaattttgtgaaaaatatccttttatctttaattaagaggatttaaggtgtaagcagctttattaagatgtggagacttcgtttattgaccaaattgcattatgcaggtgttgttgacagagatggtagagaaagaagtagagacagaggaagagaacgggatgataaggaaagcggtaggaacagagaacgagatgatagagataggcgtaggagtcgcagcagagaacgagataggggaagggatcgtgaccgagattatgatcgtgaccgagatagagagtacgggcgggatagggacagggacagagacagggatcgtgaccggagtaggcaccgccactgaaaagatatagcatgaaagcttccgagcattattttgatgtttgatttggtggtggcttggattcttggcattcgatctgaaactcgtgttttgttgggagcttttcctttcgagctctcttaattgaaatggtgccttattggtgttgaagataagatacttcgtgtaaacttggtacaccccatgcttcaagaacaaattaaattaaaattttgaattgtgaacattgtggcaaaatgtttgtgttcttgtagatcatatactcaaagcaaattgttggaactaattttactttttatttcttatttcttctggtggtgatatgatgatgaacattgattaggatcaatgtacaatgaaaaaggtattgcattttttttctagccaacaaaaccatttattaattggaaaattatatcttcacatatgggatagatcatataggcattgaaaattttatcctaggtttattggaaaggaagattcttacaagttacaacatattaatctcttttctttgcacaaaacatgttaaattacaaagcaaaatagtgaatagcagccttgataaatgaattattcattttttattgataaatttataatatttttgactaattaagataagtgtactactatattgtttttaatcactacttataagtgcattttttataacaaaataataattcatgcactgtattataataataaattattttgagttttcttcaaaacaagcaaatataaatgtataagaaaattttaattgtaatttttgaagctctaaaaatagaaacgtcaatatagtagtctttgcaagtaaaggtgacaatttgggttagacacgataatgcgactcaaaattcccaagaaataaacaagtttagatttgtcttaaatgagtttgtgccatttttggatctacatcgctaactcgtttattaaacagaccatttttcaggttgacattcttaatccgaaaatgacacgataatgacataacagacttttatctttttattgtctctatcattgagttagttaccagttattagattcttggttagttaaggttgttaaccgttctttgttatgtacggtagttagttggcttagatcttgctgatatttgtatcttatataagaccttattcttccctttgtaattcattcaacacattaataataatgtttagattatctcattacttccgcaatatggcatcagagcaagagagttatgcttccctcatatcctagtttctccattttctcttgctgtgttctgcttcttctctggcaacgttcagtctgaagtgaagaattcatattacaaaagtggaaatgtccatattacaaatcaacttattcttactaatgtgctttatgttcctactttctaatataaaataatatatgttagctgtctaacagttgggaataatcttgtcataaatttttttgctaacaaattttacatgcaagaaattcacaacaagaagatgattgacaaaggtgaattgattaatgggctctacattttggacaccacaaccgttt

SEQ ID NO: 17362 - DNA, 5683 bp, Cannabis sativa
atcagatccgacccgccccattgacatttctagatgggtgtaataaatatctacactccatcttgaggggggctgttagaataggattagttaattatttccaactctcttggaatctttatttttctgttacttacttcttgccaagttgcttaaatcaattacataatgtcattgtactaaagcctatatataggtatgtaacttcagctcgagaataataagaaattattctcttctttctctctgtttttagccttaaacctctcatatattgtgataatatccgattaggacaaaagtttatcattatcttaattttgatctaattactattttcttctcagacatacttcatttgtttaattcctattagtatacatccctttgctcccggcatcttgtttatattcttccacagaatatgacaaactatgtatatatgcctaattaagagtagcacatcaagtagtgagaggagaaagcatatatattaccatattaaagtgacatgtatatatcaatacactcgatctatagtacagtacaatattaatttgttatgtgaatttttattttataaaataattcatttattaattattgtctatattgtatgtgtataattaataatctaataaaaaagtggtaacatctcgtatatctagtatccttactcttttaattagaagagatcaaggattaataatttaatagtgtgaagttgttaaattaatatcacctgcatgtacagtactgaatagatatgaaactggtataagatttattcgacactacttttatcatattactattagcaaactcgtataaataacttaacactttacatatatgtgttagctacaaattaatttcaagtttcaattaaagtcacaggatagcacatctagcaagacatgaaacttaatcgcgatcttcaaagtctataagttgggtcacctaagacgtggtgatcattggtcattattatgttaaaaaatgtcaggtaaatggtaacaaattacgcacagcctatcgattagacatctttagtagtgtcttaataatatatttattatatcatttgaaaagtttaattgtcaaataggtataaaaaccagacaacaaagcagaatcaaaccgcgacaccaaattataaaaagaattaagaataagattgtgctgtgcgcatctacgcaatgagccgtacatggtgcagtaagtactcccaaccactttacaaaacccagtttcctggaagtacccccatttctcttccccccattaattacaacactaatctatatatacgcaaaaaaaaaatattcactttaactctctagacctcattgggaaaccaaataagttcatgcacccattcctattcccgcgtcccccacttcacaccttcctctctccttctctctctctctctctctccacttcacacctgctatatataaaccaaagctcactctttcttttctctcattcgttctctctagctgtatatacacatatcggtccaatatttagataatatctggactattaattatatagacatatatattgaccagttgttgcacgtgcaaatggaagcaatgaattataataggtgtacatcttccacaacatcatcatcggactcgtcgtcttcggaatcttcagggaataataaggtaccgagaaacgggaacaaaccagagcgaatcaaaggcccatggagcaccgaagaggaccggattcttacacggctcgtggaccggtacggagccaggaactggtctttgataagtcgatacataaagggcaggtcaggcaagtcgtgccggctcaggtggtgcaaccaactcagcccgagtgttgaacacagacccttttctcccgctgaggacgagaccatactagcagcacatgcccagtacggtaatcgttgggccaccattgcacgactccttcccggtcggactgataacgccgtcaaaaaccactggaactcgactttgaagcggagggctcgggaggcacatcagatggaggacgagggtaatcagaatactatgtcttgtgggaccggtttcagcagaggtgaggccaatggatcgctgccatttggcaacactagtaatagtattaccaacaataatagtgataataatgttaacggccactcttcaccgatgtcggttgaaaatgacccaccgaccgcgttgactcttgctccgccgggtagaggcggagatgtaatgcccgaggagaggagagagagtttcacggcggggttttgggatgtgatgagggatgttattgcgagggaagtacgggagtatgtgagtacgaccctttctgacaactcgggcttcagatagttttaaaattaatcaaaccctttttatttaattttcttttttattgttgtttgtggctggatttctgttaatatttgttcgccgttcaattaattaattaaattaaattaaataaataaatacttttacaattttctgagcttactcgaaatggtattacagcctgtcgccagataagatgctgccaacattacgagatatattttagcgaaaattaccaaagccattatggaatactgactctgctattccctactttgcttctcctgcagaagaaaacaaaaaagaagctaggcattagactctatctatctacatgtgaaaatccattacagtccatcaccgtttcaatgaccaaatttgaaataaaatattgcctaaatatttcattttaaacatatattttttaattttgaagggaattttcttttgtaaataaataaataatattactaacaaatcattatttgtttgtgtggaatgctacaaaactctgcaagggcgtgcactgtcgtattttaattatttaaataataattgtcggttatttggatttatatagaagcaattcagaacaactatttttaatgtatttcaacattattggatctatgccgttcataaatttaaaagtttagtgcaaaattattttttacgcgtgagtggaattttttatttatgtaaaatcaataataaaaaaaaaaaaaatcttctctaaaaaataattaaattcaaaaaaaaaaaaaaaatctgaaatgtcactacatagagtcgtcacacaaaatttatcgcaatcggattttttgcagtgataaattatgttgctgtaaaagagtacaccatttgaagatagtggtcttagcacctacgcaaacatttcttctctctcctaaaaactttttgttcttttgcgcaactagggtttagggcttcaatatgttcctcttggctagggtgtcgttgtcgcccttacggggctggctggtcgagtcttggtcgagaggagtaagcctccatttatggacatcattgttgacatcgcttttaacaaacgacagtgagtcaattaatatgtgattagaaatgtaattaagacagagcaaaaataagtaagcaataaagaacataagattttaaagaggtttagcccctttagtttggtaatagcctattccccttagatagtattgacttgaggacaaagaatacagtgtttcttcgctcaaatctctcacaatgaaatctctgagtattttctcttagatctctctaaagcaattttttcgatcccttttacagtgaagttagatcactatttatagggctaaatgcatgagggaaagtttcccttttgcttacaatatctataattggtaggaatatacattacatatttagaatacttaaaatgggggattgggacagctttccatatccctttgatacgatcccatgattgtagggattgcttgtgtgcttgagcttcacgatatcaaacctaaagtagtgaagtcttgatgcacggctcagatcactctttgctcgattcatctgccctcgccctgctcagtcaggaagactttgtgcgtgcaaatgtactactcgaagtctgttcggtacagtcctccagccaagcataaagaataacagacacgtgtcactagcacatattcccacgtcatagtgcaaaaaatgggataacatttgcccccaagtctccatgggacttccgaagtcgcgcgtagagttcacatagtttgaattcgtgtttgaacggatggcacgtgttcaatgcgcctgttggtgatctgatgtgattctgaccaatggtctcttcgatattcggctcataaatgttgattgatttgtacctcaaaatactccaacgatttgcatgctttgatggttgctcttcctcaggtacttgattacttgatttcccaacgtttacttttgggaggaaatcgaggcatttaaatttcaaaatgattacaactcttcactaatttgcttataaatagggaaaaaagtcctcataaaccacttttaacattttcttatttggtgatttcagagcaagaacacctttttctctcaaatcctttgaagaatttctagaaagtgtcgatcagcgtcatccgagcaacctcaaagcttcggacagtgagtaagttcttcatcgttttcctctttaatatttgaatctctgattttctggatttccattgtagaaaattcgatagtcttgaacttgttctaggaaaactgtagaggatctaggtttagaaatatgaaactttgattgtaattgaccatatgactcgactgtaattgtattctgactttattttaatgatattcggttttcacttgcccattcggggtctagtaaaaattacccttaatttgaattcttgaaattctgggttaataaacctaaaccatgcaaaatttccccttttaatcttttggtaagacctagtcggtatactttatttgtttttattcgatatcccagccaaatactcatattgtgtccgatcttttgtagatgaaccccggtgagttttggggaggagaaaatcgtatcgaccaggatcttctccaacttttttacgaggacaaaccttgtctctgcgctagtctgtcctcatcaagtgacgagctttctaattcaagttttgacgacagggaggtaagtagtgaatgcacaccttccctaaaatctgaggtacagtatcccgaccagatcacgggtgaaggttacagaagcttcatctgggaactcaagaaggggtggagacgatacttgccatccagctggacatatatcgtctgcccagacatagttgatactatccccgtcgaccgaccaagcactgctgcctttggcattcctatcgccacctttgccataactgttgctaggcatactaaccaaacaccatccagggataagatgatggcccgcactaaacaaacaatgtggagaattgcttcgaatgatcctctcatggctcggcttgccacgatgccaagagatggataggctcggtctgctgttgaggtggaggataatgaaggggacgttgaagtctaagagatggaggatcagagcgaggtccttcctcacagtccatctgaagccagggaagagggattgctcagagattacgcttcggtggttacaatgaggaaagggaacatgtgtcctaggccgatgaagtcttggtagagagtgatgactacgtgactgaggagtacaccgaagctgttcctcaaagaaggcaaggtgttgggttttatgccct

SEQ ID NO: 17363 - DNA, 6119 bp, Cannabis sativa
gagagagagagagagagtataaagcattgtttcccttcttgagcagctatctatcatcagagtagagccactcaatgcatgccacaaaagctacattttcttttctcctttccctaatctaatcaggatatactatgttgtaatatttaaactaacctggtaccagcataatgacgagagcgtcttgcaatgagagtcagtttaaagtcacgtcccgatgcagagagggaagcctatatttaaatagcattggagcattattcaaaaatcaaatactgaaagtttaagaaagggtaatggtaatatatgagacaatagaatacaaatataagaaatttgaaacgtgtccaaatattaagtcacatcctattgaacaaatataagctaaagtataattagagttacactcattgtgacattaaacgcaggtatatgaagcaaatataatatggataattaagatataaaataaggcaagaacatgaattccagcaatttggatggatctttcctcaaacggttgaaatagttctttatctgtatgatattactgtatatcaatggtgtatacgtaaccaaatacccaaatgtgtatgtgattgggcaggtgtgtgttacattaattttcactaatgaactattcaacaatttatttttcaaggtaaagctcacctgtttgaaaaagccgtagactaacgcaactgtccagacagtgttctggagatgattccgtattccacgagttaagaactcattccaaacaaacatggtttcatagagtacatgtcctgatgtactagtgcacatgttcttttgaagactacgcataacatggtatgagtagctgaagaagaagtccttcgtaaggtccactgtgcataggagcttcttgtatctatgccatcagtaaaaagagcacagaattcacagttaaattcaagagcaaaagcttcagcatccttgaattttaatagataacaacagtatgttcagccggcacctttactaacttctccactaaaatgttatgaaaaatataataaaatttctctgataaattcagaaaatgtcatcccagttaaatgtactttcagcgtgtaatattgaatttcacaatgaagtgaaaaaaaaaaatcaaaaggcataaccagctaaaactacattattttcatatgcattctaaaattcaaacagcaagggcagatgcctaattgtagaaaggtctagaagataagagagaaatgggcaagtgaaaccaaattaaaaggagaaatggtgaatctttctaagcaaatattcgtagttccactgataaggaccatggataaaataaaatacagttgcatgatgaatgaagtagagacctgttctcatttttagaatctgtgatactggcaccaaatgcagaatttgaaagaggaatcatttcactcttcgacacagcatatactgagtgaccacatattgcaccaatctgtcttctttctgtgatcagaagcatgtaataaggccccaaaaacttgacgaaccctgaaagaaaaagttcaaataaaaaattgataagttgtttctaatgattaagtaaatcacagaagtaagaaaaccacataccaacaatcccgtaacaagtagtaataaatttaagtccacctatggacttgtttccttcatgtatccgcctcaacaggtcagaacattctaattctgtatatgtggttgaatcttcacgaatgtttagttcggaaggatcttgccggtcaatctttaacactttccaatatgttctactcttgtcccttcctatcatgtaaaagttctgtagcagaagaacattaaaaggaaaaatgtgtaaatcagtggaacaaaccagctaaaaagacaaaccaaacaattaaaatcgcttagcaggtcatacacccacagcttcaataaacccttttgacatatgtggatgtggcagtgtgccagcaaaatactacagaattgaaaattgatctaaaaaaaaactgtaagaaagaagacaagcaatcagcaaacaaagagatgaacttaagccatctaaacactatttagctaatagcaactctaaatgctgatttgacacatgtaagattcatacttatgcatagatatggacctaaaccataatgagttacaaatagctacaaatgaaataaatcagaacggactacttatgcaagaaaccaaaattttcaagtgaaaaaaaaataaaaataaaaagttatgaataggattataccgatcgagtttcatagagcctgaatttctgcatataggcatggtcagggggaggtagacgctcttctgaatgaatggagggctcatcattggaggaagccatggatggttcagatcccccgagcctccggctcagggaaaatatcagcagagcatgcaattatctaagccaaatagaattatacaaaaactattcaagtaaaaatttattcgcctaatgaacccaaactcaatccccatacatatacaatgcagttgggctgcttcaaatacaacatttcccagagcaaaaccctttttttctcttaatttctcaaaaatgaaaacaaaacaacctctcaacaccaaactttgacctctttcctaatcaagctccttcttggagcaatcacaaaccaaaatctgatccctccttcttcccacacacaacaccagaaatgtttactgatcttcaataaaaaacttgtcgcagatcgaatatttacaatatataattacaaaaaacgaatctcaatttgcatcaacaaacaatccatatatatctcacatatatatatatcttcacaaagagacagtgagagagaaaagagaaaaaggaaaaggtatgaaaatggaagctttatctagaagagaaaaaaaaaagagatacgaggagaagatcgagcagaaaaaataggtaatttgaacttaaaaaataataataataaataaataaaaaagaaataaatgggagcttcgagaaagagaaaaaggggaagagagtgagaagagtcgaaaaccagagaaggatagagaaagagaaagagagagaaagaagagtctaataattgagacgaaggatgacgatggtataattgtaattatatgcttgttttggggttttgattgtttgatacgattacagattcagaaggaagaagaccaaagcttttgttctcagatccaaaggagaaacaactcatcaaagccaagccacaacttcggtcaccgctacatccacacattattatttattattgaaattatttcttatatttaattacaaataaaatttaaattaaaaaaaaaatagtaataattattgatatggttgttgttgttgtaattaaaaatcaaataaaattatgttattataattttattctccccctgatattttctgtgctgacttttggctgctaatttattcatttctagccgacacatataccattgatcacgttgttgtagtacataattaccttattatttgtgtaaattttttaaatcttgttgtttacagtcctaaaatagattcataatataaaaataaggacattgtttgtatagatatattattgattaaaaattagagtgtaaagccaattcttaaggatgaagctaaatggagttttgtgtacaaaaaacaacaacactaacaaaaacatgttctcacgaatctcacccttaagttatgtctaatctagccattgtaaatggtaaagaaacactaaaattaattatatgtattttgtgtttaaccaattaaaactaacaacactcacatgccacactactttattttagtaattattttaagtcgaaactttccatttgtctaaattcaaattcagatgcaatggattttgaatttgaagtgaattaaacaaaaattggttatgagttatgagaagcagttaaaattggcgggtgaagcaggtaattgaataacaaagagaggtgtgactagtggcagtggaatattgggcggttagttgcattaaaacttattaggatgcttttaatgggagaaaatggagtaccaccacatacaaacaccatataataacataaagaataagaaaaattggagtatgatgagatgagaaagaatatatataatttaaaaggtttaatttagatttgattgactatagatacggtgatgtagtactaaattaaaatcaaaagagctcacactcttacacacacacacacaaacaattttgggttcacacttagcacagttgcagttgcacccacgacgacgacgactactattgctagctagctgtcgttttataatacgtgactgcctctccaataattgaatttctgttcacatccgggtcgtttgggattttcatgtgccctctcctctctctattctcacccaactctaacttattattattattttacaaaaataaataaataaaggttttcaaatttattcaaaactactctcactttcaaacttacatatcacttattacccaacagaacataaatgaaaatttgtgtttggtaaatttggaagagacataactacttatatgcatgcacgttcaaggatataatatgatagtgtgataataaattgggtattttgtaaatattaaattttaatattttctactatgtaaattggtattttgtaaatataaatttttaatgtttttttaatagaattgtttattggaatttttgaaaactagttataaaattaataagcttaagaaataagtaaatttaaaaagaaggtttgattgtagaactctagtctacgagtcgatattattaagctagaaaaagctttaaagtataatttacaagtgtttttgtcctagttgaagaaccctgattcttagttcttctcccaataatttgatttcccatcaagagaaggcatacccactacccagaccaggtaggatttttaaggggtcaactagaccctctgatggggtaaaatataatatttattgattttgggccacttaaatgaggcccaattcatgaggtgaggattgtttagacaagcaggaccattaaaagatgacaggtgttgggtgtcgtgcacagtccgtaccgagaaagttagagaatatgacgttggacaaaaacctgatcttcttttggtagcaagcgcactccgccagtctcatgtaggggacaagctctgacactgtagggcccagtgtctagctggtttcatatcaagtgatattcgagagccatttgagcaactcttcgactacctgctactgggtcacctcctaaagatgtctggattgcttttagcaaactcttcgcgtcaaggctgaatggcctctctcagactaggagaatttggccttgttaggttggtgaattagacacacgcccggatctggaatcgtaacatgactttcccaatgaattggattgttatcttgattgggcccaagcctgggtctaccttagctattgttgggctttgtaattgtacacatcatcactctagaaacataaataataagaataaataggatttttctccctgaactatgattcttgtagagttttgctccttaaacttttcttagttgaaaaaatttgcccttgaactatgcaaatcattacaaatattctcctctagttgcatttttctcatcttttaaaataatttgtttacgtgactataagttacaggatggcagagggttggccttcaggctttaggtggaggggattatcttagagagagagaaaggctaagttagggtcggctcataaggttgagttattcaggttttatatattaggttttaatggttttcaaaatgggcccaaaatcagtgatgtttttgttttttaatataagtaaattatcgtcgatgcacaaccgacgaaaaaaatcctatattcggtgctaaaaggtaggggtgttcaacaaaatttacaaaccgcccaacctgaataaaccgtccaaaccaaaacgaataaatcgacaaaaaatacaacccgaaattatacaatgaaaatttaaaccgcccaatgaatatattgggtggtttacaaattattctaaaccacccaattaacccgaataaaccgaa

SEQ ID NO: 17364 - DNA, 3469 bp, Cannabis sativa
  modified_base (937)..(937): a, c, t, g, unknown or other
tcatggagatgtttctgtacatattttaatggttattcaagaaagaggtgaaatatttcatcaattactgttgggaaaggcataaagaaagcttagtccttattgtgctgctgccttttgtctttttagtaccgtttagcataacggccattgaattgatacgtgattttgggtagaattgcctggaaattacatttggcagctttttctttcctttgcttgacccgtcttttatccataaatttgatattgaagatttcatgacgaaatttaggatgaatttacctaaagaggggttttgatacatatcttatctcttttgacattaagatgtttggtcaattttttatgattgttgttttattataattatctgtgaatttttaaaatattcttaataatttatggtgtatatagttgcggtaataattatttgaattttattttaattgctataaaatatttataatttttttgtgattttaaataattgcaatctacgtcattatataaaaatggactcaaattttttagaatgctaatacaggtgtttttttttttgaaaagtttttttattttttaaacttttttttttttgaagtttaaacattcttacttttttatttttattttttgcaaagagcaaaatttagagtttaattataaaacctgaatttttcaaaactattattatttatttaagggtaaatattattttgaattatatgtttttgtaaaagttatcaattagattatttattttgttaaatgatataatagatcttatattttttaaaataataaaaataagattctgagtataattttaataattttattttttaatataattaattttaaaataattttttaacatcaacagatatagaaaatgtaatcaattttatcataacatctttagattagattattattnagttttattttgacaaaaaattaattcaagatcctatttgtacagttatagaaaatacatagtctattttgttatttaacaaaataaaaaatctattttgttatttaataaaataaaaagtttaattaataacttttacaaaatacactatataaaatagtgtttaccaagatttgcaaatgggaaaggtaaagtagaatgagtgtatgtgtcataattttgagagtagcaaaaagcatccaatagggctactatcattgtctcagctttggcagcaaaatatatgtgttatagaatccaattctcattcactctttttcaatttgtttatatattcaaccgttacgtttttcaatgtattattactatttatcatatacttcttctttctcccttcaaaaaaagaaaatacttattctttcttaattaccgttacccttatcaccaggaaactacctccttttctttggtcaccttttcaattttcacttttctcctttcgaattcaccctaactctaccacccattgatattgttctctttaaataaatagtacaatactttacatgtcaagctaattttgatagtaatattactcctaaattattaatatacatttccttttttttttaacaaatatacaattcccttttatttcatttgttttctctttatctttcttaatttctagaggaaaagaatttgtggatcccacttaattttcccattattaattttttatcctgtttagaatgttggataattttgaaacaaataactaacaagtgaaggaattgccactctttaacaaaaaaaaaaaaaaccattttggtatttgtcaaaattaaaacttgcaaaaaaaaatattaaaacttgcaaaaaaaaatattaaaacttgttttcttcgccgcataattttgacaaaaatgtactttttaatcaaatattaaaaatatattaccaaaaagcatagatgggaaaggaaagaaaaggtaatctcacacaatcccatctgttattatgtaattttgtgccttaattaacatctctactaagtgagaaattatatttggggacccaatataattaaaccttttcttctttgtctcttacattggcggctcatattgcgccacgtgtccacattatatttatatattttctcaaagaagttaaggaagttacactttttaacacaaaaattatattaaaaaaaaaaagaaaaaaaaagtgaacaataatgaatgaagatgatgtaacggtcaagtgtgtaaacgaaaagtattataggttgggcaatgaggaaacaggcacgtgtgggctgttgctatcagatatataattatgccaattttattttatttatttgcaattacacccctcttcccagtccgtactgttctttccttcttaatccatgtatatatttcattccaacggtcatattttcccgacaccctccaacggtcatgtgggatcaggctttagtctccaccgtttgatcagaatctcgtggccacaacactactacacatcccttcttttcttcttcaacatccttttcactcggccatcatttttcaatgtctttgtaaatcaaatcagtctcactgaaccaagaaaggggaagaaagagaaagagaaagtgagagaaagtgatgatgaagacggccatgtaagtaagtagtagtagtagtagtagtgggaaatagtagtgcaagaagaatactatataaaaatacgggctttttatggtttatggtttctttgggtattgagtgctgagagggtttttatttattatcattgtttgtggctttcattggcttttttctttctccatgaacgtttgaaggggtttttcagagctgggattttttattctggttgaatttttcagccatggtggagttgatggatatttcaaatgctgatctgggtctttcattgctgagcctccttcgttttgagcatgtatgtttctacatttatgttcattgtgttagctcccttgtgaagaaaactaacattattttcctcctccaatgagtttgttttgaaggttttggaatccgatgatcttatttttataggttttaactcaaattctttcattcttttttggggttggggaatatttattttgcacattctgatattcatattctttattgcatacagtcacatatatataaacatatatacatataggaacactcaaaagacttgtctaaactctaaaccaaatttgtttgatttgttttttggcattactactcatcggattccttttttttttttcgtttttttattctcttctttctcttgaccaaaattaaaaacctaaactttaaaatcacacactcgatcacttatagtctttcctccctcttggtttctcttatgcacgttttcattcaaaggggttatgtgaaatcatagacattttttttacagaaaaaaccaaacttttgcttagtccttacgtttgtagaagcaaaacagagaacactaggaagagagttaaaagaa

SEQ ID NO: 17365 - DNA, 4342 bp, Cannabis sativa
tgggttatagtgtatatagttataagtgaaaaaaaaaatctttttctatcgaaaacagataggggcaaccgaaatggtcagtctatagtttgtcagtttccaaatactatagggttagatggcacattttattcttgccatgattatatgatactaagttctacaaatttgcctgtacatatatgcgcatataaatgtttttatgactgttgatattattataagcttattccttgacataaatgaatagatttgcttatgacattgtgcatatattctgaggagtgaggcgcaatctgcttgtgaagtagggaaggaatcatctatgctcattagttgataatggtgtatcaaatacctgaatgaagcaaattatgtagttgataatgctgcctttgaatagctaattatttatacccattttttctcttgggaaagattttgtttaggtttttaactatgaattttcattgttgtcgtcacgacgtattgttaatgttactaaactttaatgatggggttagtaagattaatttttcttaaacacaatctcaattctcaaatttaaccagcattgatgattgattgcatataattttaataagaaaaatagtcttgtttgacaaactaatgaatattgtattacacttgtaatgaattttactattatagttgatgtaatagtaagaatgataatgacaaaaacccaaagtctgtccaatccgatgatcacaaacatgatcacatcttttcctatacatatcctataaaaaataaataaaaaactaaactaagaacataatagggtatgctctgaactatttgacttcagtgcaagttgcttgcaaatcaatcaatattttagtctgcactcgaagaagctcgatctcaatctcgtacaatggaataggatattccttgtgttcgtggatagaagccaaatgactccactaccaacttcgacgtatttcagttctcaaatctgcacattttataaaacagagaagcaaaatcatgagtgttcttcaatgtaaaaaactgagtttcagctaaaacatcagtttaagaaatgtaggtaagtaagagttcttgctcgatttaatgatgggaatgagtatttgttcataaaattagtgagcttaccagcattgtgggcacattcaggaatacaaacgacaaggtgtataaggcaaaagatattgctgcacccgtgatcatgttgtggataagacgcttgtcgtctttactagggacaaatgctattttcagtgtatttgttaggtcaaaaagtctgtacgagatctgcaagaaaaaaaagtttgatatagtgagttaacagcagctttggctatgttcattattgcataatataaattttaacttacggcaacgtatatggatgttgtgagcatgaagttcaacattggataatttggtatcatggacagcaacaactttggctgaccatcgggaacacctgatctgtaagtatcaaataatatattacaaggatgtaaatatgtgatgatgtaaatctaatttataaagattcttaaaaactccagagacagaaggtttatatgtgttatgtttaggagaattgtctttctttctttttctttacaacccatcttttcatcttttttagtgagcatgtcaactgctgctataaaagtcagctatgtctacatttgtttatacagatttgaatttgcatgtaacctatgtatctagcaatgtaaggcatcaaatttagtttctatgaaataagaaacaccggcagtagcaaatgaattttaaaagaaaagaataccttaaccagatatggatttgtgaaatgtacgtctctagtgttattttcccgagccatctgataaacacgagagtgttaataattcatgaataattgaactacaatcttctcagaaaaagtacactaggttgttcgcagatgaagctttgaaactgtgatagatgagaaaatgaatcaactgaagtatgagatgacacttacgcaaacagggtcaaagaatagcatcgaaactgttgggtaacatttcgcaaacatatgtacaccctgatcaacacagatgaaataattagacagcagcttaggctttaaaatttgttatatcatttaggaaatgtatacatacgtgattggaatccatgaagtgtacggatgatatttattgtaggtaagcttgtccagcttgtatatatactcaaaccatagataccccatctacaaattcaaaggccagcacattagaactgaacatcaaagaattatgaatgtcaaattattagttaaaataccgttaaggctacaaaagtaatagcccctttgattgataatcttttcttcacgtcagcttcctccaatttctccatccacctttcaacctacaaaaaacaaagccggttagctgtgtgttcattccaacaggaccattactctagtacaatatgtattgcaatttagaaaaataaaatgtattagtctcatgaagcttacagttggatggtagtaagcatatatcattccaattatccatatgtatcggtcaaggcctgacctaaaataccactcacgcaatggggaatactgcaattttgctgctgggtctttataacctgcaagtttgaagggttttgatcagcgatctgcaacatttagacatacaaatcttcaagatgaagttactaaccaagaaggaaagttaatgggctccagatcaattcaaacactccaggtatttcccatactatgatgaccaccaagaagcaagagatgatttttatcgctatgactgaacccttctcattatgtttgttcagaataccaagagccccataaaccataagggtgaatagggtgtgcatggggcaaatgtagtacagcatgtaactgttgtttaggacaacgcagcaaaagaaaaccaagaaattaaggcgccacatcatctgttcaacaagaatagtataaacattagtttggagtacactacataactaaaacgattaatcttaagacttctatttgcatacctgtgcaaatcttgccatgctaaaatccttgcgcacatagtagtatgaaaagtttccaaatccagtcatccagacatatgcagcaataaatactctgattgcattatagatttctttggcagcaaagtaatggtacatcaaaaataagacctgtaagagaaaagttgtaagataactctccaaatattggacgtatacaatatcagaatacctacacaccgtatccgtattactcaataattttttacactctgacacaaaatatttttcttgattctggaatgacagaacaagctccaaaaagtaggtgtcactaatcaatgaaaattcctttcagcgtgcttatgatctcaagactatttatttggtatgggcaatacatgtttgaataaatagaaagcatgatatttgttgccaaaacaggacataagccctagagaaagagaaacaaacctgcatccaacctttccactcttcggtttgatgcctattcaaataaagtattgatttccctgttagcggtgacttgtcattatgtatcttgaaagaagtcattgctgaaactatgatgagaaggaagtatagaaacaggaaaatatcccgattgtaactctgcacaattagatgataaaccaagataaatctcatcagaacaaatgatcagatataaaaggagataaattttaaaataaacaatcacaatcatggggtgtaccataaaattttcaacaacacattgcagatttgtgaagcaaaatatgtttacaaatacaaattattatacatcttttgtagaaacttcatactaggaataacagaatattcaactatagcccttgaaaaatatatggtctggtataccagggtcagtaaactgagtatgcaagtagagttcacaaagcatcttcactatattgaaaattttcacaacaaacatggtccaataaatgttcaatgggtcatcctacaagttccaatgactaccttctctgatgagttgaagaagtctgtacgatcacacacataataatatactaaaaaggcaccgaattcagatctgcaagccacaacagaaagtgaatgattcaatatcaacaatctaaccacagaataaaaagtaattcgcaattggagtgatcgtacactctacttacattgctcgaagtgtcaatcgattttctaacaagaaactctcctccatcaaaaggaacctacacaaattttacaaacaacataagataacagaatgtgataaccacttcacacactcaagattttcaaaaacaaattc

SEQ ID NO: 17366 - DNA, 7983 bp, Cannabis sativa
  modified_base (4979)..(4980): a, c, t, g, unknown or other
ataaaaattgaatatttattgcattattaattatctatattttcattcttctaattatcaagtcatgctaaattattagtattaattaacatatgattattcattttatttcaagtggaattaaactttataatagtacaacaacatgtgtttatatgagttactaggttagaatagaagaacacgggccgtatagaatgctcttcttgttttatttaagaaaaaaaaaaaagaaatgaaatgaacggccaggatcgtactacacaatataatctgacaactgtcaatttatctaaatcgagattgaataaacttacttagaaagacatggtcccacaaatcaagttaatcaacaactaaaaaaattaagtaattatttttttttattttacaaaagtgggaccataatccacgtgtacgtatgcaatagaacggtaaaagggtcccaccatagccaaaacccctaaaaaccccaaaccaaagacctctcacttttcaaagttggtaagacacgaccaccttctcttcttttagcttctgtatcacacagtagagagagatagagataaagaggcctaaagaagcatgcaagccttgaaccatggcatattcttcactttccctcttcttccaacttctcttctagtctccaacccaactcttctttctccctgttgttctgatatccatggcggtctccgatgtcgactcagtgttgaagttcttaaggagaaacgggttttcagaggccgagtccgctctcaaagaggatatcgtcgaaaagggcgatctgggttcctctgattatgagaagtttttgtttcctatggtgccacctccgccgcctgttagaattccggcgacacaccggcgatctgatgcttctcgtggagatggctgctcgagatcgagctctgtttcttcggacgatgaatttgtgagcttgggttcttctacttcggatatttgttcttcaggtaattcaattttttaaaattcatattggtctgtgtttttctctattgaatctgtttctatttaagccaagaaaatgcgtactctggactgtaggagttcgtatattcttatgttttatccaaaattaatcatcgttatatacaaacacgacccttttgattatagatccaatctatgttaatcttagttgaatagaggtggaaaaaaattatatttttgacaatatttgacgcatgattcaaagactgtattttttttttccaattgaagtaaaaagctctatacctttataccaatacccttttagatatttatagaagtctgattacgttctaatttctctcttcagatcagaacaaaaactgaaaaaagtgcttcctaatgatatctcaatctatggctagcttttttttttttttgttgtttttgtttagttggaagcacattcgagcaagttattcctttccacttttgcagaattcactaatccgtatgggatccgatcagcgagcccggagaattcgaaatcctcatccgatgatgaattatctcaatttggcacagcacgagattaccatgattttgatatgcaaaatgatctgttttggtataacgagaaagatgatggcaacttcatgactccctctttcgaaggcccggacttctttggttgtcctagtgaggataagttcataatgacttcagacatggataggcagtgggagaacccattggatctgaataatcattctaaagaatttctatcagatataagtttatgccattctagtattgctacaactaaaaatgaaagtgaggaagttcttatagattgttatcatttaaacgaaagtaaaaagcatgaagcgggcatcgagggagatactaatgtttgtgaaaatcatgattgtgacctacccttttgcaatagagatataaaaggcagagagttttatggtgaaattcctacaaagaatgtgtatctaagtacagaacaagctgctgaggatagttttgatgtgaaggtttttgagaatattactcaaccggatattgactatgcccgatgtaaggcaaccgaaatgagtattgactacgctgctaaaatggaatccactaattttttggctgaagattttgatggtgatcctgatttacatgtcaaagttgcaaataaagatttcatgttcaatggaattaacaagtacgaagtggggaattttgaaatggatgaggaggataatgagcttaaagctgcaacgagctgtgaggatgttgctgctgatgagattttgatgtgcaacaccaatgaggatgaatatgaagtatttgaccttagaatcatacacagaaagaacaggtttgttgattctcttcttgttaaagtttgggttttgaattactggtgaagatgcaaagatactttcagaattatcggaagctattgccaattttatatgtgctggtatcctaggtttgtaacttgtgtatttgcacgatggtgtgttttcagttgtgctcacgtgttgtgccatctacaggaccggatttgaagaaaacaaggaactgcctattgtgctaaatgccgttattgctggcagatattatgtaactgaataccttggttcggctgctttcagcagagttgtccaagcacatgaccttcatacaggtgttgatgtttgcttgaagatcattaaaaacgacaaagatttttttgatcagagtttagatgaaattaaacttctgaagtttgtcaacaagaatgaccctgctgatgaacgccatatcttacgactttatgactacttctaccatcaagtaggtctcttagataaattaacacctgaatttggttatctcttttcattaggagataatgacatctatattaacctgtataagttacaaaatcaatcaccatgttaatgctttctgcctgaaaaacaattcataggagcatctcttcatcgtttgtgaacttcttcgagcaaacttgtatgagtttcagaaattcaatcaagaatctggtgaagaggcttactttacatcacgaagattgcaggtttgctttattacatttagtacttgtaatttttgtaatatatggtatttaccacttacacataatgctattaagagtagtgcactatcagttagaacaatttgttagaactaatacagctaacataaaactttatgatgtatttttcttcaggccataacccggcaatgtttagaggctttagatttcttgcacgatttgggaataattcactgtgatctaaaacccgagaatattcttatcaagagttacaagagatgtgaaataaaggtcattgatcttggaagtagttgcttccagacagacaatttgtgcctgtatgtacaatctcgttcctacagagctcctgaagtaatcctgggccttccttacaataacaagattgacttgtggtctctcggctgtatcttggctgagctatgttccggggaagtatgtctttgttttccttatcactttaaaacctttttaatttgtcaattcatgaaattgaaaatgatttatcagtaacctctgaattctgattatgacaagcaggtactgtttccaaacgatggagttgtcatgatccttgcacgcatgattgggatgcttggtcctatcgatctagaaatgttggagatggggcgagaatcgaacaagtacttctcagaagaatttgatctctattatataaacgaggttgaaatcccacatcccttccgtctaatcaataacaaacaaactattcgttaactataataaagatcagaaaaaagaaaacataaataagttcttgttaaactcttttctcagctcacatttcataagttgtcgtaggtttgggctgaacagattcagacccctagtttaatgttataaaaatatagttctccaactctgattcaaattaaaaaagatggagactatatgaagtagactaagtttttccttcatgaacttaccatggtgtattgttatgttttatcttcaggagactgaccaattagagtacataattcctgaggagtcctccttggagcatcaccttcgagtaaccgattctgggctaatggacttcatcagaagcttactagaaattaatccagagaggcgtccaacagcaaaagaggcactccaacatccatggctttcccacatatacctgcccagttcttgttgatttttcaaataatgggtctggttgatgtgctgatttatctcatcccgggcctagttgattcttattcacattggagtccgtactagaaataaaaggagtgcacatttccacttacaattttggtcttgtatacagtttttcattctaagttggtcttcttttcatattcaataaattgtttttttttcctgtacaaaatttgcatcatcgaattcaattaagttcatacgttttataaacactgaccaataaaaaagtaataccaaattggggttttttattattttagtacattgataactgttgaaaaaattaacgtctgttattacagaatgatttagtataatgcctttctatatacatttcaatgctaaattgccattttccaaaatttaactgtaattggttatttagcagtgattctccggctgttcatcagtttcatatggacacagataaataatgttgttgctgctaaagttattcagtagacgaagcacactgaagaataaattaatgaaaaggtggggtaaacagaaggccaaaaacactaaatacagcaattaccaattactaaatcttatcatggcttaacctaggctttgataatgggataaaaattatatttgatgtgattacataaaaaaaaaaattgagtgtgttttgtctaatattgcttatatgtaagtaatttttggagtttatgttacatgaaagtggttttcgtgtgtaatgcttgttgcatgttaaatttatcacgagagtagaaaattnncatgtaattgagattaatatatctgagaagactatacattaccttagtaaacttgctattgcatagaaattgatcataggaagataatcatattaggccataatcaatagaaacaattgaaatcgaagccctagtttttattaactgttaatttcctttatttatttgcttcttactagttttcttattttaattttctttcttaatttttattcaaccaaatagaagtaaaaatttaattttaagtacttaacttcaatccctgtagaatcaacctcactctttgtgagtttattacttgttaatgatacgtacacttgcgtgtgcaaaaataccacaacagacttctcagagaaactccttgaaaatggcccaggttgataaagtatcaacctaggcgctgggcccagcaccaggtcaacctaggcactaggtcctagttctgactctcagatgactttgtttgtttcccgaaaacactcaaatcttaattgttgatgaaaacggagaatatgccaactttattatcccaaagtttgcacatatgacatggcaattacacgtggcataaactagctagtctttactataataagggacctttgggtaggaatgtgcctgggagatcccatgtgagggcagggcccatgaactatggtttgccttccttagtgatttgcacggtattatctcacgatcaatacaactaaaagtggagttgaacctctataattgatgggtgttcttatttatttatttatttattatttttaactccttattggtgattgaccagtgattatttgactccgagtcagttggctattttttcaatcaacaaacttcatttgaattgctgatggaagtggcccaattcaaagggaaaaaggtccttatgccctggaggaaactaaacgccctagggactttgggcgaaattcatgcctagtaggcccaaccgtttcccaaataaggctacctcccattagactgaatgatgaaaaaatcctccttgaaaggggatatggtgggaccaaccagatctaagaccttccagggatggaggaagggggaagatatcccacccacgcaaggccacagtagatctcacagtggagaatcttaccccaatgaggatggtgccactaaccaccctattgatgagctcaataactagagaactcattataatactgagtgcaataacgacgttcctccctagaatgctcaaacacattctgaccccaaggccaagggattctgtgtttgataggatgggcccccgagtagaagaagatctttggactaacttaaattgaagaagaaataattaggacaaatacgtctcgacgcaaaataatccaccaagggcacatgataggccaacttatgcctaaccgtacaaccaacttcctatctacccaagagaagagttggccggacaaaggacaactagacttgatcctgcagtgcaagcatagttaaatgaactcaagaggcttgtacaaggcatgtccaccctaaagctttaaaacttggaacttgacagggctcaagtattacctttctctgcgcgcattaacgcgttacccttaccaaccaagtttaagatgccaactttgaaatgtatactgggaaagaggatcctttggcccatatcaaatactttgagatcttgatggatctataaggggtgatagatgatgttcgttgcaggatttttccagcaacattgtctaacaccgcacatcaatggtattttaagctatccctaagaaaatttgatcccttggatgctttcactgttgagttttacacttagttctcatcctccaaacagataacttcccaattagaggacttggttgaaatacagtaagggtcgggagaacctttgaaagactatatccaaaggttcatgaatgaggccataaaggtcaaaggcctgacggaagaaaggtggtatacaaccatactaggaggtatcctacccctaagtgcccattagaggacattaggaaaagatcaacaaataatatgcgagaatttttagatcgggctgaaggttttataaaacttgaagaagctgcccggtaggtgtaaattagcgggcagaaaataacctctcccagtaacacacctacaacagttggaccagtaatactacccagccctaaactaacaacagtaatggaaggaaacaaaacaataatagttctgaccaaggaaatggcaggaaagagaaatttaataatctcgctccttgcacagcaccctcgggaaaggaggagaagttcacatacttcttcatcttgatatacaatcctgataccatacacaggtcggtgttccgtacaagaagcccccttcgatgaaaaaagacattagtaagagggatctaaccaagttttgccgatttcacaaagattttggccattacactaatgagtgtaggaacttgaaggaagagatcgagttcttgataagaaggaacaatccccatgtaagtcggtatgtccaagctgaccaaaaccaagaataggtccaacaaaacaatgaccttttgcctccaccaattactggacatttataggtcatcatcggaggaccccacatttctggggattcaaataacagatatgctggaactctttgacacaagaaaggaaacaaagtcctagctatagaggaaagaaatatgaaatagccaaagataaaagagcccaccatcacctttgttgaagaagatgctgctcatgtcaggtttcctcataatgaccctctagtcataagcacacaaataaggaatatgatggtagcacgctgcatggtgaatgatagggcctcctccaacatcatcttcaagactgtgtaaaaaaggatgggacttcatctgaaagacctgacaccctgtacacagcacatgtacgagttcttaggccaaggattacaagattcacaataaaattgcgcgcctactgttgaatctcttggccattgtca

SEQ ID NO: 17367 - DNA, 3951 bp, Cannabis sativa
ttacattgtttcagaaatttatatttagaatgttaaataacatacatggtagtaaatctaaatcctggtaaaaataattccaacaataagttggttaaggtccaggtggttatggaagatatgcagtttgtgcattgtaaggttaaaatggtaggcttcaaggatgatttctttattacagctgtgtatggaagtaattctttaattgagaggaaggatctttggaacaaacttgcaagttttggtaacttgtcgaaaccttggatcattataagaaacattaatgccatgttcttctataaggatagatatggaggtagacaagtaaaagcttcaaaaattcaatatgctcatgattggctcgctttgagtcaagttgatgagctaaaaagtttgggggcttactttacttgttctaataaaatgaagtgggtgtgagaatctacttgaaacttgacagagttttctctaatgaggcctggttagatgtattcctgaacactaaagcttggtacaactgggagctattttagatcatagttattgtcttattaagcttgttgaaagtaataattctggtccaagatcgtttagatttttcaattattgcgcgttcaaagaaggatttaaagagatagttctcacaaggtggatggactctaaggaaactaacctctttaacattattaagaaactttaaagctgagaagggatgtgtaacaactcattacacgaaagcaaatgaggcttctaacaaggcccaaaaaggtcttgctatcaacttgaattgccctgttatgactcaaaatgagaaggtaatgtatcagagatacgtttccaataaaaagcagtatatcagctatcttcaccagcattcgaaaataacctggttgagatatggggatgaaaattctagctatttccatgccatcatgaaaaaaaagaaaatcaaataataaaatcgtggcttacaagaatgatgacactatagttgaggactatcccaaattggttgagaattgtttcaacatttttgcatctttatggggaagaaaagctcagctacaagaaggattgaagagaacagtttggatgatgggaggaaactgaatttactgcaacaggtttaattgattcgacctttcaataaagctgatgtcaagaaggctttgtttagtatccacacctccaagagtcagggtctagatggatttggttctggcttttttaaagaattatggaatgagatcggagaggttgtttctcacgcaattttgggattttttcaaaatggtagccttccaaatgaacttaatgagactaccatttctcttatacacaagaaagatagtcctaagaatgtgagtgattatagactgattgtctgctgcaacacactctataaatgcatctcaaagatgatttatgtgagaatctcagaggtgctgccgagcctggttcatgacaactaatgtgcatttattaaaagtagacagtcgacccataatatcttaattttccaagacctcttaagaggctacacaaggaagaatatttctgctagaagtatattcaagattgatctgagcaaggcatatgacacttttcattggggttttatctttgacttgcttaaggaccttcgcattccttccaagttaatttctttgattttaagttgcatccatggtgcttcttatgtcattatgatgaataggcaattacatggctcttttaaaggggagaaaggtcttcgccaaggggacccgatatctcctctcttatttgtattaactacggagtatctgacaagattgttgattaaaacgtccaaattgaagggcttcaggtttcactccctttgtaggtctttaaaactagtgaacctttgttttgcgaatgacttgatcattttttgcaagggaaatgaaagatctattggtcatgtcctagaggcttttaaaaccttttgtgactacaggtcttattgccaataaatccaagtctatggcctactttggtggtgtgaaagatgactacaaaactcaaatttggagttgatctagatggaagagggtagttttctcctcaattctttgggagttcatcttagaccaaaaaaatagtgagcctctgattgtggtgtcattcttgacaaaattcatatgaaacttcataactaggctagtaggaacttatcttttgctagaagggcgcaactgattcacttagtcctcttggggattagaaatttttggatgaacttgttcattctcccttaaaaagtctttgtagccatcgataaatgttgtagggactttcttttggagacaaaaggaaactaaagcaaaatgcatctctcttcttgggacaaagtttgtctccccaagaattatggcgacattagttttcaagaaggaaaatggaataaagccttaatggctaaatttgtttaggccattttgagtaagcatgacaatctctaggtctggtgggtgaatgctatctatttaaaaggacaagatttttggcatatagcgttcaaatatgatgcgagctagtatttcaagaaacttttacggctaagagacacaattgttattagggatataaccaatccttgtcaaaaaggtatattcaaagctaaatctttttacattttgactacttctatacaaaaagtggattatgctacaagagtttggcataaattgagtgttcctaaacatagatttatatgttggcaagcaacaaataaccagctattgaccagagatcatataagtaagttgttgttgattccttcttatctctccctggtttgtgataattccaaagagactcattctcatctctttatggactcccttgtcaccattaaagtagtttctgaagtaagcaaatagttgggtggtctcgcgtggctaaaaagcttcaaggactggtttgattggttgttaactcatctaaaaaatttacaagataaaatgatcaatgctttcttctcagccatagtgtagaaatatttgtatgtttgaattgagttgtaaaattgttgctagtatcagcttggagattaaaaaaactatcaagtttagagtcttcaactctgctgttagtggtaaaaacaagttagattcgtatatctataatgtaatagcaagttggtagggtccttgttggtggttggcttgttatagtagttggctttgtttgatcattgttagttcattttgaataaagatttcttcttgttcaaaaaaagaatatatatatacactcactcacaaccttaagtatagattggtggggatcaccatgacttgaacaaggtataacatctttgtcaaaaaacttattttccctatctctaaccaccaagagaaatgaaataactttgagaattatcaagtcttgtattttctagcaagtgcttgttgatagaaaacttagttacacaaatgagcacatttgacctccttatatagcgtttagaattcacatttgatatcacacatctcgatggatgttaccagccgaaataggacattaaatggacatataaacgttgggtttgacactagaaattcccccattaaagtcccaatattttgcaatattttctcaaaaaatagctcaaggtgacatgtcgcctgacactaggcaacatgttgcctggaggaacaccctcaaaccacatgtcgataaaacatcactaaaatatcaaaaaactttcatttagtaaagtaggcgacatgtcaccgagtgcttgggcgacatgtcacttgggcctgtttctattcacaaactttggttttcaaaatttctctttgatccaactcttcatccaatattcgaaaactaaatatttgacagtttcaaatttttggaaacatctccatttgattttctaactaccatatacaattactaactcaattttatctttat

SEQ ID NO: 17368 - DNA, 5370 bp, Cannabis sativa
gggggggggggggaattgctgctggtgtgagatggaacagaagcagggacagcagtgtggaaaaattgatctaaatgatcctgagtagtattatttgggaaatgggaatattgtctcatgaaaaacaacatctctggattgaaaaatctgatttgttgccaagtctaataaggtgtaagccttcataccagaagggtagccaagaaatatgcaactcttggctcgaggagcaaatttatgtcttgctctattgagggtggaggcatatgcaagacaaccaaaagttttgaggtgatgataggatgattgttaattgtgtaataactcataagcagttttcttgtttaaaattttagatggaattctattgattaagtaggtggaagtttgtatggaaaatggccaataaactaaggcaacttgagattgaaataatagtgcccgagccacattaagaatgtgttgatactttctttccacaactgaattatgttgtggggtatcaacacatgaattataatgcattatgcctgcattagtatagaaagaaatgatgttgaattctttagcattttcagtttttatagcttttatctttgcaccaaactgagtcagaatacttttgtaaaatgcagggatgatagtttgaacctctgatttagttttcatcatatgtatccaggtgtatcttgacttatcctcaactatggtgaggagatatccatacccttcaagactaggaagatgaacgggtccccaaacatccatgtgcaataaatccaatagattggcagaaaaattattgtgtgaaataaatggttgtttcttttgttttgcttcatgataggtagaacaatggaataaaggctgctgatgaaaagaaaagacaatctctttattaattcctgttgaaattgttacagatggatgactaaggcgattgttccataggtcattcttttgaactatattattgacagtacatgtatgattaagtagagatgttgaaccaattgtgattggagaatgcttcaagatgtaaagcctgccaatctttctagccatcccaaccttcgaagtcattaggtgtccctgaataaaatagtgagtgttagtaaagaggactaaattattgtgatcctcaaggtaggaagtaacagagaacagattgcacttgaaggagggtacataaagcacattggtgagttttaggtgctggtttatataaacggtacccgaattaacaataggaattaagcaaccattaggtaacacaacatgtttaggatgatgattattattgaaatgaaaaaaatgcttagaatcaaaacaaatgtggtgagtagcaccactgtaaacaatccaaaaaagagaagatggagggacattaccagtgaggttagtagcagcaacaaccgaggtagtgttagatttggagttttgttggtggatttgttgactcaagaaagaaatcagttgttgataatgagtagtaagatcaggtggttgtgtagacaaggctggattaggttcagtgcacagagaaggtgcagaaattgaaccttgagaagagcttgtttggtgtgcctgaggattggatttagatttgtctgatttggatttatcaccataaccagggggaaatccatgaacaaaataacatttatcaacaagatggccaggcttgtgacaatgagagcaagaaggtcttggtttcttgcttcttggagggtttgaaggctgagtagcagcagccatgggaggacgacctgatccgagagtccttaggcgttcttcttgaacaaccattgaaaaaactttggaaatggaaggcaaaggttcaataagcaagatttgcgctcttaccgaattgtaggattcgttgaggccagtgaggaattggagtacttgatccatgttgtagaaatcttgaaggcgttgaagagcaccacaagtacagttggctatgggttggaattccttcagttcgtcccatagggattgaagcttggtgaagtaagagctgatggattgatctccttgctaaatgctatggagttcggcctttaattgaaagatgcgaggaccattcccttcgttgaaccgatcgatcaagtcattccacattttagatgcaagattgaagaaaactatacgttgggaaatttctagcgaaacagagtgaagaagtcaggaaattaccatgttattgcacctggtccaagaacagaaagcatgatcagaaggtattggttttggaagactgccatcaagaaaggcagtcttgtttttggcagcaaaagccatagaaatagctcgacgccaggactggaaattaggtcctgtgagaggagcagatacaagcacaagcccaggatgatctccagtgctcagaaaatatggactggataagtcctcatgagcaggtcgatccctgttttccattgaagcttgttgaatcggagcagaggtgatttcaggatttggaatgggatcggaagtagtatcgccattatcctcattacactaatacaaaagaccctatttgcgtcggtcaacgcgtcacactataatggttgaccgaggcaaaaaatagagggaggttttatgctttatagtataactgaagttaaaaaaaaaaaaaaagaattagcatcaactcgttccccgacgctaaaagaagaaccgaggaaaaaggtgaaaattttaaaaattatctttctctcttgtgaaactatctttctctctcgtttgaatagagcatcaaggttcttcttgtttttgggctgttgtatataggcggttgggtttttgaactgttctttcttaatcttcctgtgctaccttagtttggtagaagaagttcctgtagggtttatttttttgaggcagtccctttaggttgcgtctagttgggttctgatctatatacttgcttttttgaatttgtgatttcatttagcgaaaatgcactccagtttggttaatttatatggaaatctgaagggaaaaagaagttttctttatatttttgagataaactcatacattgtaattttttttgttggcattttgaatacgaagagagtaacaaatgtgtttttttaataataagcataacgtgtaaaagggggaaaaaagatgtgggcatagtggcatttgaatcaacaagctcagggattgagaatttctgtagggttctctggttttaatggttgacaatgacatgttaattttcactcttctttttgttgtgttcaggttgtggctataacagttttcttcttgctatatgtggcatattatgccttcttttcttcattccttggaaattatatttaccaatatgcagctattggtgtttattatttcttggtatgctatttatactcttttaactcatgctttcctgctcagtataatattgactacgtgtgttcatccctttccattaatagatggcaggcaagacaatctttagaagtacatgtgaggggttctgttgataattggtagtttttggttgaggtttgtaattaccatcgtggtttcattttggtgtgttttgaatacatgttttcttttgcagcatgataatcaatatttcacctccctaagaaaaaaaaataacacaaagattttaaagagaaattgattgcatgattcaagaaaatacaatattattactgccgatccaagtgttgtacatggctccatccattgagggtggtagaactatggacaagaaatcaagttttgttcttgaaaaacagaacaatagacatgactctgctccaatttaaagaaatattaggattggggtttcactctaaaactaagtggtgataaattaagttactttatatttctcatatatttttcatgtaaaacataaatgtactacttgtataattgtttaaaagtgaaatgctatagatactgaaagcacatagtaacaatttgctctgaataagggatgagttgtgatattttgaactatgaccctttaatagcaaatcatgtctcttatacgtaataatttaatggccgattataattgagattaagttacagaaattatggtatctaggatgtaagactacaacataatgtcgtattgaaatttaaaaaaactatatatataactataggattttttgttagcgtaaggtatttacttcagtttttaccagctttgaatttatctcagtaatgttattggtgggatgtagaaccttataatagtattcaattaataatttatcaagatgattcagtctttttctttttactttttgataaatttagttgtgttcatattaaaaatagcaggagaagaattttatttatgagtaataataatgaagatagtgaaaattggtaggtaattataatttggttatattttccttttggcagagcaaccaggtgtccttcaagttgtcccaaacaggaaaatggaactgcattcaggtaaagggatgttgcactaaagaaagaactttcatggtttaagaaaacaagttataaggctaaatatattactatatgtgtatgtgtggatctgattaattatgacatttaatcttacatcttgaataataattaaataagttgtttagttgaggttcttttagttacttgagcagtaccaactagtgttgtacattcgggttgtgctattcgggttcattttttgtgattgttatggctataaataattattttttacttcagacaagcttggtccgtgcagtggtacaagaatgtggcacccttataattgttattaggtattgtcttcatctctagttggcaatggcttctaaggttttgttttgttcctcttagcatctgaattattaatcttcatagaaatgtaaattttagccaccaaaataggcttccacattgtaaattttcagtaaactattcatactttctcaatgattacacatttgcatgtcaaagaatactagaaataagacaacattgcatgaattcatctccttgtatccataaatcagtgaaaacatagatgtatatttgtatttctgaaatcatggttatgtttttagaattattgttgcggtattaaaataaaataggctaattccatttagccaactatatgatagaaaaatcatataatgaacaagaattcttgcctcagagtatcctgtttttattgtgtataaaccagaactgaaattagtttattagattgtgtaaatttgacttagatgtgatttaagtacacaagatcaacatgttcactgatgggtagctctaccttgaacaacttttcctctttgtatctatgcgttatagatcattcaccatgcatggtgttatattaccttttttttt

SEQ ID NO: 17369 - DNA, 3412 bp, Cannabis sativa
gtaaaataatttccaacattaaactcacttaatctgtcaaaagtcagtagttccatcttatcactcatcagatgaatttttaaaaaatctactgttagctagttataacagtttactttgacgccaacttaaagaaaaccccacaccaacatctataagtaggagtgtctctactctctcaagacaatctccaatgctcatactttagattttagagttaagtttagagagagaaagtccaagatagtatagagagaaagtccaagatcacagtaagtggtgtgaatggatgtaatgggagtatcactcttaaagtaatttttttttcttattgtgagacatttatttgtaattcttcattgtgttgagttgtattcttggacatatctcattatgtactagtgactattcaatcaataaagattcatgattcaattattctcgagctaattaaatttattcttatctattttcatttaagttctagtttttattttgtaattaattctaatttgaattatgttttcttgaacattattaccgctgtgtaacaagaaggaaagcatataattaagttttgatgtattctatcaaaattttgaatatatgcatgtgcttcatttcatgatgcatgccgatataaaaaccctatggtccccgagacaaaaacaagacctgaaaaaacagtaaaaaaatgttaattggtaattattggtttggagcccactgaggctgtgaaccctctttccaaggtggattttttaaccaatagctataagctgtagcccaaaaccaaccaataggttgaggataaggtgccacataggataaacaagaccaagaaaacttgaaaacagaagagataatatccattatcgttacactacctacaaaatgctgagcactagtaccatgcatatatatacaaaaaattataatgaaaaataagagagacacataacaaaagtagtgaagatgggttgcaacgctttattagtcttaagaagcccaaaaaaagaagaacaacaagtcccaattgctactaccactgacttgtccgagggcaaagatagtaatttgaagagtgaagatgttgatataatggaagatttggagagaattttgggcattaatgaagaagctgaagaagttcataataagttgactaattataagggtaattatgttagtcaacttaactgggaattcatggaatggaataagtttcccaataatattggagatcaagaagtagctgaagaagatgatgaagaagaagaagtgttattatcagagcagaagaatatgtcattattaattgacaaggattattatgaaaaaaattacaagtgcttttttgaagaagatgatgatgaagaagaagaatatttagaagaagagaataatgatgatcaagaaagacactatagaaagggtgataataatctaaataccattaagaaagaggaagttgggttttcatgggatgatcatgattattataataagaataataataagggttcgctgaatcttaatctgagtttgaattatcaagaggttttggaagcttggtcagatcgtggctctctttgggctgatgagtactctctttcaatggcatcatcaaatggctctaataactatgttagtattcattaattatttaaagctcttgtcttttcttaatactttcttatatcatgcatgcatgcataaatatttagattattattagtcattaattagtttaatacatattttcatcttataaatatattagtcatgagtaaaacttgtgtgtgtatatatatatgtgtgtgtgtgtaaatggattagatgggagaagtaccagttttaatggaagaagaaaaaagaagaagggaagctagtgttcttaggtacaaggagaagcgccagactagactcttctccaaaaagataagatatcaagttcgcaaactcaatgcagataaaagaccaaggctcaaggtaattaattttcttttttctcctcttcacttcttttatttgataaaatatatatatatttaaaattattttaactatattataattgcatttgcatgcagggtcgttttgtgaaaagagtttaattaaagtgaattgtgctgatacaagggtatgaatgaaatatctatttagtatccaaaaatatctcactccaccagtatatggactttttctcttacataatcaaaatatctttttagttacatatgtatatagatatttatatatgtagctacttgtggaattatgttttcagtcgctttattaaatttgtttatttgttcagggcactatatgatttttcccttgaaaggtccatatcttgaattatttatgttgtttcacaatctatatataataattttagggcacatgacctttatacgtatgcacttgcacatgtaatatttaatccagcggttaacttttaaggataattataaattccacggttaattatttaatttcttaagtggaaattaagtggtcctcccctgtcatatgtatctatctatatattgatattgtttaggtaaatatatatgaatattttggtttattatgggcctctttatagtgtagtgtaattatgtgtactcagctgaaagtggtagaagtttgtatcaggactcaggaggaggctgtccataatgtgatggggtgagaagtggtccacagccctctccatcttagtcaaccaatattcttcctcattatatatatttataaaataaaaccacatccaatgaataaagatatagatacacatattgtcttagtccaaattgcaggtgattaacataatttttttttcaattttaagtattaataaatatatcttacactctctctctctctctctctttgagataaaaccgtttataaataaattaaactagacctcacagtcgttacaaataatgttcgatggaatggttgacaggtcaaccatgcaagtaatcttgttggcgtaagcccacttaaccacattatgagctacaaagttacaagatttggaaatgaatgaaaaattacaactaaaaataaactagagagcttattacaatgctgaacatagttataacaataccccaattagaacaagtcataatctgccttctccatggccaactgataagccgaagcttcgccaattagaggatcagtgaaattttagcattgttagtggccacccacaaaatagaacccgtgtgatccctagccaagccaaggccactccgcacatagaacaacaaccaactttcacatcacaattgattttaatccactcttccagaggaggggtccaaccatgaggaataacatcatcaggcaaggaaaacaaaccagacccgtaatctgtgtaaccgaaagtgat

SEQ ID NO: 17370 - DNA, 7171 bp, Cannabis sativa
acaaatcatcgcttaacatcattacgtgtttgtgttttatgtaacgctgcagtccaaggaatcccacaatgttaggatgcattgctgcatccactttgttgaggaaagctgcttcacatgcatttaatgtcaaaaaaagatcaactctaactactgatatcattgagtatttaggaagaaggtaaaagtctctccttgctaaagaaaataaaaagtaaaaaagtcgcgcatgctcgtcttgagcacacaccctaatgcctttttcttttctttttggcagtttggacgatatcagtccagttagttgatgtgttgagtgctgaaatgctagttttgcttgttctcctcttccagtgctgagttttatgttgtaaaaagaaaagaagctcactcataaatgccacataagtgtttggttgctaagggccattggccaatgatggtttgatttattgccattggctacagcacgtttctctacagtttaaaacatgttcatttgcttaagttttaaatagaaaataccaaagggcacagtattggtgtcaagtgtgaacaccacatattgacagagtttggataaaattgagtggacatatgtagcaccatatttgcatatacacatattaagcttcaggccgacattataggcagtagagagttaagacctcgtattattgtacctccaaaaaagatatcaaagaaaggcctatatttttaatattattattagtttcttctccttatggtttatacacacaatctttctttttaggccacatgaaagcatcttctgccgacactagaaagtagaaagtagaaagccatctctttcacgaccaccactactactactaccaggattttaaacaaagtgacgtggccattttggagaacaaattattcttctagagcaattatttagtgttaaaccctttcctctagaactacatctgagattttatttgaaaaagaaaaaaaaaaaacatgtgagaaggtgtttggctgaaataacattagcaaaagcaaatcaatcataacacaagaaaagacaggttaaacaaaagacgatttgatgttgaaaaagaaaaaaaaagaattgacataaatagagaaagctataatcttacatctaatgtgaagatagacataactatctacagtaccaagcacctttgaaggatttttttatcatgtattaccaccaataagaacaagcactgtgtatctctcccgctgagaattaaagtgtttaattgatattgtattcaagacaaataactattgactgttgacccaccctgcaactatgatatatagtgaaaattcacaactctttcagctgtatactccaagccaaacaaaccctgttccactcaagaatcattggggggttgttgttgatgtggccatgttggctgattcatgtaaggacgagcctgttgttgcccgtacacagcttgatccatcacaggctttccaaccatcatacctgggggagcaacctggggagcagcatagtagtaagggacaccatcagctggaccagcaacagggaggctccctctaggaactgaagcaagcacttcgtctttcagatcctccctcgggacaatatcaaccagaaaatcgaatatatcagtccttgtgattgcagctgcaatgtcattcttttgaagcgttcgccttttgttctcctctgtgtgattccaagaacgaagtgttaactctagaatgaacatctcgcacgccctggcaaatatgactggagcttcagctgatatcatcctcacatcttcatcagccttcatgattttcttgatccgagccaaaggcaaactatggttcttgaaatcactagactgctcaatctcttgatattgatttgcccagaaagtcctgagttgttgctgcagctgctcttgttgctgctgatggatatgctgataagcaagttggtgttgggcgagctgaggtgaagcagacgggcctgctgattgagtaggactctgcaataacccaactgatccacccgaagatggccccatcattttgttagattgataagggtttacgccatacgcttgattaccagtcatcgctgtgcgctgcccatgtccatgcccttgttgatccataactataaagctagtttaaaagttcccttatgtcacccttcttttactgaaattaaagagagaaaaaaaagaacaccttcaaatctaaaccataaagtacttcaaaaagatagaaaactaaaccctggagtaagttgtaatcaatttcaataagtagttctactttttaatccacgatatgttaggcaagatcaaaaatcagaaggattagtaaagggaaacataatatacccaattcttaaacaactcaagtaaatcgtaactgtatattcctctcatcttctccagcagtataagaaacaagtttatagatcatgagctctaaaatacagtgctaatgaaaaaccaacttatagtaaaagtctagagaagaaaaaagaaaactaaggaggctttcaaacccagctagcaagctatatagccatgatagtctaaaccaaacacagcctttaataaatcagcagctagaaactaacaagaatagaagagacttgcaaattattcaataactttaacttgtattcgcacaactttcttaggctctataagctaaccgggtcaactcataactctatgctcaccaactcagtgagtcatcttagataaacaacaccaccaaccccataaccataatctgggttttgacctctttcccgtaaacacatattcatatacctactttttagcaaacacatagtaaaatacaaccaatttatcatcacactaccaaacttcccctgaaaagaacagaagaagaaaataaatccaagaaaaagaaaactttttaaaaacaaaaaggcgatctcccctcctgagagtttaaaattccaataatttaaaataacataataataaaaataaaaaaaaagtgatctttcaacacagcaaggaaatttaggtcgaacatatataaatatagtacctttaagtcgatttctgacttaaaattctgagtgttcttcaaccaaccaagagaaccctaaaaaggatcagagaagaagagagaaagttgggaaatagaaagagaaaaagaaaataaagtttgagagaatattgggtataaatttgaagcataaagcatgaatatatgtatatattgttgggcaaagagtattatggcatatatttagaaaattaatgaaagagttgggttgggtggaaggtgggaagagtggaagcaaagagagagagagagagagagagtgggagttttaatgtgagcttaaggaaggacttcctttggtaatggttccactaagaaaaagcgccagttgaattttagttggttctctcaactattataactttccctttgacttttttctccttccaacccaatatttttattattattattttgtttgagaaatcaccttatgacaatcatttaattgtccaactaaactaaagatatataaaattagaatatgagttactacaagcaaaataatttatataagatcaaattatcttaaaaatttagacaaagcaacttgagattatttttaagaggcatccaacataaccaaccaattagcacactatataatgataatattacaaatttttaaattaaagataaaacacaattattattttgagaagaaaacttatctttgaagctttttttactcagcgtgtcaccattatatagaaactaatttgttatgtctaattattagagcaaaatcttctaaggtaaaaatatactaatcaattaaacctacactatacataaaatttgagagattaattaaatttaataaattaattctcaattaaaattaactattttgccaaaaaacaaacacaattaactaacaaaaatgataaaacaagagagaaaatttctcaaaattattagatataattaaaagtaaatttaaaacttatttgtgaaaatttttagtagcaccctttgaggttgtattcactatcaaacgagtcaacaacatacaataaaatagccaaataatatgatacaaaatattcaaaaaaaaaaaaaaatggtacaaactagccaaaaaatatggcacaaactaacaataataataattatgaatgttattaatattaatcaagcaatattaataaaagataattgactaaaaaatacaaaataaaattaaataatattaaacaaacaattcttttttaaaattctaccataaataaatctctctgtacttaaaaagcaatatttttattattttttttaatatatattcaagtgtattttatattcacaactcaatacctattataagatcgtttttatttaaatatagtgtcaaatttaacacaaaaatatttaagcaaaaaacacaaaacaaaaaaaaaaaaaaagaaatgttatatttcactcaatattttaattgtattccaatacgtaaattcttataacaaatatcattaacgatcattaatcaaattaaatattttaaaaattgattaataataacattataattaaaaaaatatgcattaaaacttataattagtgattaataacaaaactataagtataaaattgtatgtgttgtatagaatgacagaacaaggcaaaatagagagagagaaaagaaccagagaaagaatgcaaaagcttgaattgtattgaatcaggactaagccttttatacacagagtacacacaagatgaataaaagaaaacatcttaactaccttaacagaattaactgaaatattaactaaaaacagaaatcagttaatactgtttacatcccccctcaaacgaaaaggggtattaaccattttgagtttggacttaaggtagataaacctatctatagacaaaggcttagtaagtaagtctgccacttgatcaatgcttggtacaaaatgaacagataaatgcttggccagaataagatcccgaacaaaatgtaagtcaatttcaatatgcttagaacgagcatggaagaccggattagctgcaagagcagcagcactctggttatcaacccagataatagggaattgagaacaagtgatgtgcaatttagatagcaaagagacaatccatttgatttcagctgcagtattggccaaagagcacggagaactctcactttttcagtgctggagacctagcaacgacctgttgctttttagctgaccagctaatcaaactatcacccaaatataccagatatcccctagttgaacgtctgtcatcaatgcacgaagcccagtcgacatcagaatagctggtgacagtgagagatgttgctggtttgatcaataatccttctgagatggtacctttaagataccttaacaaatgtttacaggcaagggatgcttggttgccaagtatccttcttgacgtgatgccagaaacaacgagatcaaattcgggaccaaggctatttagaacttgtaacacaagatcttgatcatctattggtgaaccagctatggcaagagagtcggcaagactttgaaccttatcgatgaactcagaaatggagaggccacctttctggacatgagaaaactgacctttgagctgaagacgacgagccttcgtttgagaagtgaacttatgttcaagggcacgccagacagagtgagatgtagtatagtttgcaacggatgcaacaacagattcagacatcgatgagcggagccaagatagcaggagttagtctttctttcgccattgaatgtatacagggtttggagtgttgtcaacgagatgttgaggtgggggaactcctgtgaacaagatctcatcgagatcgtggtcaatgacagtaggggtgacttgagatttccatgacagaaaatttgcacgattgagtttaactgtgagggaagaagacaacgagtttaagaatggattccaagatccattggcagcggattgtacggcaggggcctgaggatcggaggttgacgacgacatagtcttgagtcaagacttctgataccatatagaatgacagaacaaggcaaaacagagagagagagagaaaagaaccagagaaagaatgcaaaagcttgaattgtattgaataaggactaagccttttatatacagagtacacacaagatgaatgaaagaaaacaacttaactaccttaacagaattaactgaaatattaactaaaaacagaaatcagttaatactgtttacatgttgctctgaatctgatacaatactacatttcggctcaaatttagtacattgtttgagaactaatttcttgaaaaaatactaaaatatagtagtacattattattttagcatttcattaaaaatgctcttagagatatcttttattaatggatttttgttttgagtttgttgtatctatatatttttttttataaattatttttgtgtttagaaataattgtgtaactactgtgtaattattaccttcagatacagtgtttattaagatgtcaaataataattacatataagttctcattttcatgtttgacaataaattattaattatatacaaaaataatattaatcatggaccaaaatagtaatattttatgattatatgatgtattatttatatatggggtaaagctatatttgaagatgaaggtcgttggctcattagtgatggaactaatgttttcatccatcatgattggtggatccctaatttggatggtaataagtctttctctccttgttgcttacgtgatgatgctactgttaaggatcttttgatgtctaatgggtgttggaatgcatctctagttaagagctctttctctccgcatgaggcaagtgctattcttgccatacctagggacaatatccctatgtatgataatatggtttgacattttcagagatcaggtctttactcagtcctgagtgggtattggaatactatacgtattcttggcattgggcaaggctctagttctaagggtaattctgtcttatggaataaagtttggtaattacatctccctatgaagatcaagcattttctatagaaggcttgttggattaaaatcctattgtggatacatat

SEQ ID NO: 17371 - DNA, 6522 bp, Cannabis sativa
  modified_base (5765)..(5803): a, c, t, g, unknown or other
aaattacatattaatataaaatgtatttgaaagtaataatatttaaaaaaaaaaattggaaaatgtcattttcttatgtaaaaacaaaaacacaaaaaacttttatgaaaagatcaaatttttttaatctaatcttttcaataaagtattgaactttatatcaagataataccaactcacacaatatcatccaaaaaaaaaattataataattaattaagaacatattattaataatataaatatatataattagctaattacccgtaaagatgcttttttgtttggcgtaggaggagtactatgttgttgttgttgatgatgttgaggaataatatgattggaattataagatgaattattattattattattaatattattaatatttgttgatgatgatgatgagtccactaatcgatactcatgcataatccaattagttttaacacctttaggtggtttccctccatagaaaaccaaagcctttttaacaccaaccttttcatgacacccattagagctcataataggtttatcggttcccgtcgctttccaataccctgatgttgctgctcggttcggccttgccccatttggatacttccgatctctcggactaaagaaataccactcttgttctccaaaactcgctttacctataaaaaaataaattaataaattaaattatatttttatctgattctcgattttaaaaaataataattattttttttttatttagtcacgataaataaatactataattaataattaattacttggtagttcccatggatcgaacttgtagagatcaatttccgctatgatggtgacgggaagtggggccgaggcggcctttcttttgagatagtgaacaacaagttcttcgtcagttggatggaatcgaaatccaggtggcaatttcgggtgttgttcttgtgatgatctcaaggatgaagatgaatctgtactattctccataattatcatctaattaagataattaagtaacactaatcttcttttttttttgaaagaaagaaaaggaaattaataaaatggagaaatttattattttctcaaaatgaaaagttgagaaaaatgttgcaaggacagttattatagggggtagagtttggtataagtagtatatattctggcgaatgatagggtgacacgtggagatagtgaggatgagatggttgacacgtggatgaggttagagtgtgggacccacaggtttggaggtgcctctacgtctctgatgtcatgctttttttattgaacagacaaaagtagtagtcactacctccatgatccattttcatattaaataattaattaattaaaaataataataatgttattttctcacacgtgtgggagggaatgacacgtgtgaaaaatttaagatattttaattttgagtaatcaacggaaacttctttatattttaatttttaatttgaagcgttagttaaaaataattgaataaccattgtatacatctgtacataaaaataaaattttgaagtcaatacagtgattttatagtgttaatttacaaaaaaaataaatataaaacaattttgccataaaaaataagaggggttaagtgtaaaaaacaaaacataaggagctttcattgcaaaatagctcttttaattttgagaaatttgtgatataataaatacctaactttaacttccggttacagagaaatacctataagtttaactgtaataatacttaagttatatttgtataaatttcgtatgtacttggtcgttaagtgtcaagccaatagtcacgtgacagtccctaattaatctaggtcagtaaattttttatttatttaaaaattaatttaaatatatgaataaaaaaaaaacatgcggataatgacttgacacttaacttaaaattacattaatcactagggttttgttacttttagggttaaatgaattttggttcttaattattaggttagtgacgtgagttatcgtaatatagctagggttttgatatttatagtgtaaacacatgcaaggtttatatatttattatattaattattgagtattctatatgtatgcatatgactgagtgaatattactattcattactaatataaaaaaaacaaagaaaaaaacttaaaattatttataaaagagagaatgaaattaaaaacaaaaactaaaatattgataaatttatgaattgatattggtgtgtttatacacacaaattttaactattatttatgcaaatattgtttctagtccacctatacttagggtcgggtctgattatgaaatttattttttcttttaatatatatacacatatattatattttattatataagtcaatactcatcacaaaaaattgtgaatcacaataaaatttgtgaccaaaaataaaaaaattgtgattaataattataaatcatcattcatatctgtcatctttaataaaagatctgtcattaaaagtattagtcacaaaaattataattatttgtgactaaagtaactaaaattaaattagtgacaatttatatctaaatattatcacaagtaatttttattatgactaaaaactacatttaatcacaacatattatattgtgattaaaaaattttcataatataattattaattattatgtaagctcctaagtatatatatatttatagtacttaatttttctttgtaatgtgataaaatgtgtatgcatgcatgtaagtaataatgtcttgaaatcatattgttcaaaacttacataataatatgaggtgttttttttattattataattattatatataatgaataattatggcagcatgaaaaagaaagctgattaattatcatgttattttttctttgttaattatcgtaaaactttggaagtatgtaatatatataaatatatatatatatataaaaaaaaaacaataatgcctcttcgggtcatatattatatagtcttccaaaattttatttaacaaatggctattttaaattgtaattagaagtggaaaaatcattaaatttaatagattaatcacaaaaattataatatattgagaattaaatttataaggtaaatttataaaactatatacattagtcatatataatttttgataaataatgtgatacgtttattgtgataccaaaaaaaaaaaaattattctcaaatttttaatgttttttttttattgtattgacaaacaattaaaaaatgtttataagacatataattcttcgaaaaaaaaatacatgaaaattcttatacaagctaattggtttgattaagattaaataaatttggcaattaattctcaatattgcttaactttataattaagataattaggggtgtttacgtggagatttggcacaattaattgttatataaaaatatctcagttatgaaaaagagataatattaactaattaatacttaatatatttaataagtttaatcaatatttagtagtaaattgactacttaattagtgtctacctcgtactactgttaatcttttgtctttttcttaattttgtttttacgtttaaaagtaaaagcacttattacttcatataaagttaaaaaagacttaattaataaattaagatcaatatatatctttttcctactttttattttatttctaattttttttattatttcttgtggctctaataaatccatatatataatcataattctcatattcgtttgctttacaaaatcacatattaaaagtttaacttgagtaccatatatttagtgttgtatttttggtaataatattcctttcaatatttaatatttttacatttaattatttttattcttattatatatatacttagaattttttgtttggtgaatcaaaaatatatattatgtatagaacatgtacttgtgtgaacggaattattatcatatattttgtatatgataataattaataactaataatattggttaaaaaaattattatcatatattttgcttattacaaacgttatatacgtatataaaaatattatatgtatatatattcagacaattaataatattgcaagataaattttttttatgtcgttatatgtcaacatgaatattatattatatctaatattaaattacaaatacgttcttattttttttaaaaaaaatcttaaactcaagtagtttttcaacttattatatgtatatatatatatatgttttttttttaattcgttaaagaaactatttaatataattgaaactattttttgcatgtaattaattattatctaattaagttataattagagtttttttttttttgagaaaaaagttataattagagttgagagtattagaaattaagcaattgattaaattaagtacttgtaaacatttgtatatattattttagcaaaagagtgccttgttaatccatcttatcacacagattaattaagataagatccatattaatttagtataataacgtaaaccatattaaggatattatcatgattagaagagactaattataaatcataatctctaatatataaaaaataaacttgatatatatagttttggatcatgattaattatacaattgtcattatgttaatgcaatgtctatttaactattatatcatatttccatatatataataatagctaataatatcttatagtgggcatttatataaatatgtatctatatatatgtaagatccattacatttcaaaaaaaaaaaaaaaaattatttcttagtacttgattttttcagttcaaattaattaccaattacgataaaataattaaaattgtaaatgataattaataacgttttttttttttttgatgtaattagtatattagtatatataagaaagcacaaatgagagaaaatgacattttataattattttttttggctatttatttattttattaaaattttagtattttgtgttttctttaataattttgtgcgtgctgctgaatcatataacttcttagtaattaatttctttaggtaaaataatcgtatagtttacaaactatataaatgagggcattatagacttatagtatatattttttcattcactttaatataatagtttatggctcatcacaagaaaaatattctactagcacgaccaaagtagtgcttaaaagtcacttttttagtgcccaacgtcctatatgtcgacgtgtctattctataatgcctataaatttgtgcccaaaaagtgtactttggcacgacaactaataacgtgcctaaagagtcctctactgacacgaaaacatggcatgcctgtcgttcaagtgttgtgcccattttcgattcataataatactcctcttgccatctttttaggcactaaaaaaatactatatatagactctactttgtagtgctcgttgtttattttaaaattctaaaactttaatactataggatctaccggtagatggattagattttttgacacgacacaaaatcagcactagcacgatcagacgtgaaaaaatataggcttgggcacgatatggcacgatgatataaattagcatggcacgacacaagaaacacgaaaggcatagcgtgtaagcacgaatagctagaccagcgtgaaaaacactacacgccacaagctcgaaaaatacaattaaaaactctattatttattattattattattaacaataataataataannnnnnnnnnnnnnnnnnnnnnnnnnnnnnnnnnnnnnntaataataatatataaatatatatttgttaattaaaaattaaaataataataaatatttaaatataaaattggatattataattttataattaaaattattaagaaatataagataaaattatatattaatttattttcagagtgtgatataaaaatttaaatatttataagtaaatatttaaatttaataattttagttattcttcatttaactctctggaaaatatttgttgaaacatgaatataattgaaattttaaaatatagatatattttagtaattaattgtaaaaaatatatatataaaaaaataaagtacgatcatacgagtctagatataaaaatggactgaccctatgaaaaatatgtcgacacgagcaagcatgatacgaaaatattagacctatgtgtagactatgtcaaggctaccttttaaaattattagcacagtacgataatatctatacatatttttaaaaagcacagaaaaataaatatcaggctaactcgagacacactaattcacaacaaggtatgtattttctatatcatttacgtatcatatacatatatatattctatataaaatgtgggtatataacagaattcttggttagcatcatgtagttacttaaacttaaatataattaatttacctaaagtgttgcaattaataataaatttgttcatattgtttatttttttattgaaaattattt

SEQ ID NO: 17372 - DNA, 5439 bp, Cannabis sativa
agagagagagagagagaggaggggtggttgattattagaaaactagggtttataatatgcatatatattatgatataatttaggtttcatttatgggtcggatttcaaacttttaaggtttttttctctttgtgtcggtttataatcgacgctaagcatttattataacttgacgcaacgttggttgaaaaaaaaataagaaattttaaaggagactaccgtgtcaatttccaaggttgaccgacgtaaataaatctttttgtagtaatgtatgtaattaataattgcaagtactcattttgtgtctgaaggtagaagttttgtgattgtaggtatgtgtcttgcttctaaacttagttgtgtagcatagtgtgtcaacctcttctaagttaactataggttgaccggagctcgagacgacataacacttaattcttttttcgccaattactttcattccaagcatagagtcatatcctccacgtgatgagaccactagccagtgacagagtgttaagaacaagaacagagtaaagctgaaaaaccagaagtaaataaaccagtgttttgtattgatgaagatgaatcaagttacacaaattatacatgttagtttttataaacaaatctaggagaagagaagttagttacagtagggagttagttacaacaagaattagacatctcacaataacagaaaaataactaactaaagtaactaactaaactatcatctaacaaccaccctcaaacttagtgtgtaagttgaaaccacactaagtttgtctcttagaataagaaatcttgagcttaaaatgaccttggtgagacagtcagcaagttgatcttgggcaggaacatggagcacttgtaactgaccttgaagaactttatcccttacatagtaaagatctatctcgatatgtttttttctagcatgtaagattggatttgtagccatcattaccgtgctaatattgtcacaccatattttagggacacaattggatgatatttcataactcaaacaataaggattgaagccatgtgacctatgtgacaacaacaagaaggcttcaaaattcagcctcacttgaagaccttgagatggtttgttgtttctttgatttccaggccacaatatcagtgataagaagaacataatagccacttatagaccttcaatcatcaagatatgaggtcgaatcagcattacaaaatgcttgaatatcaaaattggaacacttggttaagtgaattccataatcaagagaacctgccaagtatctaagaatcttttttactgcaatccagtgagattcaagtggagattgcataaactgtgatactttattaagtgagtatacaatatctggtctggttattgtggcatattgcagagctcctaccactgatttataaagagaagaatcaagtacttaataacttccaaactgagagagtttgaggccatttgtcatgggagtagagcttaacttggcagcatgcatctttgttatgcatagaaggtcttgaagatacttcttttgggaaaagtgaatgccaaaatatgtatgtgtaacatgtatgcctagaaaatagttaagttcccctagatcttttaaggaaaatgtggaattgagatttgagataagtttggttacttgaacattattgctgccaagtatgataatatcatcaatataaacaagaatgtatttacgtgacatgtgaaggaagtattcttatgaagagtgatgtatctatttttgaagactggaatccaaattgaatgagaactttggatagcttagcaaaccgagctcttggagcttgcttaagaccatacaaagctttcttgagtttgcaaactcaatctggatattgagagtcaacaaaaccaggaggttgagtcatatatacttcttcatcaagatctctatttaagaatgcattattgatgtcaatttgccttattttccaacctttactgacggccaaagtgagcaccattcttatggtttctagtttacaacaggactaaaggtttcattaaaatccaagccacgatgctgataaaaacatttagccacaagtctggccttgtattgaacagtactaccatctgcactttcttttattctgaatatccacttgcatccaatagggtaccttccaggaggtaagataacaagatcccaagttttatttttgacaagagcattgttttctgaattcaaggttgcattccatttttgatcttcaagagctttcttcacagtactagggagaagaaaagctatgaagacttttggtttgtgaatgccagattcagctctggtttgcataggaggttgattttttgtaggagggggagaaggtggagatgaagaggaaaaaagaggtaaagaagagataggagatggaagagaaactatttaggaagaagaggatttagacactgtttcagagtgtgaaataagagaaaaagaattggatgaggagaatgagggtgataccgaagatgactcaagagtttgttgtgagactatgggagatgacacaacaggtggagttgctattggaaaattagaaggaggtgatgatgttgtatgagatgaatttgctggcttttgtaaggaaagtcatgttcattgaaaataacatctctggacattaatttatactctaccatcaggggaaaggcacttgtagcctttctatgtgagactatatcataggaaagtgcttggtgtggatctgaaactcatcttgtttttgttatagggtctgaggttaggaaaacataagcagccaaatgtttttaaggtagagtaatctggttttgtgtaaaataatttttcatgaggagtaatgttgtgtagcactcgagtaggtagtctattgattagatagacaacagctctatatggctcatcccaaaatgttaaaggtaaactagagtgtgctaataaagtcaaaccaatttccacaatgtgcctatgtttcctttccacaatcctattttgctcatgggaatgaggacaagagactatgaattattccatcactttctacgagattggtaaaggatctgaactccctaccccagttagattgtatctctttttatttttagatttagttgaagttcaatttgtgttttgaactttataaaagtaggaagggcctcgtccttagttcttagaagataaatccaagtatacatagagtaggcatctataaagcttatgtaatatctatagccattgaaagagtctattggggcaggaccccatagaacaatgtgtaacacttgaaatggagttgtgtagactgtttttgagttaagataagagagtttgtggtatttgccaaggcaacaagcagtgcatagatcataaacagttttattgctattagaaatattacatgtttgcattacagacataatagtggctttaggtggatggcctagcttgttatgccacaaattgaaattggaattaggtacattggaaaacgaactgaagcattgaaaactagtgtcactaatgatatgagatgagtgttggtttgacacattagtaggattgaagctagactgagatggggtagttggttaatcaaacttgtaaagtccattttcaacattcccaaccaacaaagtcttcatattgacttaatctttgacataacagtgattaggatgaaattcaaaaaagacttgattatctttagcaaatggattgacactgatgagatttttagtgatagcaagaacatgaagaagatttttcaagtaaagttgttgagaattgaaagaagattaaatggtagaaaagccagtgtgtttaatatgcaaacctgagccatttcccatgtaaatctgatttgaaccttgtaattcttgagtgttttgcagatttgtaacatctggtgtgagatgatgagttgcccctgagtcaaggtactagctcgaatcattgatagtctcaggagaggcaagcatggcctacaaatccaccatggaatgactggaaacactctggaccagtgaaggttttgtcaaacctttaaaaatatttgttgacagtatgtccatgtttgtgacaaagttaatactgaggttttgtatttgatgatcctcgaccagttgtattagcaccacgaaaaccaccttgaggggtcgaaatggttgagagaagggtggatatgatgttagagggagcaagccatagttattgtacagaggagtaggataagatccaaacataggataaccagcttgtggtaaaaaggacatacctctgccaacatttgattgaggagtttttaatggaggatgagaggtaaatctgggtcgaggtaaggaattttttgattgagctacaagattgacttctggtttggcaatgtcaagctcagaatcaacaatgtcatttcgtacctcttgcgccattagtagagattcaacttcagcaacataataagcatctttttgagttgataaggaagtgatgagtatagagtattcttgaaataatccattaaagattgctttgatgtgatcttgagtggagagaacatggccaatcgaagcaagagaatctacgagatgcttaatcttgagtagataatcattcagagaactagtgagcttggcacaattttgagcagagtattattcttcaaggttggaccagatctcaacagctgtgttgcagccaaccattcgagtgaggatcttctcggatatggaggataagagccatgaaaccagaagactatcttgaatgtcatactcaatgaattcttcagatttgtgaattcatcttcattggtgatgaatttaggtgaaattgattttggattaagaaatttgattaaacgatggcctttgatggcagcaaagacttgatagtgcaatggtaggaagttgttttcatcgagttaaatagataacgagtgattgaaggtgagggtgtttgttttgggtaactaagtagaggaaggacttctagaatttgagctagaatcggccatggaggaacgacgaggaccgtctaggcatctgataccatgttgagaacaagaacagagtatagttgaaaaaccaaaagtaaataaaccaatgttttgtattgatgaagatgaatcaagttacactgattatacatgttggcttttatatacaaagcaaggagaagagaagttagttatagtagggagtaaattacaaacaagaattagacagatcactataacagaaaaatagctaactaaagggcaaattgtgaagaaaaatttttggggggctaattgctaataattgtatataatattttttatcttacatatttttatgtataaaaagtggctatctaactatttttgttggtttaacagaatatacttttgttgcccctgattttgccc

SEQ ID NO: 17373 - DNA, 6503 bp, Cannabis sativa
aataaattttttaaaaataaaatagggtgaaattatattattttgggtgtaaaataagtagccttttaaattattatgacaataagactaaaacttcggtaatagtgtagttaggaggtgaaaaaagaaaaagtgtaacggttaaaaaaatttggacaaaattcatataataatataaaattaagaaaataatagtgtaagaaaagagaaacaagtctacgaggcaatctactaaccttccgttaatacaatttttggtttttatgtgtctttctctctcctcttctctttctcaaaaccctaattctatcgttccgattccgtttcagcctcgaacatacatctttctctctcctttcttccaacgattcacatttcactgcgattcttcctctaatcactgctctacctctgcatttacaggttggtttctctcttcctctctttttctgatcgccaaaatcgttttatgtttggatgaattgctctatatcttacatttgcatggtggctttgtcatatggtgaaattgtcaatcttacttgttcttccgtcaattgagggttcaaattcgaactcgaattgcttcggccggtttgcgtttttttttaaatgggtgggttgggggataggttcggtgtatttgaattgaatcatttggggaattggtctttcgtggctgtgaaaatgggattcttggatcttcgagctgagtgttcgacctgtgatccgctgctcttctgtcatagttcttcgcttttcgacgatgtgggttttgttagatgattgttgaaggattcgctgtgaatgtggggatttgaggttttcgaaattggatgtgatgcatgactagtggttagcttgttcgtggcagtattggaatggactgtgagaatgtgacagattatttcactggaaatgaactttggcagtattagtctatttgatagaagaaagctgcgaaatcgtgattctgtgaaaaggaaacgttctgtagttctatagttgtatttatgggaagagcttgatctctgtttcgaataagcagttggttgtgtatgcaatgggtgcttgtctcgctcttcatttaaggacatgaaaaccttagactgatagcatatgggttgtgtttttggcctcaaggttttgattgggtgttgattttcatttttatcttcaagttttccactatttatggaaaagttacttgaaggtctttgaacgctggtttcaaatttattatcttttgttatttttttgttttattttgctttgtggagcaaatgccagtatcttatatgctgaatcaactttgaaatggaagagctgatacatgtacaaaatcaaaggttgttagcaagctgaattttcctgtgaacctgtgctgtactttgttgagactgaaaaatattgttggaaagattcttatttacaaattttatagctagtctaggtcaatgccatcatagccagaagaatacatggatttttgagctgggttttatagctacgtatgagttttgctatttgttatgtattttatttgccatttagatcgcagaaatggtattctgtgaccttttctttgtagttggaggagcagggtagtaggagactggtcaatgtcctattgctccaggattgttgttactgtttggatctagttttttttttggtgtatcccttttaatgcccttctattcattctttaaatttttatttagtattcttactgattgcactctttgccttgttttacttgctcacacttgcgtaccttgttaaaacactaaccaggatgttagttcttattgtgttgttgaggttcatatctaggtctaagtcggtatcatcatataactgttacaatacttaatggatacattggcattattttggttagtagaacgcaaacaaggattttaagtgcttttatatgggttcaaggatgagaacatactctggcctaaatatatttgaatgatctcaacgcattccgtgtgcctatggatttttgtttgcatttatatttgtacaaggggcagccattttctttttccttgatataggggaggctttcttctgcaatattgcataatctattacttcaaataatttatgttataatcctatttggtttttgtttcattcttccttattatttggaagaataggccctttattttaatatgcctacccagaagttatttgtttaacccttgctttttttaataagccattttcatgctagtacacgtagttttgttctttcatgataatgatattcgactttgcattaggtggtatgttgttgatttaataaagtacatcccctggtctaatttctatttgatagtgatctaatttaatgaaaaaccgtgtttttaactgcaggaacatattgtttttcaagatgtctccggcatcaagatctaaagcaaaagacaaaaaggccagcaaggaatctcagaaggcttccacaaagccttcggtgcctactagttctggtagtagtatcccagcaagtgcatacaatccgattttgggaacatttcacacccttgaggtgttaccaacatctcctgtgacatctctccagacaaatggtcgtttccgaaacatagatgagtcagatgatcattcaggcagctctgttgtagctggatttgagtatgattctgtctccaacaatggcagctggtctggtgaatcagaagatcacaaagataaggcatctaatctttctgttcggcaggatataataccaggagccgacaatgacaaacgagaaaaaatacgtcagaagaatgagaaaaagcatcagcgtcaaaaggagaggagagctctggaattgcatgagcgatgcagtggctatcttatgtcaagaaagcttgaagcactggctcaacaacttgtggcaatgggattttcacaagaacgcgcaacaatggctttaatgctgaatgaaggtagagtagaagaatcagttaactggctttttgaaggtggcgaagaagctgacaagttcaggggtcaaaaccttggtgggagtaatttgaaaattgacatatcagatgagcttgctcggattgcagatatggagacgaggtacaagtgctccaaacaggaggttgaaagagctattgttgcttgtgaaggtgatcttgagaaggctgcagagagcttaagagtatcaaagcaagacccaccttctgcaccacctaagcctgaagaaactggtgatcctccaaccatcattaatggcaagctttcacatgcacttagtcagaatttaagacttcaagcaaaatctattcctccccaaacattacaacaaagaaaagatgaaaaagattttaactacaccaagcaaacagttacagtgtcagagccagtgggtaaacatttgcaacctctaaaaagagtcaatcctaagttggattgggcaaaatctcaacagccagcattaccagctgataaaaggtggccaaatgcagcatcaaatccttctgtatcatatacattagcatcacccttgcaggtgtcttctttaccagcaaaagctgaaacccgttatgcaactgttggaaatgatgtaaaaaacctacatacaggggcactcagggaacctgtaattatgatgcagcgtcctcagtcccttaatatgaagcaagttcaagctagtatgagttcttcacttcctggtacagctgctagttggtatcctactagtaatgtagaagttacgaggcccagtggatttttgccacaaattcctactagcactggaagcctcagccagaacatacttagctcaagtcagatgtaccaatatcagtatcaacaacaacaacaacagcaacaacatcaacaatttcaacaccagcaacaactacaacaacttgttacaggcagtggtccaggggattctcctggaactagcagagggaatggtttgtggagtagcagatcaggtacttccccaactctagctgcggcttcttcccttggacttttttctgggtggggttcagctggctcttcgggagcatcttctccagtagactggagtaccagtagctcaatgctgcagttagactacaccaacatagattggacactggatcgaaatatgccctcaactaggccgaatgggttatcaattgcctcatacatgagcaatggcaacatctatgagccgaatgcttctgggttggcagcttctcagcctgcgatgagaccggcttcctctaatgtgaatggtgtttccatggcaggacggcaggatggtggagttgcaagttctgaaacatcagccacaggttctcgagactggacatcgccatttgaaggggaagatctttttagcttacccagacagtttgtttcttctccttctctttaagcaagtaattcaatgaataaataagaaaatgagagggaaaaaaagaaaaaaaaaaaaaaaagaccccagaaatgtgcgtggatttggtgtttggttcttatgatgctgcaatgttgattgttggtccatacataccttcagtgaaaaaagcatctaaaatcctttgcttcatctctctttcacgttcattttcatcattaagaaaaggaaaaaaaaaaaagccgtcgaaaatcaaagattaataaatttaatattaacaatacaaaaaatgataattcatctatttcaaaatcacactgctttctgtctaataaatgaggataaaaagcaatcgaaatgaaattgccatttgctgaaaatgatcagacctacaatctctttcgaaatagtacattcatacattggttctcgaaattgggttcatgttcttgaatcttgtctaataaaataatatggagaagtaaatcagattatgttgactttcttagaaaaagttaatgttataaatcattctatttattttattttttattcattccattattacatagcagaaacctaacgaatcatacaatatggtcattttacaacacacactattattattatgattcattcttattactcgacagaggaggaaaaattacgagagaaatcatcagaagggctacaagcgctagctgaagcaggttctttgtaccattcatttgcttctcgagtcagaaagttggcctctgcgtataacaaaacaactttatacatcttcattttttagttatttatttttttaatttttttttttgagggaaataaaaatcagtagccagagaaattaaattaacagttgacttgcatatctctaattgttctcttctaattctcagtggcttcactatgggaaaaataaccatgagactgaatggtctttgaaaatcatagaagattataaccagtctggtcttgcaaataacacatgactaccattaatataaccttaattcattttcaattcgggttataaaaaatcctaaaacaagaatctcttaacttggtatttccaactttgatatttcataattcggataaatactcgaaattagtactccggagctctttaatttttcactttgcagtgtgtaagacaaaataatatactatagcactttcaacgacggccttccttatgagaggttagatcactaaaattactacagatagccatgacaaaatatccacattcatttggtagatttccacaactagaaaaaaaacgaggtaaaaagcttagaagactaacctgacaaaaacacatccttgtagtcctcatcatcatatataaactgaggtggatctggggaaccgaccccgacaatggtgcttccactgatgagaaaatgtaaaattcttgtgacagatgatacaatgaaactacataacaagtccctcattcataaaattcattgatgcaagcatcttgatgaagattatttatgaacccttatatacaaaaggacttgcaatcaatatcttctcttaagaaatctaaaccttattgctcaattttatcagaaatatttgaaatttccagatgctaactgcacgatttaattataagcttagtaggaaaatgatcatccagtaagaaaaatcataacaggagacagacactctataacagtatggccaaatggtcaggtcaggagaagtcagtttcttacttacccggttttcgatacccaacgagccagatgttcctattgactttactttctaataaaattcatattgtgaaatgcagtttaaacatccctgaactcatatacagtttaaaatccatagctcaaaatttccacattgagcatatgaacatatgagcaacataaagccataagagctagaaagccagtatttatacctcccagacataaaaacagcatcatattgtccacgactagctgcaattatacgctgtttcaatctcttaagagatggaagaacttcaaaggcaggaggttctgcaaataaaaacatcattagacatgtaaagaaacaaggaatacttctaagaatgcacatcgaagttggaaacttgttgaga

SEQ ID NO: 17374 - DNA, 4618 bp, Cannabis sativa
  modified_base (3659)..(3668): a, c, t, g, unknown or other
aataaaaaaataaacaatatgaaaaaatttattaattgcaacactttatgtggattaattatatttaggtttaactaactacatgatgctgaccgtaaaaattagcaatcccctatgcaccaatgtcaaccatagcaggggatttttgaagaaagttttgggagggatttgaaggttgaaagaggcggaatggagcaataagataaaggagaaattcgattcaagtttaatcctcacattcaccttcgactttgagaatattcggacaaaaatcttatccaagatgccatagtatttatcgaatggattgctaattttggggaagatgcagaattctcgtgaatctaggaagaatgatttaagagtgtttctgatttggggtcatgctttgggggtaccaatagattacctaactttgaaaaataccttacgattggcttccatgacaagggaggttatcacggtacataactcggatgtttcaagaatggttgctaatggcttctttaggttccaagtatggatgtcaatcaagaaaccaatatgttatgggtaccttctaccttatgcaggttctaagacttgggtagcattcaaatatgaggagttactattcatgggctttcggtgtggtcggattgggcatagccataaagaatgtcgattggaaaaagcaagggtaacatgggttgaggaagaaactgctaatgcgcacgggacctggttaaaagtggatgacagaatcagggatgggtttcatgagaaccatcttggagaaagcaagcgtattgcagatgggggtctgagaatcccacgagaaatatcgactgaacaagtacttagggtctcaaattcttttgaatctttatccaaagctgctgatgttgtcgagacaaattctgtgggggccgttgtggaagacgtcaacggggtaaacccctggaggctgtcgataattccaatccttgttcagggatcaaggagccagaagatacgaatgttgttgatgtatcaagaattggtgaagacggatgctgctggaggataaggagatcacaagttatggaaagctccaaaaaaaaaaaaaattaacccctttacgacaccttcctctaaccaggagctattcaatattcctttaacttactctcatgagtcaatcctcatggaagggtctcttcctttgtgtttggctcgacccagaatgataccctaaaagaaaatagaagtaatgtctcagtcaagaaagattctaaggctaaaggtggtaaggctagtggtaaggcaattggcgtttctcagaatggggattcggcaactgctaagattgaagaagaggaaaactctatggatcagggtcgcctacaatcatgaatatcttactttagaacgtccaagggctggggaacccttggacagtttgttccttgaagtccctagtggttctttggcatcttgacctggtgttcatctcagagtccaagttgaataaagtttaggccgagtctttgcaggttcagttggggtttggcggttgttttgtggtggaagctaaagggaaaagtggagggctcattctgctttgatccctgcaagtggattccaatgttttatctttctctcctttccatattgattctttcattaggaaggaggaaggtcagtggtggagtttcacagggttctatggagatccggatctgagccagcgaaaatagtcttggaagcttcttaatagggtcggttagatttattcggggccttggatggttgggggtgacttcaatgaatagtgaaccaaaaggagaaatcgcgaggtccccccaagccgaggtatcttattaataatttcagacaggctttggattcttatcaggtctgggaagttaaatttgaaggaaatgcttacacttggcgaaatgggagacaaagcaacctgatttttgaaaggctcgacaaagtttgtggcaacacggagtggtttgacatttttctagcagcgaaagtgaagcaccttgatcgcacaaattctcaccattccccccttctgctcacatgtaaaagtatacctcaagggacggaggataaggttaaatggcactctcggtttcactttgagaatgcttgggcaggggaagaagagtgtttagtaattgtttccaagacttgggggcaagtcagaaaacattgtcaatgccaaggagttgaaatgtcaactggccaaatgtggggctgctcttcaaagatggaatagagttaagaagaaagagatacacctgcaattaagggaacagggagacaaaatctcgagcctttctcgtagcacggaggcgcatgacttgcaacatttgaaagagttggagcgaaaaaaaaatgtgcttctagataaagaggagaagttttggaagcaacggagccggtcattatggctaaaagagggagatcgaaacaccaaattttttcaccgaaaggctaataacaagaagacaaaaaatactatcaatgggctgtttgacagaaatctggcttgggttacggggaattttcgtatggggcaggtggcttgtgactattttaagcatctgtttacctccaattccgccacccttaaggtgttggcggattttcaaagattagcccctaacagaatatctaaagaaactaatgagtatttaaaaattaaaaaaaaatgtatatatatatatatataataacattcaaatgacacacaaatgtaataatagctaaatttttttttaaagattaaaatatgaaatttcatttcaaaaattataaaaaaaatacattatttaattaaaaaaaattaaatatataggtattatatagtattataatttaaaatcatttgctataattttctttatgaataaagttgatcgacacaggccacctcgaatttaataggcatacttacaattaatataattaatttagcttaattccatttcttttagttgtagaaggataactctggtctttaatttataataacattgtttattctcaaaaaaagatagacgactcatgttttgattcgttgtgtggttgaaacaatttgtattatattccccagttacgggtcatatatcactaactcgtgacaagtgatttgcaaacagatgttaaataatgaaaaaggggaatcgaattgaattgaattgcatacctctatttcctctcattttcttttcttccttttcttatctacaaaggaattgtattctgtttcatatttaattttgactttttatatgatgtcccaaattaagcaataaatttgatgcaatactacttcattataagtttacaccgtattttctagaatagtcatagtaatcacaatcaaatttgtattaaaattctagaatccaatttatttgagacgttcaacaaaaaataactaaattaaattagtctattctcatactttaattaatttgaaataatcaaatatatagaagagattccaatagttataccaaatatgttaccattatagttatatttatttttaaccattagatcattattaaatggttgtgatcaatttaaaaatttaaagaaaatataatgtaaatgactattaacttgatactttattttcttataaaaacttaattaaaattaattatatttannnnnnnnnnactaataattattaattaattttatgcaatttgttaataagcaaaatcttttaataatttttttttaatttaaataattaaaataattacaacaaaactccttataatttaaagttattacacacataaccttaattaataaaaaatagtatgaatgacctctaattagagataattttacgctcaatcttattttttaacacttttaagtgtcaaattagtgtgtccgtctaaaatttgttcaagttatttagtttttttttttccttttaaaaaatgaaaaattaagaaaaaaatatataataacaactataaaattaataattgttaactattttcgctcttcgttgttattatcttcatcaatcgaaagattgtaaaaaaatattattaaagtagattaccaattaattgaaattgttgattctttttcacaaataagcataacagtagaaaaatagcaagcaaattattaaaaactaaaaagaaatctaactgtagctggttgaatagagaaatgggtgtggcatagatgtagaaaattgtatcgaattgaaaagttcacataatgttaaattgggacaaactaaaaccctaatttaaaaaaaaattataaaggaggaagatgggtcaagtggttgttacaaaagaataattagatgtaattttttaaaaaattaattaagtatttaaaaatttatcttagaaggggtggtagtctaaattttgttaaaaaaataaaattttatgtaaataatatagttaaatggtttaaatgttaaaaatattacaataggggcttaaatataaaactaaaattatttataaatattaattgctaaaaagaattttactaaatattcaaattaaaattaattattttaagaaaattgttaataatgattaatttaattctaaaaaaggaatttttacctattggtaacctgcta

SEQ ID NO: 17375 - DNA, 3632 bp, Cannabis sativa
gcccctatacaattgttttccattctctacacaaatctaaaaaggataggtcctcaaaatgtttagttctaaagacccaagtagctgtccaaaatttatatacatgatttcatctattatttttggtgcaattgtttatgaattaagttattgttgtacttgtacctttctgattctgtgtttcagtttattactcttattcataccataccatgtgtcttcttttgtggattaccttattctgttgtgatttttcttgctttaggtatgtccacaataatatattcttcagttttgctattgacgctgatcttgaggatctgagcaagaaatgtggatcagataagttaaaaagtggcaaaaacgactgtttatctgaaaaggcatccaaagttggaattgccaatggggacaaatgtgataaatcatgtagagaggaacatcataaggtcactgaagttactcctgatgtaccttctgagacacagtcagctgagactgagcaagccacatatgcttctgctaataatgatttaaaaggcaccaaagcataccaggaagctgatgtccctggcctttataatcttgcaatggctatagttgattacaggggtcatagagttgttgctcaggttggactgaaaacttataccatctctttcttgtctttctctgaattgtaggtgtatattaatgtatatacatattttcctaataaattactgattaccctattgttgtggggtttggatctcaaggcacttaataaaaatgaaatctcaaagctgggtcttgtgttgtgaagtgtttatcttttggagaagtgcttaaagataggtatcataatgaatcgagaaaatgttaattatttcttttattctcttactttattcagggtgttttttttttcttttagtatttgtattataaaaggtaacccacttttgagaaacagctcgcaacaaggtccaaaacatatacatactgattgttgacatcttgatctggatgctctttgatccaatatctttttactggtcatttttcatagttgatattggcattggctttttttttttttctctggtagggctatcctgatttgtttttatttagttatcctcattttgggtttctgttttgctagtcccataataattttcttggtacatttgctggtttctttttctcattgtctctaaacaaattctgctgcagagtgttttaccagggattcttcaaggagataaatcagattcacttttgtatggttctgttgacaatggcaagaaaatatgctggaatgaagattttcattcaaaggtaattacatattttggcttgtttttgcatgatgataattacatatttgggccttgaaaaggaagtgttctctattcttaattattatatgggtcaactgattcacatatgagtggtttgtgggacatatttcatcattattaatgcttatttgtttccattatcaggtggtagaggctgccaaacgacttcatttgaaggagcatgctgttcttgatggatctgaagccatgtttaaattagctgcacccgtggaatgcaagggtatcattggtagtgatgacaggtggaattggctactaatcaacttaaagatctttatctaattttttatttagaaacccatgggtatccaggcacccccgcccggtcccaggagacaacaaagtcttaatgtggtggctgggagttgaaccttagagctctgcctaagtcagaccctactcaaggaacccatgccactacaccaaagccctgggggccctttgtatctatccaatataacttttcaccgaccattagctcttatgtttctcgcctcttgtggattactcaagtagctaattgatattgacatttatgcagttggaatgtattaaataaactcaacttactgtcttttttctgaattaggcattatcttcttgacttgatgagagtaacacctcgtgatgctaactacacgggacgtgggtccagattttgtatcttgagaccagaactcattacggctttttgtcaggtatggtattttatttgtctatttgatcattagcacagttgctgcttaatctaagagtctcaatactaagagatccaaggtttgaactttggtctcttctcgattcccaaacctcctcttgattatttgtctatccttttgagttggctaaatgttttcacttttgattaaatcttttgcacaatggaaaagacccaaggtgtagagaaatcaaaaagtaagtcagatgatgaagtaactggtcaggtagcaagtaatgatccaagtgtggctggggacattcaggtgagcttcgatctaaatcagctacagcttttcgtggtttattagtgtgtgctcttgtatccttattcactgtcctattcacgcatagggagttgaaccctggaccacacactatcctaaccaccaaggctttcctcatttttgtacctagatagtaaacagtatcttttacattggccatttggtgggctgtcttgggttgaaaaaaatgaaagaattgttatgacctaacatcttcagatgatgaaatctaggaaagagtaaaattttgggtggcctttttttttttgaaaaaaaatgttaacaagttaaagaattttgcttttcagagtaattagggatttgtgagttgactaaaatggttttctattttgacactaagatttatttttcattattttgggaatttctttgtagcttatataatctcttgatattgtcaaaaatttaattgtttctttaaaaaaggacattgttgctggaagatatgattttgacagatatgtgtactgttttaacacattttactctcaaattagctttctatttgtgatttttgtggaaattttttgtctgatagggtgcaacaaaagaagagaagactcaggctgttccagcacttcatgattgtacctctagatcacaagaagaaattctctttaaccctaacgtgtttactgaatttaagctggctggaactgaagaggttttttctggaccatgtaacaatatttttttgtcctaacgagtatgagatttaatggttttctttctctgctatattgccaggagatagcagcagatgaagaaaatgtgagaaaagttagtttgtaccttacagatgttgtacttccaaaatttatacaagatctatgcacccttgaagtttcacctatggatggtcagacattgactgaagctcttcatgcacatggaataaatgttcgctatattgggaaagtatgcatttattgatttgatagatatactattgtgcatatcttctgaatgaaatatcttactaccattattcaactgggttctttggagtggcttatggtatggcttgattcatttcacaggtggctgatggaaccaggcatttacctcacttgtggtatctttgctctaatgaaattgtggttaggtctgccaaacatatcctcaaggtgatgctcagtatcttatttgttttttggttttgtgtatacataaatcttgtgcacaccttgtaatttcagaatgtttcaatctaattcaaattatttgtatgatgccccac

SEQ ID NO: 17376 - DNA, 2475 bp, Cannabis sativa
  modified_base (1842)..(1846): a, c, t, g, unknown or other
actcctcttcgccgcaaattattctgtcgtcctttggaaaaggccaccacgaatcgagcggccaactcgaaacaatactctccaacaccaacgtaccattcgctcagcgtttttggcctgctttaaagatcgagctccgtctactcttcttcctcgccgccccagccgtgatcgtctacatgatcaactatctcatgtccatgtccactcaaatcatctccggccacctcggaaacctcgaactcgccgcctcctctcttggcaacaacggcgtccaaatcttcgcctacggccttatggtaatttcttcgtgaatagattttcatttttctattcttttaaaaaaaattaatattatttattgttatgattggagtagttgggaatgggaagcgcagttgagacattatgtggacaagccttcggagcacaaaagtacggaatgctgggagtgtatctacagagatcaaccatactcctcaccctcacaggaatacttctcacgttcgtatatattttctcgaagcctttcctggttttcctcggggagtcggagagaatcgcatcggcggctgctctgttcatctacggccttattcctcaaatattcgcttacgctgtaaacttcccgattcagaaatttctgcaagcgcagagcatcgtggcgccgagtgcgtacatctcggcagccacgctggtggtccacgtagtactcagttgggtggctgtgtacaagattgggatgggcttattgggcgcttctttggttctgagcttctcttggtggattattgtggtggcccagttcatttatattgtgaagagcgagcggtgtaaggagacttggggcgggtttagttgggaagcgttttccgggttgcccaaatttttcaagctctcggccgcttctgccgttatgctttgcctggaaacctggtattttcagattttggttcttcttgctggcctgcttgagaacccagagttggctctcgattcactttccatttggtaatttactctctctcaacttttttgattatctcattcttctataaggatccccaagttattgttattaattttagtcgtctcattcattattactactcataattaatctccctatatttgatctattatttaggatttatgaaatcgtttttgaacaacaaagtataaatatatataggacagaaaaactattatcccaagggaatatttaaatcttcaaagcataaaatttaacctttgataccaaaaactactcgaggttaactcaagtggtaagagggtgagtgtgttggagatgttctaattccaaattatacgtaatatataaaatgcttaaaaaaaaaaaaccttggataccaaattctgacagtttcaaattctgcgtcaaaatggtataatttaattagggaatgaaagctctgggattaaaagagcaaagtaataataataataaaaagctcttgtctcactatttttattattatttttttttttagataaattatacttatattcagattccttgttttttttcttattaagtttccacttcttgccctgactcttaataattgagaaagctccacatgagaaaatcaacctactgagaaagtaaaggacaaaatatttgaataatcagggaagaaaaaaaagacaaaataatgatgtttaataaacaatgattctttatttatatttctaactatagaaatgatatacaggtaatattgttttaattaattttttatttttaaaattgagaaagtaaaaatatttttctaaaatatgctttatatatttttatttttttaattgagaattaaaatnnnnnaaataaaaaaaaaatcaattttaaaaattttttaaataattttttttttcttaattaatattttggacttcgaccatacccgaacttagatccaaaggtctcaaacccaatcccgaccctgacgttgcgctgaatccgaccttggatccagatctaaacttgggcctagatccgacttaaataaaaaaaaaataaagaataaaaataaacttttcaaaatacacatttttttatttttaatttaaaaaaaaaataattatacttatttttatttttttaaaaaaaaaaattctactcttatttttgtgattaaaaaattaaaaattaaatatattaaaattttaaaaaataaaaatattacaaatgatacttatagctaaattaaagtaaactagggaagttatttattaggaaaatgatgaaacaatttcaaattacacacactttttatatatgatgatgtgtatttaattgtaatcatacaactttaaatgatgtaatcttacttaaaaatatatggttatgaaatatacatcatgtaataaatgtaaaaaaaaaaatgtaataaatgtacaatttaagtgtgtacggagcattattctattcattattctcaaaattaaatgaat

SEQ ID NO: 17377 - DNA, 5009 bp, Cannabis sativa
aaaaacacagtatttgtgaaaaaatttccgtgtgacagtatttttgtaaaaattaactcaaattccagtatttttgtaaatttctctattttataagcacccctatataacttgggccttttattaaggtgttgtactcgtaagttatgaattcagtgaatatttgtttatatatataatattataattttatattggcaaaatacccaaataatagatatgaagaaatgatcatatataaaaaaaataaagaaatatagacatatttgtaatgagatcgatcacacaaacaaatcccttttaagtataattgtttgtaatagttaggtacaaaaaactaatttgattatcacatctcttccttcaaagaagaacaacaataataataaaaataatatatggagctccgaaaaagattaacagtacacacactatctatagcatttgttttccttgtgctgaaaattaaaacctaaaattactcatcaccacaactatgaatccatacgtaccattatatatacaacaaattaaggctctattatttcatcaatatcatctccaaagaaaagcttcatcgaagagtatcatcacatcaataaaaatcaaagccataattgccaattatggctttgaaggtgatgtttttcattggaggactagtcttggctttacaggtgatcggaacctgtggcagcccgagcatcattccggcagattcatcaaagctggacagttggattgatcacaacatgagagcccacgagcaagggaagaacgatcacgccctcgacaaggtattggccgatgctgagaaagcctctaaagttattaaggtaaggcaagacgggtcaggagattttaagactattactgacgccgttaaaagtattccatctggtaacaaagggagggttatagtgtggattggtcctggggtttatcatgagcatataactgtggacaggactaaacccttcgtcaccttttatggagatgcagctaaagtccccgtaattacctttgacggcaccgccgctaaatttggaacctggaacagcgccaccgtagccattgagtctaattactttgttgctgctaatattcaattcgtggtatgtatgcatatatttatgattttatattttttttatattttcaaattttctattttaaaatacatcatcaaaactctatttttttttttttttttaatttataacacgtttttaaaattcattatcgatatcttattaattttttaaaaattttattatatttttattcatttcaaatgtataatatttatatataaatatatctccgtacaaaaataattattaaaatttaaaataattaataaaatatgtttaaattaataaataattttttataaatataattttaaagaacttttaaaatatctgttgtatcgagtttttagtaggtttttaaatttttttaaagtttctttcttttagagaaaaggttctgagtgcttaataatttttgacatcatttattacattaaaatgacacttgaaaactgtttcacacctctttaagatgtccttaattagcatttctctttcaaagaattagggaattaatatcattaggtccacacttgcttctatatatatattctaattaagggtatgtattgtatgtatagaattcatctccaatgccaaagggtaataaaagtggggaacaagcagtggcattgagaatatcaggtgacaaggcagctttccacaactgtaaatttgtaagctatcaagataccttgtgtgatgataaaggtagacatgtattcaaagattgctacattgaaggctctgtagactttatcttcggcaatggacaatccctatacttggtatttacacattaattaataatatctcttcatatatatactcattgctattatttaattacattataaattgattatatgtgtttttattaattattacatatagagcacaaccataagatcggttgccaagaacacaggagttatcacagcccaaggaagggacagtgtaactgaagacagtggattcacctttgttcattgcaaaatcatagccgatggtgacacttacttgggtcgagcttggagggagatgcctcgagtcatatttgcctacactgatatgggcaaccatatcaatggtaatggctggtccaacgccatgggagcacctaccaaagcttcaggaaacaacaagtgcgtatactcaatatatacatatattattattttgtggtttttattattaattaattccatatatactgattgcttctttgtaaatgcagttctgtgttttacggagagtacaagtgcactggaccgggagctaacacctctggacgtgccaagtattcaaagaaattgactgatgaagaaatcaaaccttttatgagcatgactttcatccaaggcaacaagtggtttatggagcctcctcaccttaaacgttgaatttaatcctgtaatcatgaaattaaaggggttataattgatgcaactttctcttctctgcttacaatttgtatacaattgatatttgatcactatatactaatgtgcaattaactcatcaaaatcaaactttctactttttttttttttgccattcatatttattgatatatacataaaacatttgattatgatcaaccagatataataatgatatattcaagggatatattttgatggatctaaatataaatttaatggcctcaaataatgcttaacaagattattaggttaacgtacaaaatttcccataaaaattgaaatatatctatcataaaaaagaactttaaatttaagcatatgcatgcatcatcacattgtctctgaagtattgaaaataaactgaattatatagaatttttttttacaattcatgagaaatatcatatattttatataatatagtacaatgctaatagtggacacgtatttagagttgcctctattcaatgaaattgcggttgcacaatcgaactctattaacaagcagaacaaaagaagcctgcaccgaagtcattagacctgtaaaaattgtgctatatttagcacaaaaataagtttgtagtaaatttacaacaaattttagctttgtgttctaatacacaattgcaaaattttaatatctaattagtgttttattaaaaaacataaaatctaataattttataatcaattttattattattttaatatgtacgtaagacaataaaaaataatataaatatttcataagttaatgacatagttaaatatactaataaaataataaaaatgacataaatgtaaataaaaagtaatgcatttattgtggtgtaaattttacatcgtaacaaatgctgtattaaatttggtacaaaatttgttatatgtcaaatttacatcatattttggcatatcattggagcacacttttgttaaattaatgagttatattttaacttttcactacttatttacatatttattggaaatgctcttacataacgaaagagaccaatttcttaaactttaattattattaaacaaaattcacaacgtataattaaattaattaatctacaacatttctcttgcatgcatatcatgaaaactatctataaatcaatcttaaataaaaaaaaaatatatatcaatcaaattgtgaagatacacaaagcacgtggtaaattttaaaattttgtaaatagaaaaaatatgaataaagtaattatatttaacaaaatttaatgctgaaataaattttactttagagatagaagttcaaaaaattagtaaatgattttaaataatggattgtgtttaaaaataatctgcttacaataattattatttagtaactttttatttatttgagtgaggagtgttgaaagaataaacaaattgaaaaaataattttttttgtctaattaaacaagataattacagagtattatatacaataaattttagctcagttgaactaaaactaacagttctataactaacttctatatggttagtcaattaactgtgctcaatatagtccatctcaaactcaaggtagaagagctttcaatcttgagtttttctctaaaaataagaaatctagagttggaaaattgccttggttaaacaatctgcgatttgattataggttgggacatgtatgatctcaagttctttaattcaaaacattctcccttacaaagtaaagatccatctcaatatgctaggtgcgagcatgaaaatctaaatttgttgtcaatagtacagtgttaagattgtcgcaccattggtgtggcttgaagagtcacttggtgttcaccaaagagcgatttaatctaaaatattacgtacaatacaatacagcctcatgtatgaataaagatcaagttgaaagaataaacaaattggaaaaattatttctcttattcaatcaaacaaggtaattacatagtattatatacaataagctttaactctcatgaatattgatattaaaaaaaagactataattaaaaaaattgtttaaataaattttaaagtatcttatattttttcaaaattttgactcttatatattctaaaaaaaattaaaaatagaaataattttactaaatatattttttaatttaaaaataaaaaatggtttaaataattaaaaagtgtacttgagagacctccccttttcgtataaactacctctaaattatgtacattaaattatgtcttaataccacatcagggaacatttattaagagagaatagaccaaaatatatgcgtaatagcaaacatttactaattgtaagtaacatttactaattgtaagtagatacgtgtaattcttgaacaaaaggtatgtacggacactgttggataaattcccatactattgtcccataaataaagttacaagtaaaataaattagacctctttataaagcctcaacagaccattataactcatagag

SEQ ID NO: 17378 - DNA, 6443 bp, Cannabis sativa
taaataaaaatatattagaaaatttgatgaggcagtaactgctccaatcatatgatgcagtaagattcagatacataattttgagtctccaaacactaataatactccaaataggaaaagagggtgttctgatctgaatacagaaaaatgaagagttaccctctttgtatgctaacacaactcttatacataatgagttaagagagtcgagtctatgaccagccgaagaagtaatcgagaacataaaccagagcgagcgagaatggatagagcaggaacgcgattgaagccgtccacagagggaatgtggttcgaaggctgccaaacagacccatgatggtgcaaactatgaaaatgacaagaacttcagatgagaagtcccatgttagtcctctaatgtagacaagggccaagaaaaccgatagacaaagtacattgttcattgtcaccgccccgtatagctgcattcagcaaaagaagaaagaaaaacagtttaaggttttgtttagcacagttgattgggacattagtattggttgcataagagcaatgtagataagtgaacgcaaattctaaaagggtcaatttgtatttcggttattctatttttatgtttggttgcatttttaagtataagaatgctaatataatgaaatgattttcccaccattatggtggtttgattattctattatgtgatgatgcagagagaattaagaaatagggaaacaaagacaaaccgcggaaaaggtcaaggaggaagttcttttcttcttccttgtagcgaatattattgcggaaacagcctcactagagttggtagccaaaggaagtgcaatgaatgagatgaaaaacttgggaatgcttgtagcacttgagaagttatcgacagcgtccaccaagggatctgcaaaagctgctgcaatcgcggttccaagcaacaaatacaacactgctttcactattatagttttagcattcacaataccttctacgagctcatcactttgatcatggcctcccaaaaggtctttctttgttttctgtacataaataaccaaactcattagaagagaagcaaacataacacatggattagcttagcatgctctgagaatagacgatgaattttaatgaacggaattaatgggcaaaaagcttacctcatggaaatgatcaacagggtcggaagagacactcccctgtctccgcgaacgcttcgcttcagtaagccatttagaaataccaataacaaattcttccttatcaacccttctatcattggatgtatcaaaatcagacatcactttgttcgcggcatcatcactgtctaagtcaatctcattgaaattaattccaataatcaacgctcttatttcagcagtagaaagatgtccgtcgttgtccgcatcaattttgtcaaacaatctgacatattataatccatgtaaaaagttaagcagttgcaaagagtaatacaaacacaaaaataagtgaatccattttcaaaatcaaactcactttgatataacctctacatcaggttcaccatcatcactaaggagcctcttatttgtctttaaatgtttcaagattcctgatataacatgcttatgcttagcgtattccaatcgcctcctctgtatccaaggctgaaaaacctgcatgatgaaccagatatagtaattagggtgtgtttcgtttaatttgagattattattcagtttgatatgtttgtctaaccatataattactacactagtaattagacggtaacttattgtgtttttcaattacatatatgatcacaacattagtattattggcttaggagttaacaacataacctgatcagtatgtttatcaaaatcatgaatccatctacctaagtaaagttatataagcatggattcaattgaggataaaccatttcttcttacaaattataatataatattatgaacagagtttccaaaattcacaccatactgagctgaattctataacatgtcttaagacttgtaattgatagtcttgtcatgtcatttgccacctcctaaaacttattattcttttaaaagaaaaaggaactattacttttcaatataatatatataaataagtgggaaaagaataatacagtaagtggaagagaagcccaccaaaaaggaatctcaatccttaataactaaatcgaaatatgaaaggaacccaacttctaaatgttaactttcaaaaagattttgtaatgatgccaataaagatacaaatacccctcccactttgcaaatgtatggcatgtaatgaagtaatgatatttggttaattattgttgcacataccttgcaaaatgtatgccatgtaataaaaaaaacaagtcaaaaaagaagtttgcttattctttacatgtcaaaaagatctggatgccaaaagataacagaaacaaaaaccagacatgatattggataaaattgattcctgaaatacccaaatatctgttttgagttctcactagttcaaacaattttgccaaagaataacaattattctctttcaactttctgcactaatcagaacatattttgttcaataaaagttttgagttttgagagagcaaactgaaaaacaaaagatgttgttaatgactaatgaaatctcattgttattttcccaagctaattgaacgcattcacttaacaaagattagagagcaaacttaatatgaccatgtaaaatcaaaagcctagaattcaaagtatacaaaagcctacgatcatgtaagtacatcaaataataaaaaaatctaaatctagttgaaaaactacatataaaggcataattggtagacagtaagaataatgtacctgatacaagcaataagaaatcaatagcaacaccgatgcgataagcccaatcaacacagctaaatgtcttccagaggtagaactcataacttgaggtagttgaacaataagaaatgggataacagatatggccataatcacagcagcatagctagtccaaatatccgtgctaactccagaacctgcatttaagaatactccattcttgtaatccatttcaaatcagaattcctcaagtgagaatttaaatggtccttatgaatccatcactagattacaattacatataatgaatctagcaacacattaaggtgtgcaatatacacttgtgtgcagttttaagattaaatgtgaagagttgaatgtgattttgatgcattcaactagctcactagatatagttagcaaatcgggaattcattatttcagtataatcacttaatatagctcgaaattattttaacaagggcaactccaatggaggcatcttactttggtgcctgctgtggaccacacaaattacattttactcaaattaaccaattagaaaaaagaaaaaacatatatgccaacaatggacactataaaatattattttatgaccctatttggccccacttactgacaagcaacagtagaggcacctccattggagttgacctaatattgttgaagacttgaagtgacaaagaaactgctaccattttttcctataggaacatacatacatataccgttttatgtacaccagaccagcttctaattaatttcatatggtcacaaacaaaacaagttcgatatattttgtctttaacataatgtaacagtttgcattttcaaaacctgaaagaaaaatacaaaacagggccctatggaactttgtccatctccctttaaacaaaatgacaaaacagggaaaggatttcatttttatgcaaaaatttgaatatgccagaaaattaagtatccctttcagtcacatataaaaagtaataaaaggaaatggcctttcaggaagataggaacgtaccggtcaaggctgccaagctaaaccctttcgtatcagttgaatcttttgcagccgaattttcgatatcacacttgccaacaacaatacaagtaccccatattacagtaaggagcattacagttgaccctgctagcaatcccattccaacagaaacctgactttgggcaacttctggggttccagaaagtccggatactagggaagaacagcggagaagagtaaagaggtgcatatcaattaagaaactaatactatatggtcatacaattcaaaacatgataaaagagattcaatcatgtaaactgaagagtgtataaagtcttgccttgctttaactttcaattttctctttcttaataaaaaaacaaggtagcatatattgaaaaaagaggtaacatataaaatatagtaatgctctgctctcaattcttaaaaagggtagttaaaacccaatcaagtaaaacttacaattaacaactataaatccaaatgtagtttccaatcattggttaaaagtgaaaatatatcataatgggtactgaaaaagtcaaagaaacttgacaatgtaaataaatatatcttgtacttcaagtaactaatgatataccgttaaaataaaactcaaataattaaatatttcatatcagtagtcaatctatagcttctcttctactcactttttctttccagtaatttttttatcactataaattctttattgaaattacctaagattgttacctattcacatttttttaaggaagaaaaagaaaaagctctaatatcacctttcttaataacaaaatttctactaacccttaattcaaattaacattttaataacgttgtgaagagaatagtgcctcaatcccaaatgtaaatattgaaaaacttactttttaaaaaaactaaatttcaaagcaattgttcattaatattatcacagaacttccaagaagaaaaataaaaacagccttgtgttgtgagcacagtatttctttaattaattccctgcaaaagtaaacaccaatggtccccagtactgaactagctccttctctattattggtgagaaacaaatcaagatgcatcgactagtcaattttcttttttcttttttatctttttctttttcaaataaataaaagctatcaagaagtgtttccggggatagtgtacattgctattaagtactagtagcacttagaagtagtattttgcgattagtattctataaaggacatttttgtgaagtgtaatattttattggtgtaatttaatatcgaattccatttattttattttattaaaaattataaaaaaaaccaagtgtcccatagcaatgtttttctataattattacattcaattatataagaacccgatacaatataattataaagataatcaactgtttaaatattatttttattttaaattattctgaatttctagaaaatttacaatcttaaatgaaacacaaatgagttacgtcggtatacccattattcctttattccccaaaaattattcctttaatttgataaaaataacataaacaaattcaccaaatagtgataccaactttctccaattttttcatagcattaattcttttctcatttaattaattaaaaaaaaatcaaaatcaaacaaacaagatccaaatcaaaaaattcccaattctacttttaattttttttttcccactctattctcagattcttaatctttttccaaccaaccaaacagaggaatcaagctccatcaacagaatcaatcaaatcaaatcaaatcaaaagaaaagaaaaagcgaattaattaccgagaataagcatagcatcaggaagagcaccgagtatgggaagaaacaatccaccaatgagaccagggccaaggatctcaagcaaaagctcactgccattagagaggtatgtagcggaagtgaacatgagaaagccatagacgagtatgagaaacatattacccaaagcagtggtggtacacggtaagaaaccgtatgactgttcacatgtggattcaacttcctccgccgttgaaaacgacgtcgttaaagtattaagacggataatattggattcatcatcatcagatactaccggattaagaaccgaggattggtcagtgattaaacgggtacagtgtactcgaccacagaggatcaaaacaagaaaagaaaagaacaagaacaagaagagtttgttaacaaacatgattattgggattattattacatgtaattgagattgagagattggttatgggttcttgttcttctggttctttatagagagagaaagcgaggagagagagagagaggtaatgagcgtttgagacgtgttggtgtgttgattgggatttttgggtatggtatggtagctaagctacacagtcttggatctgacccttttattatttgttattattatttttttaataaagttgatttttttaaaaaaaaaaatattatttttgatatgcaatttgtggtccccatttgagactttttaatgtttatttatttattt

SEQ ID NO: 17379 - DNA, 4425 bp, Cannabis sativa
gggtggcccaatctttggtgccactgatttacattggatacattctttgtatcttgagtgttcttattacaagaaaaagattgaaaaatctgtcttgagggctttggacagtgagacttcttttgggtaggcaaatggtatagaccttctttaattgctccctgaagtagatggttcttggtgtgattgtccttgacataacaacaatcagggttaaattcaactgtaacatcattatctttggtaaatttagagatgctaatgaggtttttagtgatagaagggacatgaagaatatttttaagatgtaaaggtttgcttgctgcaatagaacaagagccaatatttttaattgcaagagatgagccattacctacaaccaatttttctttgcctttgtaggatgtttgttgttgtaggttcgagttgtctgctgtaacatggtttgatgctccactgtcaagataccaattggagtcatcagtcatagagggtgaagtaatgtaggcctgtggttggtttgctgcagggttaagattttcatctggtccattgtaacttagatcgaatcgtctgtagcatctttggactgtatgtccaactctgttgcagagttggcacacaggacgattgccttgattggggtttcgacctccagagttgcctcgacctcgattgttgggattcgaaccacggcctctgtttccttgccccatgttacgatttggctgattggaatttggtggtggtggctttctgaactgagccatgttggctgaagcacttgtgagatcaagagagagagtagcagcatgtgcttcaattcgggtttcttgattttgcagcaagaattgcacttcttgcagagtaaggttgtcacgagaagtaaggttgacaacaactgcttcatattcagggcccaaccctgcaagaacatagagaatgagttgatcatcagagatggcatttccagcagcacgtaatccgtcagcaaggtttttcatcttcaggagatattcatcgattggcaaggatcctttcttggtattctgaagttggctcatcaattgaatcatgcgagctttagatgtggtgccaaacaattgttccagtgttctccatagctcatgagccgtattgcaattcacaacatgtcccaacatagtttcagaaatggaagacattagccatgatagcagaaattgatctaaacgcatccaacgtatgtattcaggattggttacctgtgtggtgctctcaggtggttgtcgaatgcgctgttgaggaggattctgattatttagtatggattcaagatcatgtgcccgaatagctggtagaacttgtgagcgccagaaaaagaaattattgcgatcaagacgcagtgggggaagaaacattgaggttgggacagcaaagttgttgttggaagacgccatggatgaaccttgggcgactgataccaagttgagattgtattcgagagagagagagaacagagaaagaaagtaatcttgcttctttattcaatgaataacagaaattacaggatagtgtatttatagagtagaacagagagaactaccagtacacaactaataagtaactgttataacagaataaactgacttaactaccaaaccaactaactgcctattcgatcttatcctcaacatcccccctcaaggtggaaggagggtactccaatgacagcttgtgacatagaaaattaaatttgggtagagtaagaggtttggtgagtaaatctgctggttgttcgtctgtgggaatgtaggcaatctgaattttatttttggcaagtagttctcgaacatagtaaacatccacttctatatgtttggtgcgagagtgaaaaaccggattagatgccaactgttgtgctccctgattgtcacaccagatggtgggtactttagacaatgttattcccatttcagtaagaactgaagtaatccatactacttcggttgctgttgtggacagagctctgtattcagactctgtactagaacgagctacagctcgttgctttttagaaccccaggtgattagattattgccaagcatgacagtgaagcccgtagtcgattttcgatcatcaagattgcaggcccagtcagcatcagagtaggcttcgactgtcattgttgttgcaggctgaaaaacaagaccaaggttggtggtgcccttgatgtatctcagaacccgtttgcatgcattccaatgtatgttggttgggttctgcatatactgactgagtcgattaattgcaaaagagagatctggtctggtgagtgttagatattgtagagagccaatgatacttctgtagagcttagggtcatgaaacaagtcctctgtattggtaaacaacttattaccaggacacataggagtgctacatggtttggaatcttccatattggctttctttaggatatcttgagcataccttgactgatttaagtataggcaagaatcagttctgtgagcttgaaaccccaaaaaatagctaacagaaccaagagttttgagtgcaaacttgttgttgagagctgtgataacttgctgtatggcatccgaatcatgaccagttatcaatatgtcatcgacatatactaagacaagtaacagatggcctttgttgttagagatgaagagagagttgtccgagacagagttgacaaatccccacgatagcagtgttgttttgaggtgttcataccaagcccttggggcttgtttaatgccatatatggctttttgaagtttgcatacatgagttggatgttccttgtcttcaaaacccttaggttgttgcatataaactgtttctttgagttccccatttaagaatgcattgttgacatccacttgttgtatgtcccaattattagtgacagcaagagtgaacataatgcgaagagtagatggcttgactactggactgaatgtatcaaaataatcaactccttcagtttgttgaaaccccttggctactagccttgctttaagtctttccaccgatccatcactgtttaacttggttcgaaatagccatttgttttgaacaatctgcatgccatcaatatatggtactaggatccaagttttgtttcggattagagcataaaattcattgttcattgctgagttccattttggatcagctaaggcctttttgacagacctaggctcaagatagtgatgattggaactcgagagtattgcagcaagtatttttggcttgtgaattccagacttagatctggtttgcattggatgttgggaagcagtggtagtagggagatttgagagagcagtggtggtgtgacatgtggaggtgggaaggttgtttgtagtgtgttggttggactgagttggagagggaacaatgttgcagctgttggtaggttcagggatttctgtggacctgttagtgggaagacagggagcaattgagggtgtgggagtacaaatgagatcacaatgtgtggttgtggtgggcactgggatattaggcatgtgtacaccagtagagggactggtttgagtaacagtgggtggtttaggtggaaataattgctgatatgggaaattggtctcatcaaagttgacacttcttgcgatatagatcctacccgagggatgtaaacatctatatcccttgtggtgtggactatatccaagaaacacacacatagaggttttaaattcaaatttgtgccgattgtagggtcttagaaaagggaagcatgcacatccaaaacttttaagaaaattgtagtcaggcttttggtgaaacagagtttcataaggtgaaataaatttgttcctttggataggtaatcgattgattaagtaagttgcagaaacaaaagaatcccaccagtgagagaggggcatttgagcttgtgcaagcatggtaagtcccatttctgtgacatgccgatgcttacgttcagcacggccttgttgttgatgtgtgtgagggcaggggtgtctaaacacagctcctagatgttgaagaatgggttttaggggtctatattccccaccccagtctgcttgtagacttttgatagggacaccaaattgtctttcaacatacttgttgaaatattggaagacagaggtggtatcagactttgtttttagaggaaagatccaagtatatttggaaaaatcatctatgaaaataatgtaatacttgaacccttcattggtaggatatggagatggcccccatagatcggtatggacaatttcaaaggggtgtttagtgctgtgttgagatgaatgaaaagagaattgatgtaatttcccatattgacaagcattgcaaaaactagtttgagtagtgggcacatttatggaattaagaactttattcaaaacaagttg

SEQ ID NO: 17380 - DNA, 4911 bp, Cannabis sativa
gttgataacaactctattcgttctctctactctattcatacaatatgctgtggtatatttgcactaacactatggaaagctgtggagagttttctttgcactcttcatgtttcttattatatcgctttacagatgttgattttaagtgcattttgtgcaagatttttgtttctactcttgaaacttcagaatgttactacttctagtgataccactactcagaatattgcatgggtctatgttgtatcttttagttttgtagttttgtgtaactggtgctctatgcaactgagttcttgaactgtgcgaacacattcttctatttctttatcggatgtttcatatctttgctctgcaattgcagttatggaaatatggctcttttctaccacggtcttaatcagacagaacttgcactgaggcatatgtcccgagcattgctcctgttaagtttgtcatctggtcctgatcatcctgatgttgctgcaacttttataaatgttgcaatgatgtatcaggatattggaaaaatgaataccgcacttcgttatttgcaagaggccttgaaaaaaaatgagaggcttcttggtgaggaacatatccaaactgctgtatgctatcatgcccttgccatcgcatttaattgcatgggtgctttcaagctttcacaccaggtatatatcttaaattaaggtcttttgatttgtagaaaaaataatcaattaatttgttttaaaaactttttgtaaattcaaagagttcttccttctttcatatttgcgctaatctctccatcatgtaagatttcagatggaaagttaggatataacagaaatatttcatttgctttatttgaaatgtctagcaaaatactgaaggatcatgtgattgcaatgttgcttattgctacattgaaaatatctagtcctgtacagagttagtgtacctgggtagacctgtcagctgatgtgatgctatttgcagtaaattatgctggataatcactgctctcagtttgaaaacttctttgatttactgccatgactagacataaaataaaacttcaatctctagatggtggtggtttggattttttagagttgcaaaagtaaacatggctggtgatggagatattatttggctgtaaactcgggatggttaaatttttcctagtgattaaaaaaaaactaaggaatcaatcactactttcagcttgaaactacacattatagtcactgagtcgtgaataatttatcatacattagaactttaacctgttgatggtggtgctgagaagtgagaacttttagaggtggttttgtaattatggccggtgataggatatggtgtggttatattgacttgtggtgtaaaactgtgacatgaaaataaaggatcttgaacgactattaggcatatgagctgatatgggagccttgaataattctgatgcaaaaattatttgactctggttaaaatatggtgctgttatatatgagactgggatttgagtacagggagcaggttagaattgggataacttaatactcttgagcatttgctaactacataacccactttgattttgtgagtaattagaacattccctgggacttcagattatatacaatagtaccctccagactaaaatattatccaaggggatatcaagagagattctacctttagggagatgtttctattattttcagggacccttggcatatcttttattttattttcacaacaagtggtggattgtgtacttgcatgggcattgctattaggcacacctatggtgtccaacaccaaggtggcgctttacgagtagttagcggttgttcaatattgttaataaatttaaatgtggacctaatattgaattacaccaataacggtatgacacagcagtgcctatgattggtgttattggtggaatttgtagggacaataatagtatctttgctatgtcatccattttctaaagtagcaggttatagtttctaaaagttccttactcttgatttttcccaaactatgaacaatttaaggaattattactccctttcaatgccaaccaaaaatttggtagcagtggatgctccacaaaattattactctcttctttgaaaccaagcttttggtacgagttttttgaatctcagacgtatctgtgcattctataagcctcagtttgctgcacttttgcatcctgatcctacaaaatgaccatgacatggtgttttccttaacagcatgagaagaaaacatatgatatacttgtcaaacagcttggtgaggaggattcaagaactcgcgactctcaaaactggatgaagacatttaagatgcgtgagttacaggtaaattgatccttccaaggatgaatggatacaaacttcatgccgcaatgcctattttttgagaagtgttcctgttattttacaatttctaaatctgagcatgttatttctacagttgaatgctcaaaagcagaagggtcaagctttgaatgcagcctcagcccaaaaggctatagatatcttaaaggtattacgagagctcatttgttacatgcatactactttatttgggatgaacatgcattctttaagtttagttttagaggctattggagcagttaatgcttcatatgcttccccatgaaattaaattttcatctgttggcacataattctgtctttatcaagaattgcgatcactttattctgacctcgtaagaaaggtttaaaaatctggcattatttccaggatgtcttacagtatactctgcaatattttatatatccactatttaagaaattttatgctgtctttaaattctgaattcatccaaattgctagttcttggatttctaggattttttttggttcactgattgtctgcagtgtactctagcactagcatatctgtttgctgatttgatagttggaacataaatggcaggcccatcccgacttgatacaagcattccaagctgctgctggtgctggagggactggaagttcaagtgggtctgtcaacaaatcacttaatgctgccatgattggtgaaacaattccccgagggaggggagttgatgaaagggctgcacgtgcagctgctgaagtcagaaaaaaggcagcagcaaggggccttttgattcgtccgcatggtgttcctgtccaagccttgcctccccttactcaacttctcaacattataaattcaggggcaacgccagatgcagtgaacaatggagagacaaatggagtcaatgacacaaatagccatccctcaaatggttcagtagaagtaaaaatagatcaaccatcatcagaggaagcaggccaacctccggtgggattgggcaaaggtttagggtcattggacacaaagaaacagaaatcaaaacctaaagcttcatcttaatttttttttgaacatctgtgattctagataggcaggaacaaatagattctagataggcgttgatgctgcaaattttttcaatgggcccaaggaggatcaattcctaccaaaccttagaagctagaaagtaattgagattcatatcaaacccaataatgccagttttggattgtccatagtgatatttggctgaaagacatggtgggaatcaatagatggatcataaaatcatcctggtagtctggtatagactgatggatgtgccttgtgtactagcctatatttctctttttttcgttttgtttttttgttttttgttttttgtcaagtgtttttttttcctttgcctatgtggtcttgtgaattttattgtactcataatattattgccataacatgtactgttgtgcaaattgaggctagcatgaatgatgcagaaaattgttacttacaatcctaataagagtctcaacataagtattgtttcataattcatacagttcggcttctataaattttgaattactgaattcactgtgcatggtacgtgcttccatgttggtctattttttcctcagcaaattgtaatgtagagctcatatctatatcttttgtctttcatcatgttgccccttttgtgacagaagaattagtaaccgagtaatgttgcccctttgatgttttacaccaaatttttggctgtattgtacgaatcatttcactcatgaaattggttgggagtaataacacaaaagaaaaagagagaataattagcatttttactctttgaactttccagtttcgtatattcttgctcaactcaaccagacgacacaatctcaacaacccttgttttggaccttagatcaaaagaagcgctctcgggcttttcataagaataaaaaagggaaatctgtcaagaaaggtgacaacctgcacaggagtggtgctagaaaccaaagaagcggtggataccagcaacatgactttcctctaacaagtaagcaagtaaactaccttactttgattgaattttactttgctgcgccctgaatcaatcaaaaagcttattgatttaattcatccttcatttgggcgacaaaattgagtccttgtgaatgagcagaaccaggtgctcttattttacgacggtagagacgattgcttccattattgaccagaaagacaccaaattctcctttaggtgcttcaactgcggtataggtaggagatttttcagctggctgttatgttagttgtagcgcgccttcccccctttcatgtcgaaaagatttagtagcattttcttatgatgacctagtcgagagagtacgatacatcggtgtaaaagattgagtgggatctgtgaggttggttatctgtcaatattatgcgaggagatattgcttttgctaattcgaattgaagggtgatataaaaccggtctatttccggcatcatatccatagttagcgcat

SEQ ID NO: 17381 - DNA, 3833 bp, Cannabis sativa
tttttatattggaaagaccttattaaatctcttttttctttccttccaagagaggatcaacataaaatcatatactgtttttataatagaatttattttgataagattttttgggtgtagaaaaaaaaggaaaaaaagaaaaagattaggtaaaaattagaagcccaaactaaataagcccagataggcagatctaaatgtgtgtggagaggcagtaaacgccttctcttccctattaaaaccaattcaaaaagtcttctctttaccttaccaaattcctaatctgtctccactctccttctccgccatcctaaatcccgatcccccatttctatacataaacaaagaaaaaccccaattcattcagatctaaatctagggttagggttaggggcaagcaatcgagccagcgaaaatggggagaggcggagctttgtccgagagcgttgtgaagaaggtgcttctctcctacgcctatgtagggatctggatcttcctcagtttcaccgttatcgtctacaataagtacatcttggaccgtaagatgtacaattggccatttcccatctctctaaccatgatccacatggctttctgctcctccatagcttacctccttgtccgcgtcttcaagctcgtcgagccagtttcaatgtccagggagctgtatattcagtcagtcgtaccaattggtcttctctattccctttctctttggttttctaattctgcttatattttcctatctgtttcgtttattcaaatgcttaaggctcttatgcctgttgctgtttactccattggggttttgtttaagaaagacgctttcaaatcagaaactatgttgaacatggtttcgatctcaatcggagtcgccattgccgcttacggcgaggcaaaattcgatacatggggggttatgttgcagcttttggctgttgcttttgaggccacccgattggttttaattcagattttgttgaatgctaaaggaattagtttgaaccccattacatcgctttactatgtcgccccttgttgctttgtgttcctttgtattccttgggtggtcgtcgaatacccattgttgagagacacatccagttttcatttggattttgccattttcgggacgaattcactatgcgcttttgccctgaatctcgctgtgtttttgcttgttggaaagacttctgctttgaccatgaatgttgctggagttgtgaaagattggctcttgattgcattctcttggtctgtgattaaggatactgtgacacccatcaatttgattgggtatggattagctttcttgggcgttgcatattacaaccattccaagttgcagggtcttaaagcagcagaggctcagaagaaacttcagcaggctgatgaggaagctgggagattgcttgaggagagagaagctgatgtcagtggaagaaagaacgaagcccagaattgatctaattgaaataaaaggtttagatagaagataatctacggatgagataaggggaatcttcctttggatcttggcatttaccgtcttgatttccaggttctccttcgaatatgtggtcttaggtatttatcatatgtattttttttttcatttttgttctatcgtttcattgttaaatttagatgtggtgactcctcctatgttccgaagttgatttgtgtcgctcgtagtgtccatttatctttgggaacaaaccttgaatacttgactagcaacgtcatcatcataatagagtacgattgcatatgtacttctgccgattatattttatatcgatttcgcttcattatatgagtggtttgttgtcttgtacattcaattttaggctgagactatgcttttgttggtgttttttttttcacttgattttgtgttccaaagcctcgaaattgccagtcgattttattgaagatatagttgggtttattttttgtgagcatgagatttggagttcgaacttttatccaggtcaactcctgtttattaaataaaaggcaatgtgaagctcccattaatgttcttggactagacttttgtttaactatttcaaatttccattgcatttcaccatgtttctatgtaacattttccatttttcccctcatccaaaataaatgctgctctgttaaattcgtggggttaaaatattcacttgttttcttgcatttctccaaacaaaacgtaaacgttacttcgagagcctcgtgagtcgtgagttttcttcttttgacacgcccgttcatgttcggcctttgggcgaccgcgcacacaccgacactcgagaaacctaatgttatattggttttcatttatccttctcgaacaaaaattaatttacatattggagtttagataaacaaaataaaccatgactatataacctgctatattgtcgtttaatctaatcttcgtaatcatgggccaagtccaccatttcggccttacttgtatcacctattagtaatttgtttgttgctacgctatatgccataaatcggtgtcaagaggtgacacgtttctttcatgcccccactctgtttttgttatatagttattttttcttttgctcaatattatatagtaatattatataggtcctgttctgtgagatatccaacactctttttttttttgggaaggagagatatcaattctttgaaatggtatttctatacgctttttttttttttttgactttattatgacaaaagagaaaatattacgtttaaataatgcaataataatatgatacctatttttttccggcaaaaactcaaaatgttaaaatattacatctacactagtcaagtaatttttataaagttaattaaaatagattttaatgggatgggttcaatagacaagattttctatactatttgaatggcagattaaaaaaaatgatcttaatcttctcttcccctctcccacagccgcccattgcccacctacatttgccgttgtacatttacattggaaacatcatcttaaagtcattagtgtggaaaagtttttactttcattttgggtacaaaatttagggtgaaatattagggtttatgttcattagttatatggtattataatttgttgctcttagttaaatataattgaagaaaatgtactgagtagcttaaaatatataatatattatgagccacattgataattttgatggagaaattttgagggtgatggtgagtttgattgagtagagattattatttttttttcttaatttttaaaatttaatttttaagaatacaaatgctaagtgccacctaattaagtctatcaaaaaactagctctctatctgcaatgttgaacaagataatagcaaatggagaaggaattaacaagaaaaacacaagtcttgttgtggtagatgatcatgatgagtaaagtaacactcagtgattgttatttttttctttaaataatatgagtggattttaaattctctctgtacagtagagtatccatactaattatcatttcttttgctgacccttttgtggtctagggttttttggtgaccctgtatcttttgtatatggcattgtttattttgcttgctttgagtgtttgtggttctgcttcttttctctctgccaagtttgctatttgagagagttttgtggctagtgggtgttcttggctttagcttgatggctgctaaaggaaaagaagaagtgttgaataccagagtgaaggagttatccatttctttggaagaaaatgcagagctggggtaagatgtgattgaacgttcagtagtggttaggttggtttctaagaaatgcattt

SEQ ID NO: 17382 - DNA, 13412 bp, Cannabis sativa
ggcatgacagtaggtgatgcatgggcaagttgctcagtaacaaatgagccaaattgatccacaggaatatgagatgagttagaagcatgattagaaggcctggaagtagaaaaagtagaactaggaacagcaaaaggtgggtcagaatgtaccttggttgctgatgctactgaagttgcaggaaatgttgtttcatcaaaaatgacatttcttgcaatgaacaaccggccttgagaattttcacacaaatatcctttgtgaacagaagagtagcctagaaatgtacactgctgagatctatattccatcttgtggttgttgtagggtctcaagtgtggataacatgcgcacccaaatggtttaaggattgaatagtcaggaatttggccgagcaaacactctagaggagtttgttgttgaagcacctgtgtggggagccgattgattagaaaggctgctgtatgaaatgcatgccaccagtattgaaagtctaagcccgattgtgcaagcaaggtaagtcccatctctgtgatatgtctatgtttgcgctctgcccgtccattttgttcacttgtttttggacaaggatgtgtaaactgaattccttgatcagtgagaaacttagcaaatggtctatattcacctccccaatctgcttgaactctcttaatagggagattaaattgtttttctgccatgcttttaaatttaataaaggtgtcaaaggcttgggatttgagggtgagagggtagatccatgtaaacctactatgatcatcaagaaaatgaacatagtagtaatagccatctttagattttatgtgggaagggccccatagatccgtgtggatgagttctaaaggttgagaggctcttgaggttgagatggggaatggaagtttatggcttttacccatttgacaagcttggcaaaagtctaactggtttaaggaaccagtagatgagacatgaggtaatatttgacttaggacatttttagaaggatgtccaagtttctggtgccataggttgatatcatgcttgcaagatatataagcagtaggacaagaatcattctttttattgcttgaaggaaaattacaagtagtagaattgggtacaaagctactgtcaacagcactattacatagcatagcagttggattacaagcatagacaatagactgaggtgacttaggagcagtaggttcttggacacattcagcaagcatgtatagaccatctttaagcattcattcccttgagcaagcagcaccttccccgtttgcttgtccttgacaaagcaacatgttttatgaaattcaagaaacacattattatcatgagttagttgagatacactaactaagttctttgtcattttaggaacatgaagtacagaatttaatcgaagagacatagatgtaagagatggtaaatgactagaaccaatgtgagaaatggacaatttcttaccgtctcccactgctacaccttcaggacccgtgtaggtgattgctgtgtcaagattttcaacacctgaactgatatgattggtggctcccgagtccacaaaccagccagagtcatcgccaaaatcaggcaagaacgaggaagcataagcctgtgggtcatattcaaactcatgttcagtgagaagggcacgagtattgttggatgggagtgttggtggaggatttgagcctggtttgggaggtacccaagtcttgtcaaatcggtaatggcacacaggggcagtgtggccaaaccgaagacacaattggcattgaggcctgttgttttgattgactccacgataacctccacggtagccaacctttgaaccttgtgggggcctgtaagagttggatcgtgaaccagaaagagccatatgcgcttgtaacttcatattgaggtcagtgacggagttgtggtgttccaggcggctttcgtgcgagagaaggagagcctgcacctcctcaggagtaagagaatcgcttcgcgatgtgatgcctgaaactacggagtcaaattcaggaccaagtccgtttagcagctgaagaacaaagtcttggtctgaaattggggatccagcaatggccaaagaatcggtaatagcttgcatcttatcaacataatcagcaatggagaggcctccttttctgagattagagaactgtccttttaattgaaggagcttggctttggattggcttgagaacctttgttccaatgacttccaaacagagtgagaagaagtaaagttggcaacggaagcaagaactccctctgtcatggaggatcgaatccaagaaaggagtaattggtcttggcgtttccattgctgaaaggcaggattgggaccgccagagactaaggttgcaggaggaggaatccctgtgagcaatatctcatcgagatcgtgccctataaccgtgggaagaacctgagatttccaagagagaaagttagaacgatcaagtttgattgttaaggttgaagaaagagagtgcgaaaaaggattccaggaggagttctgctggatttgtggggcgccggtagcctgagtgaggaccggagacgccatgggagctgcaggagcttgagcaggatcagttgacgtagactccattgaagacgtaggtcaggggcgactgataccatgtaatgtaacagaaaacagaggaacagaacaagaaaaagaaaagagagaattgaacagctcaatctttattgaatgaattaaggcagtatatatacaatggaaacaagaggagaaccaaaacggaaaataacagaattctgacaggtgtaacagaattcaacaactgcctacagtaaaactatcttaaccactaactgaattctcagtatctgttacatgtcaagtaagttaatcccagttgttaccagcgcaaattaagacaattatccttgcttggaaagggccttaaatctattctacaattgtggtaaaatagtgaagtagtggtgttaagatgactagctaatggtttagtacattagaatggtttggcttagaagatgattgtatgagaaagtgtagaaagctttattgttagtttggatattagttacacaatttgaaatccttgatggagtatttataattgctcacctcttgcattttgtggttaaaataatttcttctagatatttctttcactagaagaaattatatccatacacatctaaatgtttttagacttcacttagctagtatattctacattaatctattctggaaattacttaagttcttaaagaattttttttttctataaatgtgtagaaatttttagactaaagttttgtagaaatgtgtagcacattctaataccttttcttggtacacattttggtaatttcgatcaggtcttgtagtagctcaaacttgctccttggtagtgctaatttcgtgaaaatatttaccaacttttcttgtgtcttgcaatgcttgagctcaatttctttgattgtttcaacttctgatgaaatgatatttgatatgcttatatgcttggtcctcctatggaatacaagattcttcgctattgctatagttgatttgttatcgcaatatatctttgtagcttttttttgatgaatctcccatatcttcaagtattcttgtaagccatatagtttggcatgtagtcattgttgctgcaacatattctgcttctgttgatgcttgtgcaacaattgcttgtttctttgatgcttaagaaaatatttttgatccaagtgtgaaggcacatcatgacgtgcttttcatgtcgtccatggatcctgcttaatcagaatatgtgcggccaaccagttttgactcattcgtgatttcgtaccatattccatagaattttgttctttatttcaagtatctaagaattcgcttggctgccctgtaatgaacttgacttggatcatgtatgcatcttgataggagattaactacgtacattatgtctagtcttgtagtagttagatagtgttatttgtgtttctggttaggggacacgtggacacaagacaagtaattaaagcccatcagtgggccctaaacgacaagaattgggccaagcccaatgccaagttggccttctgggaaggcaatcacattgcacgtccaagcaaaccttcgccaagcatacttcgtattcgcagaatttcaagctttgcatagccagaaagacccatcaccatgcatctggaagccagtagtagttttccatttgccaatccgcatagaataaggaagttaccttctacggatctcggaaaaagaataatatgaagttaaaaaaattacataattaaagatcaaataatcaatgcacaattaattatctataatcaaaggacacgacataaacaactatcactgtgatcaacctgccaagtcatcatacagtcaatgcctcatgggctggactttatacaataagtctaaaagtactgtattatttgtaaagactccattagagagaaaatggtaactaagtataaactctattactttatatatacacaacgaatccttcatgcaaagggttaaaaaactcttaactcacaagcttgagaaattggacatagtgtaatccctttggtttttttagcctaagagataataaaattgactcgtggactaaagttctttaacactcaaactacgtaaatactctaagtattctctcttgatttatttcttttgattgtttttctttagttctcatattaaatagtttattttttaaaaatctcggtaaatatcttgatgctttcattgagagctagtaatcataccatctcgaattacgttcagtaattatgatactcacccaaaacaggtttggtcttcactatactgatcctaatgttaagacaagagatacaaaagatctaactgaggtgaccaattgccacaagaaagatcaaatctctaaggatcctatggtcgaagacgatgaatcatgagagaatagttctgatgattttgaagatgttcatccagacatgcctaaagatgatcaggacatgcccgccgatggtgctgctagaaagaaagataatcttgatgagtcagatcctgtggtcacaatggccaagaaattacaaatagctaaaaataaaggtgtcccctaccattttgtaccaagttaaaaattacataaattgagttagaaaacatagccttttccattaaattattctctcggatactattcttatactttccagaaagtcgttaacaaaaatggctaatgctgaccaaatattttcggtaatcttcacccgcgataaataaattaatgtttttccaagtgtgcaccaaacttagaaactcaaaattcccaattaattgtaatggattacatggcatatatttacagtttgtaatatatcgtacggattaccaatattggaagtcagagacatggcttttgttcttttactctaaacggaaaatattgtgtgtatgtgtgtgtgagcttgatgcatgtgatgttacccttttcaacagtgtaaaactctttccttcttcttcttcttcaaactcaacaaattaataaaatgaaaagttaaagtactaactcacgtgtagcaaagttttaacacatattgctcagcatattcaaaataatatatatatatatagaaagccgaaaaattatttaatgtgatgaatatatgttgcacgaaaacgtgaactattttaatatgtactcaatattcactgtacgtacgtgagccatgcatgtgtgattgctctcattaattttgatgaaaaaaaaaaggaaactgatgatatagcacccgtagatgttagaaaataatagtactattaggtaaaactaagaatgactatgacttcacatcagtgacttaagacaaaaaacaaattgatgatgatagctatagcatatatctttttttttattatttaattttttatgggaatttaacctataccatagatcttgcatcagtgaaattaaggcttttacactgtaggaactcattgacactgttttattgtttaaaatcaaatattatatagttttctaagatgagaaatttagttgtaattataatctttttagggggaaaaaattagcgagtggattttaatttattgaaagaatttttatctttttcagtaataaatcaaaaaatttgatgatgtatacatttaatatgtattattttatttttaaaagaaagaattcttatgtgatattggcatatataggtgggccatgcatagcagcccactcatagttttaatggtcaggttacaaatgaagaaggttaaaacttaagtattagtataatttaatgtcaagttagtcagtagtttgtttatccttaattaatttattgtgtgaatttcgaatctatgatgattgatgaatgttaaaactcaaagtattagtataatttaatgtcaagtttcacctattttatttaatttgtaacagaacatgtaatcaagacttgttactcaattttaccaattaagatgtgatgcaattgagtactgttagagtatagtacaagtgtaagaatattgaacaatttataagagtgtgactaactctactcatcactatagtaggttagatatagcctcataattcttgtgataatattgtattcaatcactaaccaaattgtgtgcacgaaaaaaaatagtagaaagttgcacgagatctctcatagtgcctagatcaaaacaaaataagcgagcaagtgtctcacatgtaaccgctataaatatatatatataaaacaagcaataatatagttccatttattagagtatgagatagaatctcataattattgtcaagcaccataagtgacttattgcagtgctctatttaggattgtatactgctatatataagtaatgtatactacacattacttaatattaatatggttttacacaataataatatttatttaattttagtaaataaggaatataattataaaccaatttataaattgcgtttcaaatggattattcatgtggtatatatactttcataatcacattataattttttaaaaaattaatacaattattatatgcgtgcgtgtataaataataataataatctgaacctctatacgtacttctaattaattgtaattttcttataaagccactttattatttcccatttgtgtcgttatcttatttctttgaactattttaatattaattaaaaaacttatatatttatatatttagttctgttctacctagctaatatatatatacgtagatctctcacaaaccatcctcactactacatatactactactctttctctcttctattcttctacatttctctcacatttatttatatatatacatcgatcttttatttatatatatacatcgatctatttgaaaagaaaaaaatgagtagtttattatctaagaaagcagcatgcaatgctcatggtcaagattcttcctacttcttaggatgggaagaatacgagagaaattcttatgatagaattaccaacccggaagggattatccaaatgggtcttgcagaaaaccaggttaattattatatatatagattatagaaaaatgtattatatatgaattaaaattttcttacaattctttgtttttggacagctttgttaccaccttctagagtcatggcttgctaataatccacatgcacttgggtttaaaagtcaaggtcaatacattttcagaaaacttgctctgttccaagattatcatggactccccgaattcaagaaggtaattatcattagatattctataaaaattaatatattaaattataggaagaatactaaacattattatttttcttttccaaattcaatgtgcatatatataataaaatttggttacagcaggcaatggttgaattcatgtccgaaataagtggaaacaaagtgagatttgagccgcaaagtctagtgctcatcgcaggtgcaacctcagccaacgaggccctcatattttgcctagctgatcccaacgatgccttccttctcccaactccatactaccctgggtacgtaacctaattaattaactttagttacccttattattaatttcattaattattctatcactacttttcactttaattagctaaacgtacgtacgttagtcgtagtaaagtcactaataatgccacagctagctttcactgggtcccacttccttcgtgcatacgtgattcgggttctacatcaatcatcataggatattataatatcttgtttcttattcattttagtatagataaaaattgtttagcctatttttttttaaaagatggtataccttatatgacttagttatttttaaaattatttataaattttttaaaaaaaattaatttttttaaattttaaatattctgaataatttatagtattgtaaattatttaaaattttctaaaaatttacaaataatcttaaataattacgggattatacaaacaaaaattaaactaaaaatctattctaaatgttaaaacagataaagaatttattaaaacactattagtggttttaccaaaaatcttctcaatattttaatatttaaaaacaaatagatatgataaagaagaattgcatatatgtaatgtacttagtttttgcagatttgatagggatcttaagtggcgaactgaagtggtaatagtgcctattcattgcaaaagctcaaatggctttcaaatcacggaagagggattggaacaagctatgaagatgccacaaaccgtaatctaagagttaaaggtgttttgattaccaacccatctaatccatgtggcaccacaatgacagtggatgagttgaatctcctccttaacttcattgaacttaagaaaatccatctcatcagtgatgaaatctattcaggaacagttttcaacaaaccagactttaaaagtgtcatagaagttctcaacgagagaaacaataacaacaataatagtactaatcaaatcatgattcgggaacaagttcatgtcgtttatagcctttccaaagatctaggactccctggatttcgtgttggagcaatatattcaaatcacaagatggttttagatgcagccacaaaaatgtcgagtttcggtttggtatcttctcaaactcaattcttactctcggttatgttatcagacaaatattttacgaaaacatacataaaagaaaaccaaaagagacttaagagaaggcataaaatgcttgttgggggtcttaagaaagcaggaataagttgtcttaagagtaatgctggattattttgttgggttgatatgagacaccttcttaagtcgaatactttcaatgctgaaattgagctatggaaaaagatcatttacgatgtgaaactcaatatatcacctggttcatcgtgtcattgtaacgaaccaggttggtttagagtttgttttgcaaacatgtccgggagaacattgaagctcgcaataaaaaggttgaaagactttgttgctgatcatgatgagtttaattaccacactaaatatcaccaacctactacgtaataggcttttccacctatcatttcacatccaccaatgctatcagctccccatattgtaagtacagtttatatatatatatatattctcttctcttatatatacgtataaatgaattattacacatgcatatacatcaataaactagtatcatcatcaatccaatcgctcggtagtttttttcaaaaaaaagagaaaaaaacgttaatatgatcattttggaccggtattaattaaaatgcatggtacaacatgttatactgaactcaattttcgataatttttttcttttaatacatatataatcaacttcaaaacaatttctaacacgaacaaatataaaaattgtaacaagtcttgttgtaacacttttatattgggttatttttaaagtttattttaactaaaaatcaattctaggcattactttgtacaaatctagaaaatacaatgtcaaatttattatttaataaactatttaattagtaatttttataaaatacagaatttaaaatagtatttattagattgttaatattattaagaagttatttgtgactaaaaatattattaacatagaaatctgtaattaaatgtgtagttgaggcaaaacttaaaactaaattagtaatgaattgtatctaaatactagcattttaaaaataatatttagttaaaaaattatattataattaaaaatttgttactaaacaaaaactgtttttgcagtgtgattgaatcgtctttgcctctgaattaatggtttttacctagctagcgaaattccccaattacaactaactgttaaaattatgttatatctgtttattttttaacgatttgatggatcagaactgtctaaaaagtaggcagaaagcaaaccaacatatatatgttttttaatggttgttataattgttattaggaacaatttttgtcagctaaaaaaaataatttacggtataaatatctaagtttaattttacgattgtaaataaatatttaaatttaatttttaatcgtaataatacttaatttatatttttaaaatttttgtaagtacctagtctttaactgttaaattattattcaaatgttatttttttattagtatatttaaagtaagttttaaataaaaaatacatatatttaatgacttagaccaattagagatttaacttgacatttaaaggtaaggtatttagaaaaattttaaaattataacttaattgctctaaaaaattaaacttaactattcatgtataaattactctaaaaaaaactttacataagctataagagaaaacaaatcattgctttgtcaaaaacaaaaattaaaaggcactaatagttctaacactacttaaaatgttaaatcactattaataatattaaatgttaagtcatatataatttaatataatatttttttttttttgaaatatggctataaatattaatttattaatcttccttggttctaccatgcataagtactgtatctaattaaagaaaataattattttgtgcccacgtgttgtatgcatatataaattatggaagtttttttttttttttgaaaaaagaaaaattatgtcttggcgcaggtattagtttatgacatctgtaagagagagaggctgagaagtcgaggttaagttgctgtctctgatattttctagggtttgtaatattatatccttaattcataatcataatgcgttattaattagtagtactgtgtactgaaatttgaataaatattctgtaatgcatatacgtccaaaacttatattatatttatatatttgtgcagtactatattctcgtactatctcatcagttattaatattataggaattaatataaagctatttaattctagtacaaactcgtgaattctttcatataatcatcatcatcatcctcttgcattactactaccaaaattatttgatagtgtatgtaattattatgagtcatactcttgtccaatgagaggtgactatatatatactatactattcaaaatatatatgtcattttaatttctgggtaccattttaattatatatagccctctaactaataaattttgaaatttataatgtcagtttaaatagtttattgcactgatatatatttgtgtaaaataagttatttaatgatgataatcttaaaaatatttgaaaactagtaaaatgtttactataaatattagtaaagtactattatacatatcattagagttagtcccacattgttaatgtaaaataataaattatcatatataaaatgaatgaactactcctctcatagtcaattaatttttgaaatggaacctcaatcactttatcccaaattctaacaagttatcaaagtcacttatgatctgttatgagcccaaagtgctatcggtccaaaaaaatcatttgtatccgttgtgagccaaagtgttgtcgatctaaaaagatacttttgttgtcccctttaacttccatttgggacctttagctaatctatgccagtttccagtattgggtctttgacttgtttcaaaattcacaaacgtgtacacccataaatttcttgatatttggtcttgtggaattttttcaaatgtcatgttcggttatgtgacctcttaaagatcgttcgttatacccagacttttcaagcccaaacataaggagagtgtatagagttactaccacattgttaatgtgtgaaaataaattgtcatatataagatgaatggactactctactcataaccaattaattttgagacggaagctattcaccttattccaaattccaacacatacacctatatataatttatattatattttctctctccccatgctgatcagatctttctcgttagggttaaaagtaacaccttcatacgtacgtacgtgtatgaaacaatatatatactaaatatatgtaagttcttggtcttacgtacgtatatgtaagttaaattatcctttttttggctgagacaaaataagctatatatattagggtttaggaaccatctattttcttgtccatatatttctttattcaaactattatttctgaaaagataaatagttaaattaactctgtccatatatttctctattcaaactattatgtctgaaaagatcaaatagttgaactttgtctagctagccctagtaagatgttagggaaaagtagctatttgatttggtgtgaccaactctgctcccacaacgcaatctgattttggggaagagatattgaaaaaaaaaaaaacgaaagagtgttgctatattcacatctctgctgattaaatttaaaattagatttcttcaaaaaaaaaatattaaaattagatctcaaatataaatttaaataatttaatataaaagtatgtcgagacctaatattaaatttcacaaatccttgtaagcacatgtgatgtgatgttagatactctatggtccattgatgaacttgtctggtttattttaggagattttgctatttgtagagactttttcattcaataatgttaagggacactttaagctactaaacataaaaaaaaaaaagaaaaaagccataatattattggtgtaatttaatatcaagtcccacatattttaatttaataaataatataaaaaatcactaaccaatcacacaatgttccacatcggtgtgatcagggccggtcttaagttgaaatgggccttaggaaaaaggaaaaaaaattggacccttattataataataaatggtatttttaaaa

SEQ ID NO: 17383 - DNA, 3062 bp, Cannabis sativa
taagaacattttttatgtaaaatgccctataataatatagtccattagcacaataaatatcaaaataataattttatccttctttggtcaaaattacaaaaatatcactaactcataaaaggggccttaaatacaataattctcaaataatttcatataattaattatataataatataattactcaattataactaatccatttactaatctcgagatattacaagcacattagtgatgaaatctgcctcagaaaccctactgacatgtccaaccgtcagtttgcaaattgaggtctcacgcgcgcatccttatgatgtgtgacacgcacaaaccaagaaatcgatgacacatgcactttaactcacgagatatgaaaggtctacaagcctccacgacctttcacctcaaaattttaaaatgcctgagatagtcatggctccgtgtaataccacaagtctgggtggtggctgcaagcctccacgactctcgagctccaaaggcttgggagttaatgttaccagcttttccaaacaggtggcatttatgcatccattgtgcccaaattaatttacgagcccattctcaaggcccaaatagtcagtggcccaacccacgaaggaagtcgggtggttggtctagatttgattaagacttgagtgcaagcaaagccagacaacaaatcttgaggactgattcaaccaaaactagtaagtgtttgagaaggcataaatggattctcattggacatctcggagaggtagtctgagggtgtcacggaggtcgatcatccacgattgatctaacgtggcacacttctgacacaaaatcttacaaaagtaagggtttatcccccacatcagacttgtaaaagacacacaacacaaaaagtaatttaccttttgtccaacgtccactactctgacatttattgtacatgatcaacgatgtatggacacatgtcaacatcatctgtactacgttgtatgaaggatatttatacctcaattgggtctcacctatggggccctaagtcaatattatattgtattttactctaaggatcttattttcatgtacaaaactctaacgggttcgggttctttcgatgaccgaattttagcctataaataagacctttaccccttcatgcaaaggcttacgaactttgacttgaaactctacagaaattcgacaagaacacacgtgtgtaaaatactctataatcaaagagtttaataaatattgacttttggactaaaatttattaacaccttaactacgtaaaaaaatttatttttttattctttaaacattattccttagtttaatttataattaagttagtttctgaaaatctaaataaataataattatgataaaaaattgataaaccaatcacgaattcatgatacagttgagtactactcatgctagcaatgctcaattatactaagactatctccaatgaatggtgtatattttgggttaaatttggctcaaaatatactacaggactatatttggcccaatttttatatttgtgccctaatacataaggtgcaaattagctataaaagttaataatatcattaatactcattaaaaatattcaaacaattaactttatttatattattttaataacttataaatataaaaatattttttattaatgaataatattaatgagtggcaaataggtaataaaaaaaagtgatatttattgtgggctaaaatttaacacatgttattttttgtgccaaatttagcacaatttttaacttaggccaaatttggcacacattttacatcattattaaagttaacttttagcaaaatattctaaaaaatgacaatacactatatttatagctctctattgaaaatgctctaaattggctctcccaaaagccatattagaaaggcagccaaaagctaataataaatgtcaattcaagagagactaaattaatagtaaagttagattcacaatcaaaaagattaaatttgtaaagttagattctataaaaacaacatgaagtgatggggttacttgttcttttggtaaaggaaaaacttgagtgggttgtgtaactgttgctatatatactttggtgcacttccaagaaggaggtcacttctctctcacacacatataatttatttatttcgatatttgaaataattttttagtttaattttttttttatatttgtctaagttgtaattattttagatattctgtaaaattttgagatatttaaaaaaattaattaacactaaaaataataaagttcaaataatctatttcacaaacgtataaaataaaataaaaaatcgcgtttaacatactattcaaaccttatttccggtgtgttaaacttttctaaatttctaaaaatttcacaaaatatcttaaataattataacgtaaatgatcatgaaaaaaaaaattacactaaaaaattcgtaaaaacagatagaaaatacattgtaaaagcaccatatatatataaatatatatatatataaataaatacacaaaatccctctacaaaaatctccaagatgaagatgagcagagatcatataaaattgaatagattagaagaagagataaaggcagtcaaaatataaggttgatgaccatagttgtagtgacaaggaggtcattagggtttataatatattttaatatatatcatttatggtcttgacttgagttgagttaatttggtaatagcttagatgagttttaagttggcttggctgcccccaaaataaaagagtgattagtggaaaattaaagggtttgagttggaaaaaggagtagatgagcatatgagttagtggatacactgatgcaacaaacatgtaaagtaggaaaactccaataatcaaaagtcaggcacaaggaaaagcaagttgattgattgtttttctgatgtagtgacacaaatagccttcttcttttttatttgtattttttaagtaaaaataataaaaatgataccacatactgaaatttttaacttttttatttttatactgtggggcag

SEQ ID NO: 17384 - DNA, 5813 bp, Cannabis sativa
tgacattactataattgtgagtaattatatgttctgaatttaacagaaattgtatatcaaaccttaagcatgaaaaatacatgtaaagataaataacttcaattctttattgaaatttgaaatgagttttatttatggcgtaaaatcccaacataaaccccttcactttctcacaaagggggatcaaaaaaatgacatagctgaagctttgctaaaatactctctaagctttcttcatcttcaagagaaacctaaagaactagagttagagttttctcataaacaccattcgtaatacattttacaatcctttaaagtcaatatactaactcgtggattagaaatatttaacgcctaaaccacataaaatctattgtattttatttactatttttagtatttcttaagctcttacttaattagtttgtaaaaattttggtaaatacccatcaaaaataacttaccatatgaatgtattatgtgtatacaaatatcattactcatcttaatatgctttatcttcaccttggaatcctaacttaaaaggaagctgtgacaccaaaggatatactaggcgagatggtgctgctattacatcccaaattttctcatttgaatataatcccatgaatccaggttcacatttgtgtcaccacgtgtctcctcatgcaacattttgtgtggtcgataacagaggatccaatccaatccatgataacttagcaacttaataaaatctaagggaaaaatataaaattttgccaaatagattgagaaattagtaagagccacagctgagaatgagataggataagagtttagaagaatgtttagtttccacaaaaaaaaatataataaaataaaataaattgttgagaaaattattccaacggttatgtcaacttcttgccatccaatccttaaatataacatatattttcttatcatttatctatttatttcacctccctaaatcacttatttatactctacatataattttctgatatcctttactcaatcatcaatcttcttcattgcaagtaaaaacactagaaaatggaacagaagactaaccaacgcattgcaaagatctcaggtcatctttacccttcaaattcccaggtaagcttatttccatgtatgttttgaaatgatatttgctatgtttgttatgcttagcatgagattttatggtgtaactatagattatggaagatagttctgaggtgatgatgagagctaactgccgagccaaaggtggagctccgggcttcaaagtggctatattgggtgctgctggaggcataggccaacctctggcaatgctaatgaaaatgaatccacttgtttcagttcttcatctctatgatgttgttaactcccctggtgtcacagctgatatcagtcacatggacactggtgctgtggtaataatgccttattatgttaattttcttcttttggccctttttctctttttagctcatagtgtttggaagtaggtgtaaaatactttattgtttcttatggaattttaggtgaggggttttctggggcaaccacagcttgagagtgctcttacaggaatggaccttgtaatcattcctgctggtgtgccaagaaagccaggaatgactagggatgatctttttaagatcaatgctggaattgttaagacactttgtgaaggaattgccaagagctgccccagagcaattgttaacttgatcagtaaccctgttaattcaacggttccaattgcggcagaggttttcaaaaaggctggaatatatgatccgaagagacttctcggggtcacaatgcttgatgttgtcagagcaaacacttttgttgtaagaatcactcaaaagggttcattaatcagctttcttcatagtctactatgctacttagtaaccatgatacttgataatgttacacttgaccactgctcttaaaaccactatttagacatgttcatcgactgtgttcatgttcgtttaaatgattttattgcaggcagaagttctgggacttgatcctagggaagttgatgtgcctgtcgttggaggtcatgcaggagtgacaatcttgccacttctgtcacaggtaatttagaaccttttcttttgttttccatcattgttttaaacaataataacagatacaatacatatctctctgggacaggtgaagcctccctcttccttcacccaacaagaaatagaatacctgaccgatcgcattcaaaatggtggaacagaagttgtcgaggtaatcccttgaaaaacgaccaagaatgatacttgatattgcaaaccaaaactgggattttgtttaacattacattgatttttaacagtttttttattcatttgttgcaggcaaaagctgggactggctccgcaactttgtcaatggttagccataatttactcaaaacatccaacatcattacatgttgacttaccaacttattgttgtaagtaaaagcttatgtttctcacaagtgaaaaacaaaacatttataggcatatgcagctgttaaatttgctgatgcatgtcttagaggactgagaggagatgctaatgttgtggaatgctcttttgtatcttctcaggtaaagtttggtgtcacgagcttgagatacatattttttctgataacaacttctaaacttgtaaaatgttttcaaatgacaggtgacagaacttcctttcttcgcaaccaaggttcggctaggccgtagtggagctgaagaagttttccaacttgggccactaaatgagtacgagaggtataaataaaacagctattttctattgtttttacataactaaatgatataatcacagtacaactgagttaatttactcatctctaatcaggattggattggagaaagcaaaaaaggagttggcagaaagcattcagaagggggtatcattcatcaagaaataaaatgaaggcagtcagtgaaattgttcttatgtaattataatgtattataacaagtagtttgtatctggaaccacctgatggaaacgaatctactttgttatatgattatagcagatttcggaaccagacaatttacaactatcagcttgaggccatgagttaagatcatgttaaataaaacataaaaaagttcttctttcttaaattcaactcaagatgtatcactatgttcaagtctcaagcctctcaaccactcactcatccgggttatgtacaatacaaacttatacttggtttttaatattatagtaaccaacctcggggaagtataagtgaaaatggcgacctacatggtgaagtccatatctttaacagtataattctattctaataaacttaaaatggggcaaaacacactttatctttacacttaaaccctgtgaccaggaaatcacaccttatgatgtacaccaatttacagtgtgaaggggtcaggaggagggtaaataataggagtccttgacattgtcacgttcccagtaagtacattaagtgccacagtgtcttccacaacaactggtttaataggtactattctctcaggcacaaccttgtcaccatctaccttagcaagtacctcaaaatgcatctttactgtctcaggctttgttctccattcaggtaaaccttcccagtaagcatcatctccttctttcaacttcttctctgccgcaaagccaatcttcaaataggtttgagatgaaacatcagccttcagcaacttaaaggagcctttgttgttagcattaggacccagaacagaagcgagtagcgtctcaaaaccaactacttttgagttggacccattgatggaaacaagaggccacaaggtggtgaactggctaggacttaagagggaagtgacctcatttgagagatcaacagatgaaagggtctcaatagctttagttttagagggcgaggacagctccacaagacctggcgcaagtcgcttaagcttaagcctgttactggaagaggatgatgatgacgatggggatgtgatagaagtggggccaacaatgcgaagtgagagcagtggagagccttgagtgcgggaagcatggcgtagccattcagccagggtaagtagaccagaggcaaagccattgccagttcgattgaaaggaagaggcagatcaagtgggtggcgcaaactaaccgatctggcacccttgatcgtaaccacggcaccatctgctaatataattttcttcaaaacaccagcatccacatcatgctgcaaattagagttacatcgcaaaagtcagtgtcattataaacttcataacacaaatcgtatccagaatcttatcattcaatacaatgtatttaattttaaaagaagctaagcggctcaaatcaaaattttgatttcactctacagtataagaatttaaaagtcaaccattcaatttttcaaataaaaaagcaacagtctttaagatattcttgtgatatcttctataccttagcaatccaaattcatccaagcaacatggattttcaacagaagaatcccctagtcatagtacgtattataactatcatcagaaacttaaaaaaaaaatgctcagaaatatatcttccttggaattctgaaatatcaacacactatcttcatgatttcttatgatcttgtccatgtatcaggaattgaaaatcatctaggcaactttgtttcacaagaaaatcatctcatactagtatcatcaaataccttatcaactataccaatgataaggaagagaaatttcaaacaatccttgagatatacttacagggagggagatcctcatatccttggcgtcttgaatccaaagctccattgggccagcgagctgaaacggggccaaaacaggaggtaacccactttccaatttactcttctcaactagcccattctcaaccctaaaaatgggcaaatcaacgtagtcccatttgtcaatatcctccaaaagcttgaaaggaaggaccttgttatcaacctcaacatcgaactcgtacgcaaccgaatgtcctacccgcgcatctctcaaatcaaaaccagatatcttcaagtcctcagcctgaagccccaaccatttcaccgtagcatctctcaaatcctataaatatatataattaaaagctaaaaattcaagaaagaaaaacagaatcgaaaaaattccaccaattacttacagaaatagcttttgggtatggggttgagaaatcggaagacgaaaccagagccgaagaagataaaggagatagcgaaacgacgagaagaaagaacgctgtgcgtaggttaaacgacctgggcgccattgtcgtttaataagagattttggtttggcggtggataatttgagaatgaaaaatggaatagagtcgttgaaaagaagttgggttttagagagaggaaataggcgagagaaggaatgttctggatatgtggtggggaatctaaggaagtaatgacgtggataatgggaccaatgggaagaaagtaaatgatgcgaaggattaaatttattggttgggagttgttggaggttgatgacgtggacgtttagaatagggaaaggatgatcgctagtactactccctcgacgcggttttaggcggggaatgcgtagagggttgagaattgctgattttataaacgacgtcgtgtgatcctcttgctgaatacgggaaaaatattaaagaaaaaaatctaaaacttgaaaatcatggcgtcgcccgggttcgaaccggagaccttcagtgtgttagactgacgtgataaccaactacaccacga

SEQ ID NO: 17385 - DNA, 4633 bp, Cannabis sativa
  modified_base (4594)..(4596): a, c, t, g, unknown or other
aaggtcacccatcgtgcaagctctatagtactaaaccacacacgatcactctaagaaactcagcaaaggactctttcagaacgaactcatactggctctaatacaacttgttagacatcgcaacacgtgaaaacgtgattactttattattgtaaaagtaattacacgaagaattgaacactttttactagaccacaatacactaaacacttgcgctcttattttaatactagacaccttttctacacttttgtatattaaattacaattacttgtgcactagaattatcactcaactcaccacataccaccaaaggaccaactctcctatttatactactcaagagtggtggattaatgtgctagaatgttctagcaaattgtcaattctaaaactttcttgaaatttcttataaatttaattctatataattgattctataattttactaaaatgatagaaaattctaaatacttgtagagaaggtgttgatctttcaaccggaaataccacgatggatcagccaacttagaaagcttgaaaagtttggtgagagaattgaacgaaggaacctccttaactagtttgtatcatcaatctgaatgaaattctctctctctctctctctctataatatatatattttataggcatagttatagacttcaaatagaatgaaatttcacattcattaacacattatattgatcacagtcatccaacacaatctcatactttatcaaaccaaaacaacaccaacaaattaaggtaaaaaggtcttgaaggagatttgcaactgaaattacataatccaaaaacaaaaacaacattagaaagatacaaagttgtgatgggattctgcttgcagagatcatcatcatgtacaagactggcttggcttgttgaatagagagacctgagaagagtaatcaccaaaaaccatgtcagcaataaaattttaaacacaagaatacttgaaaagatgtaccaaaaacagacatcaaaattactagaatgaagcatttacttactgatatgcaattatcttggaccaatatccagagttggaatttccttaattatgtgccaatcctcaccactctccttttggagtcttggtacgagtttaggacagttgttgatgcgtagaatagacagtgaagctggtagttttgttggcaagcactcgaggttaatgcagaaggaaatatacaacttgttgagtgaggtgagtcctttaaaagcctcttcatctaaagtggtaaggttttcacaacctgaaatgacaatctcctttaaactagatggtaatcctccttcaagaaatgacttctgacttttacattcatctatctttatagtctctagagattgaatttctttacttaaaagctgaagttggtcacattcgcaaatcacaagtttcttcaaggcaggaagattagtagataaagaaactttgagctctggacaatcttctagctccagctcctctagacaatgaaaagaattggactctttgatagaccattcattgagtttcggcatggattgaagacgcaacctcttcaacgttccaaatgatggctctgtccctttcactgaatctatgttttcaacttttgggaaatccgaaatcgtcaggagttggagggagggtagttgccccagtggtggcaatgagctacaattttcaaagccataaaggtccaaatcttctaactcaaatgatttatcttcaatccagctagggaaactgttacctttgtaatgaaatattgagagttgtttcagctttgaatgaggtttgagggcctcaagtacttgattttctttatcattagcagcatgactataaccccaattcaatatcagcttatgaagagatttcttctcctctaactcaccctccttaacatgatcagcctcatcaacattttcgagtctcgaaatttcaagagtcccacgcagaagttcaagctttcgtagaagttcaacaccaggttgggggtcttttcccacaacgaattcgcttaacgtctgtagagtcgtgatcttaccgagttggagtggcatctctcgtaagtaaggaggagtgtggagatgcctcaagttgcttaatttccctatctccttgggcaatgtagcaagtctagcacaaccttccaacaaaagtgtctgcaaattatacaatttgcaaactgtatcaggcagctcttcaatttcggtgaaagacaagtccaagtacttcaaatacttcaattcaccaattgaatcaggcaacttggttatgcaatgttcagaaagagacaacactctcaagcacgatcttggacttagcaatttaatcagatactccaccgacataaaaaactgcttagtcgatgaccccatcactccattacaaattatcgatgatgatgatgatgatgatgatgatgataatggcaatgctaaaagagttcgcagacccttaaatgaggatataacctcaaagttagaagggtcatatggacatcctttaatatatgtcaaataacgaatctttctttggtaatcagataagttcaaatcattcatgcttaaacaaaacccaccacttacaaaactagctaattcatgcatcaaatcatgcatcacaaaagccgatccatcatcacttgttggttgaagaaaataccttgattttaaactttcaaagtactggtctccatcatcttcattatctttatcatctccaccatcttccttcttagttaaaagaccttccgccatccataacaagattatcttttgtttttcaaacctcgtaccctttggaaacatagctaagtaagcaaaacattgcttcaatggtgaagacatataataatagcttaaccataagccccgatgaataccatacaaactttcttcagacaattctttttcaacttctgtccaaatcttgtcatctttttcgtcacgtagtaggccagcaactgactttatcgccaaaggaatagcacacttgctaacaatctttttcccaatctcagtgaactgattcgagggggtggcatgtttctcaaataaactcaagctatcttctggtgttataatgtctaggttgtgagttgatacagatttcataacctctgcaacagacttgttcttcgttgtcacaataactttgcttccatgcaatccacccgtttcgaaacaacttgttaaaattctccacatgttctcatccatgttgcgaacatcatcaaaaattaaaagaaacttctttgtactcagagccttgataagcttaagctcgatctcatatcggttctcctcttcttcctcctcttcctcctcttcctcttcatcatcaatttcacacttgtcagaagtgagcctctcaatgattagcttcatcactgtcacagcatcaatgttgtaatcgccaatcccaatccatgccttgatttgaaattctttgtttactttctcatcattggacaccagataagccagagtagtctttccaaaaccgcttttcccaactatggaaatcacagacactttctttccatcttcatcaaaagactttagtaactcttcaatgatatcatttttatgaccattccatacacaatcagattcttctacatgagctactgatctctctgtaagaaaatcaaggtaataataattataattattattattatcattatcattccttgtctttctagtgtcataatcagatgatgatgatgatggtggtggtggtaactttgtaatgatctcatttatctcagtcgatattgtgtcagatgaaatagatggacgagttatatgcattttcagcaccccaatttttgatttgcctttctgattctctcccgattttaaaattctcatcttataaaccaagtcatctgcatcaaacaatgcttctttaagctcctgaagccacttctcctttccatctttgatttgctccctctcagcttcatcaaggctacttttaagagttcgcaaatttgttaccaagtccttcagagacttagcaacaggtcctttgccttcgaataagctccacatcaatcctttattaggatcaagactcttaatcaacgagttgagcaaagcagagagacatgcttgatcaccattaacagccatggttttttctcaaacttgattcgaaaagtaaaatgacaggctaaactcttctctagctaatggagtacaaatgactcaatatttttaaatgaataaataactgcaatgttttttttttaaaaaataaataattacagttattcaaaataaaagtaagggaactgaacacaaactacttgaaatcacttttttttttctttttttttttaaaaaaaagtaacattatttttatattacaaaacaagtagtaaataacataaaaataagagttaataacgtaaaggactattttttttttttttttttaaattttttacctttttatattcaattctttttacatttttagtatcttataaaaataacaaaataaccatctcgaagtaacatgataataatatcaaaacaacaacaaaaaaataacatacaaataannnaaaattaacaacaaattaacaagaatacaacataaaa

SEQ ID NO: 17386 - DNA, 4592 bp, Cannabis sativa
catatatatttttagggccagccctgccagcaacacagcaagagaatcagcaagattcttcatcttcaagatgtactcatccacactcatggatcctttcttggtgttctaaatggcaagtcaaagttgaaactgttgaaccttcgattgagtggcaaagaggcttgcaaagacggtccaaatatcagcagcgaattcatagtgaagaacatgtccaagcatagccttaaagagagaatttataagccaactcattagtagagcatcaaaatgagtccaataatcaaaggtagggtttaatcgtgttcgtacctgcaaagaaatggatctggccgtggagtggtactaagaagaattccttcaagtccatgtgcacgaacggagggaagaattaacgagcgtcagtatgagtagttgtgtcaatcaagttgaatatttagatgaagaagattattttgaatttgaaattgtggtgcggcggtctgaggagcaatctaagcttctggtggacgatgaggaccgttgttgcaaggatcatcaagatcaaccataggtatgatactatgtaagagcagagaatttagaaagagaaaaagaaaagataatgaaattgaaaaaaagaaagctcaatcaaagatgtgagctattatgtccttatatataacttgtaacaaatcgagtttttacatcaaacaataacaactagctaatagaaaaagacagctaggaaaataactaaaatcactaaaagcttaaccactaactaacgctaacagtacttaatgattaatattaagaacgaaaaaaacatttttatattctagcaatttaattatgagagttttatttgcaccccgcaaaataataagtacactacaatatttaaaaaaatgaaactttaaataatttatacataacacttttaatatttttttaaaaaaaaattgtcacactattttgtgttaatttcaatatttgttaattttattttcatatattttttaaatcatgtataatttttctgtaataaaatttcaaataatttttttttttttaaaaaaaaaaactaaaactgaactaatatatattatgtaaaataaaaattcttaaaatagagttgatgcattgaccgtgaatatttgatcaattaaataaaataatattttcaaataaataaataatctaataaaaacatctttaataggagaccatataatagctaaaaataacacattatttcaaatattatatatttttattctcttttatccacatgtacatttttctgaaaaaaatattacaattacacctccaaaaattatctactatagtctcacatattatattttaaatattaaattaatgaagtctctaagtaaaaataattttttttcctaaacaaaaataaaaaaaaaaaaagaaaagaatatataatcattgtccatttttaacaatactcaacatctatatcattaaaatttgtctaaatagttgaaccaatgggaagattacttgaatgggcaacccgcattgaggagatatttggtagtttgttttggtaactatgaagggcactcggtagttaattggttggttgtttccaaaaatgattgcattaataataaataagtgaagtgaagtgaagtgcttagtgtttctgacaccttagcttactctgctaattacattcttccctggtctcctctactctactcttgtcttcacccctctcttaactcaattccaaacaaaattgcatctgggcaaagcgctttcctttcacaacatcacctctacttctcactttgttttctcaagattctgtcggggattgttctgtcttgtgatcccttcgctgcgcattaatgtccctttattcgggccctttctgcttcggcagcgtggcttttctgcctcgcaactcggtaagttttggtcaatccaagactgtgagaacctcagggttttcttctccaccgctcccttcttttgccagattgaatgaaaaaggtactcaaactcctcaattgtatcgtttcgagtgaaaatattacatgggttttcatttttatgtgaaagttttctgtttgagtcgagaaagttatggctttagtggaatgagttgttgaatttggtgaggagagctacaatgtctttgatttatcacttagtgggcaacatcttcagtctaaaagaatgtgatattttcctaaaactgttttatttttcaaaattagagatgtatattttcaattgttgttgcaagaactacactgggaaactaatgggaagatcacacaatcagaggattttgttggttaatgggaaaagatgggctattctaacactctcagtctctcattgacctggtcactaaaattcactatatggacacagagatatactttagcacttcacttcttttcaacattagaatctcaattatcctgagaagttatttcgtaaattattagtttgattacattgtttcttgttatgaatattggaaagttttgaaacagggaactggaaacatttagtaaataagatggtaacttatatggaagaactgagctagtctggtcagtgatcagggatgcttgtggatcacatacaattgatattcatccaaattgatgaatttttcgctcctcgtggcagctactgattgaattcaagcattaggaaagtttcaaatttggttagtaaatagcaatagttcagatgtaaactgtggctcaaaattttcaggcaatgaaatatattgcctgaattgatacgacgtatgtagatttgagaaaagagttgtgcctgcattgcttattagttccttcagcttcttggagttacactacagtatgtttggaaaagaacaattgtcgaacctcaattcagtacaaacaacattttaagtggaccaagctccgtatgagactccaatttgttaagcattcatctagaacacgttgtcttgcttattcatacaaacatgctcgaagtataataatgtacttcttggaacacacgtagaacttattggacatagtaatgcttagtcatggtagatgggaaatcttatgtgtcttttagtatcaattggacatgcactatccaatttgtaatgttctttatttatgtttccagttatatcatgttcagaccctaattaaatgatgataatttttttttctgttcacgttttaagttatagcaaaagcattaccgggagatggatcattcaaaacagaggattcctcacttgtggtttgttttggagaattattgattgatttcgtcccaactgttaatggagtgtcattggctgaagcacctgcatttaagaaagctccaggaggagcacctgctaacgttgctgttggcatagctcgtcttggtggttcatcagcatttattggcaaggtatcggatatctgatctttatttcatttcatttattatcttttaattttattcattcacaaaaataagcaagagattatatgttgattgttttcacatgagaaagttagctgttacaaaaaattgcatttaaatgcttgagaaaatgtgcccttggttgagtaacctgtagaaaatactgttgatttttgattccagtaattcaacttttatccggataagcagtcaatgaaataatagtgatggtggcaagatgataagtcaccaattcgattcacttatgctagaaggaatcgtaagtaatgagaagatttgggggtgggttgtttcttgggaactaattatgatattttccatttatttattttctgtgttgagttattttctatttctattttgtttattttgggaaagttcagagggattaaaggagagaaacaagggaagggaaaatcatgtctgttattgtaattgagtttaggcttgggagagctaccgggactctctcgaatgacctgggagtgtttgtgtttattctgctactattaataaaacttcgtcctatttcctattagtttctttggctgaaacagatacactactggtgtgtatcacaagatgaagaaaacaataaaatttccccacttaaaagtgaaggcttatttgtagccagttagtggatagtccaacattgcataaatagcaacttttacttaatttattatgtaaaactgtacttgattggtgcatatctccttttctgtacttgcaacaggttggtgaagatgaatttggttacatgctttctgatatattgaaggagaataatgtgaattgtgaaggaatgcgttttgaccctggtgcacggactgctttagcttttgttacgctgaagagtaatggcgaacgcgagttcatgttttaccgtaaccctagtgctgacatgttgcttgaagaatctgaaattgattttgatttgattaggaaggtatgtaataatttctactcatatagtgattattctaacatgcaattacaaggcggcaactatagaatcagttatttcacacagcagtcccgttttcaccttcagtttttctctactttctttctgtagcagttatgttacatgagctcatcgttctcattttctttgtcttaattgtccatca

SEQ ID NO: 17387 - DNA, 8715 bp, Cannabis sativa
  modified_base (8616)..(8616): a, c, t, g, unknown or other
  modified_base (8656)..(8658): a, c, t, g, unknown or other
atttgagagctaaaatggccatcaatttggcagtgatgggagacagaataacttcaaaagaaaccttataacagctgatcacaataccactattgtcccgcacaaccgcccccatcccgatacatccatgctactcaaaaatcacagcatcaacattcatcttccaagtccctacctctagaggcttccaaattggcaaccgggtaacactctgcgaaggcaggaacatagcggaaccaactgcaacctcctcccctgtttgaacctaatggttaaccttcagggaaggatacgataaggataaaagttttgagttctcttgaaatttatgcaaaaagaagctgtttctagaacccctttaggatcacctgccttctccccatgccgagccttattctgttcatactaaagcaaccagagcacatgaataaaaaaaacaactacttcatcattaggcaaccacatagtatgatcatgaataactaccttaacaagaattttcctccaaacatcaatcaattgagcccaggagaagctgccgaataattttaacaaatggacactcaaaaagatcttaaaagaaaaaaattagattgaaagcaatttgtaaaactcaactcacatattttggagccaaagtgttcctttatatagactaaagcctaaaggctatttacaaaatatctagagccacaaggctcaaatacaaatagcactaattctaacataaaagggaataataataatacaccataatgcaaacatcattgcagtacgaatgacacaatgtgcttaggaatcaacatttttgactcatgtccatttagaaccacaatgcataatagaattcaaagtaagggtgaaaaatcctttcgttttatatcttcacatcccctctcaaaggcaaggatgattcaatcactctaagtttatcaattaagaagtgaaacctgaagcttgataagcctttggttaaacaatccaccacttgatctgaacagggaacatatcttatatctagctacttattcaaaactttgtcacgaatgaagtgtatgtccacttttatatgtttcatttgagcatgaaaaactagattagatgctacaacactagctcccatgttgtcacaccaactaactgccataggtattggaaattcaagtactcttagcaaggattcaatccatgcaatctctgctgcaacatgtgccaaggctcgatactcaaatttagtacttgatcttgcaaccacaacctacttctttctttaatgaccaggacactagagtatttccaaagcacacacaatatcctgccactgatgtcctatcatcagggaaacatgctcaatctgcatctgagtatcctgaagtatttaatggttcatcactgatgtgcaatcctttatgcattgttcccttaagatatctcaacactcttttggtaccactccattgaactgcgatgggagcctttaaaaattgactgagcttgctaattgcatatgagttatctattcttgtgtgacaaagatacggcaggccaccaattatgctcctataggtagtaggattagacagtatttctccatcagttaatgacacaggctttcctgtagtagctggtgtagagcaaggttttagatttgtaaaattgttcttcttaccaaatcttctatgtatttaatatgtggtaggtgaaggcatatctcatccctaaacacttctattccaaggaagtagtgtaaaggaccaattaagagtgtacttcttgttgagttcagtgatcaaccttttgaatttgttgttattttttcctatcactatgatgtcattgacatatatcaaaacaacaatgatattagtaccatgtttttaaaagaatagagaagtttttgatttggagcctttgaagtgctagctgagcagggtagcttttagcttgtcgaaccatgctctaagggcctgttttaggccatatagtgactctttttagcttgcaaacatactcttatcttccttgtttcttaaatccttggaggttgcaccatataaacatcctcctccaatgagttatttaagaaagcattgttaatatctagctatctaatctcccaacctcgagtaatagtaatggttagaatgattcttacagttgaagctttgataactacattaaatgtcttaccaaaatcaatgccaggtctttgatggaaccctttagcaaccagtcaagctttatacctttgaaatgatccataacagttgaatcattcatgaaatatcaacttgttgttagttttatgctactaaaccaagtacgcaataaaagagtttcatattatctgattatcatcgtaccatatcccaataaatctccaaataagtgtacattaactcaaaataaaaaaaaaaattaataagtttagagtatacctcttgaagcgtatcaaggtatccttgaaactttccgtatattgtatctcttaatctagatgatgaggaaattgcaattggactcacaccagtatcttccaaatcatttcaccacacacaaggaatagtgtgggtaattaggataaagtgtataacatttgttcttgttgagttctcaacacatgagcaagaaaaattgagagaaaaacaatttctttttctatctataaatttctaaaattaagttcaggaagagtaatctgatttctcaaatcatgcttctatttatagtagttaaattcctttaattaaatcatattgaattgtttaaataaataaatatctataaccaaattcggttaatgatatttatgagataatctcttaacgacttgagagaagatctcaacaaccttaaaatatctataagcacttttccaaatagatatttacctaattgaattaattaaattattaattcaaaaaaaaaaaaaactctatagggatagcatacgctataagcacctaccgtgtctatttaggacaaggttggtgtattttttcctgacaacttttgtcttcacaaatttatcttaacaatctttatcttttccctatttaatcaatttaaaaaattatttatttattacaaaaataaacaattactattttgtcaattcaaaatagatttttccaaatatctttatacaactcttttatccctacccttgacagtttcacgatggtaatttggggaccatagacctataattttaagctccaataaactagattatttattgagtctcatcaaccaaataatctattgtttaataatttcatgattacgctactataaatatagaattgaactcttagtaattgtagaattatattaatgagtttaactggagtgtccattgatataatcaatttcagtgattagccctccacgtgttggttcgtaattagtttttatcaaattactgttttactcttctaattacttctttatcatttagtatcattaatttactagcggaagtataattcaatatcccatcagaattggtgcacaacactccaattccagaattaacacttaaagggaaccaacatttgatgtgttaggaaagtcaggattctataattgtacatcatttttccagccatccatattgttagattctcaaaacataagttgtaagaattatcttatctgagaaactttaatgagtgaataaaaaaaactaataataagagttcatgataatttaagatttaggtcgatctactattgataatcattataatatgaattaggtctttatgataaacgacatgttaataaagataattttattcatatcggtcattgtcatatataatctctattacatacaatacattaacttagatgtctcactacatcagtaatatgaacaaagattacttacaccatagaacatgcattagtgaattgttactagcaaccattgattgaagattttataactttaatatgtttttgactattttattcatagttaagtggtgttagttttctatacagctacaagccacaatctcaaatataaataagagattttctaatatttaatataaattatttaataaaaaaatattaataacttaacatttatgcttttcagggcataaattctaacacttgttgccaatcaaattttgatatgaggttggtggtaaaagtacacaagtgttgttagctttcagagtagtattctcatcattcatggctttactccaacctagatgtgaaagtgcttcttcaacactgcaaggtttagatgaactaggattccacacaacatgtcccaatgaagacttgaggctagaagatgtcgcccttggctcaagttgtcatgggatgtccttgaggaggatcatgcatgatagcagggtgagcagcagcaacatcttctacaaaatggtagcatcatctggtggaaaagataagacatatgaaattctcctctcacttcttaacgctaaagcatcttgttaagtaataggagattaaataacatgagcagggtcataagagtttacctgagagtctgtttgtttggaaggaacttctttaggcatgcttaaggaagtgggtggagaaggtggtgctatagaaggtgaacctataggaaaatggaaagaagggagcacagacaaggaatcactttgaattatgacaggttttgttggttgatagttgttgagaaagcaagattggaaaggaaactctagttcattaaaaactacatttctagagatgtagacttttcctattggagtgagacatttatagcctttgtgacattcactataacccaaattgacatatttcagagagtggaattgaaatgtttgagcttggaatggtcttatacaagggaagcatgctacaccaaagactttaagaaatgcataatttggtttccctagcatacaatgcttcaaaagaatatttgtgatcaatgctttctagagattgatattccccatccccatccattcttaaactcttaattttcttttcgaattaagtttcaacaagagttttaaattttagaagcttcaactttggtttttagaggatagatccaagtgaaatgtgtacaatcatcaacatagaaaccattgtttgacatgattggagagggaccccatagatctctatgcacaagattaagaacattgctagctttgatattggaagacttaaaaggtagagcatgtgatttatcaaattgacaagcaatgattcatttcatttttgatattttaacttgtcttgaaatttatacttgactcaagactttatatgatggatggcctaatctcatatgccatacatcactttacgttggacttagacttagtagtaataccaaaaaatatttgactcttagaactattggactcgattaaacttgaagattgagaagccaaattttagtttggtgcttgaagctagtaaagaccatcattaaccatcctttgaaaaagaacattccttattagcttctccttcacaacacaacaatcacagtgaatctcaacaagcacatttaggtatgcagtacctttaattgtacttcaagtatgttacagactatccagaaaaactatgagtattctttatgtggcaataattagaaagctactccatttcgatattaatagtaataattcacatgatgtggtctcctctagatatgctggctgtgttggaataacagtgtccatagtttttacaatactatgttgtttttctgcctcacacgtggaaaagtgcaaatagatgtggttaaagacatgtatcatttacatggtactaattatcatggaaaaattccaatgaacatgttttggttggtgccacaattctttctccttgggagctttgatgggattttatgcaaaagcattcatctcttctttaacaatcaagctcaaactcctcaagatcatgtcatgggtcttttttctttatccaaaaaatgatttaggaaaaataagaactcttttattggttcttgtgtttcaaaaggcttctacatggagagataatactagttggtttgtagagaacctaaatggcagtcgtttggacaagtattactttgtattggctacctttagtatagtaaatcttgtttactataataacttctactattgtactagttttaaatctaaggtgagagagttcagattagatgacgtagttaatggagtgtttcaatcatagattgtaattacgctcatagaaattggatagagtatttattagttattaatagtatttttattgtaacatattaatttagtatgcatgttatttttgtgtactaggactatatatcatatgaacttttttttattttgttatattaatgttttgcattattctatttgattatgataatgccattattagatttggatgcaatatgggtacaagcaataaaaatgagaaggaaaatatttgtgaaccttaaagtgggttaagtaaaatttttaatcattgatttttttcccacataattgcacaattattaatattactcacaagtcacaattttctctcctttgggacaggattttttctggtggggacaacagattttttttggctcagattcataaagttcttatgtttggtatgagccaaagttgggtttatgatcactttgttggtgaggttgtagaagttgattgcaatgtctctgaagattgtcttcccactttgttatgagaggtcgtccgacatatgttccttttgtggtattatttatcacctatttaaagagttgaagcctccaaatattccaaaacatgtcattttgaaatatggggagtggatacaggttcctgctccagcgaaagcttatgttgttggtactaaacatgttcagttttgtgagcaggaaaaagtcgtacacggtgatcctatagagggtcataacgctggacaatttgactatgttgaaaaaggaaaggcagaaaaggtggctaaagatgtgggtcatgattctaggaatatttttaattggcaccccaagtaagagacttttttattgaaaaagatttggaaactaatactataacaaaaccttgtaattgggttgacaatatgacatctccagattctctacttaaataatgttatcctaaattttgtccacttaaagtagcatattcacataagctaagattgaggacatgtggaataaacccttgtcaatagcaagacaaagtctacttacaaggcatggcaaaaccaacaagcaacaagcaagaggagttaagcaagttgtcaagaagctgcacaaccatgtctagctggccaaagggagtacataggttggctagaaggagcttgtatggctaaccagagtttgagcacaagctaggtagccaaaggtgactgctagaccaagaaggggctcgttcgaccaaggtagcctgacccttgcaaggaaagttgtacaaaggttagccaacacctattaaggttggccaacacttgccaaagttggtaggcacttaacctgccagattccgccaggaacatgacctggcaggaacatgacctgcgagaccataacaagaacatggtcggccagacctagcaagcaaatggatggccaaacctcagcctacaaacattgtgtggtcggtcagcctgcacttagcaagtgcatggctagctagcctttacctggaaagcctttggtgtgcagccttcatctgtggatagcatgctaagctacgagttgggccttcacaacccctaaaataggggaaaatatcaacaacttctttattctcaagggataattaactcatttaaagtttattatttaattatgtaaataaggctttgtttacctattattagtggttaatcttgatataatctctactatataaagggcattagttaaaccctaatccctaagtctaagtcttaagctctcagttctaactctcaagctttaagtttgaaactcaactctcttctctctttctctcacacgtcataggcatattctctccatcacttgagattttccatctccattctcatattgtaatcttaagagagccacttcaaattccacaatacttgtgatctgagtggtattatctctggtattaatacaaccaaaaggagagtagatcattacttattaactaagggggtgaacctttattaaatcatgtgtcttatttacttttctattcttattgtgtaacacgtgaaaagcatcagtaataaatacgactccgctgtcagttggccaaatttgaggtcaatagtttggtgctttcattgaaattgagttgtcaatttacctgatcaaacaccatggttaacataaggggaactccgacttcaacttctgcctcatcgggtctttctcaagaccctatggaagttgatcctaatgttcgtgttccagcaacaattagaatctccacgaacctgatggatgtggccaaccttgccatctcagcaggcatcacaaacctggccatcgcggctggttaggtggacactaccaacctggttggtcttaatgaccaacctttgccgcccaaggaggaccctattggaatatgttttaccagnatctagatttactaccgtgtatgttatttaacatcctaannntgaatttctaaaataatgtaaataaacacatataaagtttaggaaaccttacagtgg

SEQ ID NO: 17388 - DNA, 7270 bp, Cannabis sativa
ttttaataaatattttttaaaaaatgaatgttttattcctcccgaaaaaaaaaaaaagctccccatatttaatatatttttatatttagtgtaaggataatatagtaatttaagcaaagtaaatttatttctaaaaataatttctaattctttaatgctattggttagaatcatcataattaaaaaaataaatagatttttttttaaggtcacctgctatagcatgtcaccaaattgacacctcatcagtttttttattacccatgaatgagtattacccattgagaaatcatccatatatatatatacgctaagacactagaaaggataggatactcaaaacgtcatgctcattatgtaggtatgataaggaaaagcataaacatgtgttaagcacaatcaagaaaggtgataattagtatttatgtggtgcctaaaccagtgcttaatacataattatcacttctattgactttctccaatctgaagttttgcttgctttccatagagtatatatagagaacttcacttgattggctcatatcccttactctcttctacatgctcctatatctccccatttaaatattattttcaaggacaatggtatagttgtcaagtaatagtacacaaatatcttacgtatatataaataggggttgtatgtaaaaccttgaggtttcacattcatcatgtgagaggaaactaaactatagcagtaggtaatataacttgttagggccaatttaataactttttttttatgattggctcatcaaacaaacaaaagagaatgagaaaagcaaaagttacagtacaaccatctgcaaaaccagagtgtaggaaactgtcaaaattggccaaatcgataaacccgaacatattgcttcgatttgcccaccgagccaaaaaatgggccacaccattgcacttcctagagatccaatgtatctaccaaaggttaagtttaccaaccgaggaaaggaagttgttaaccaagtcttgaatgttatgatgcagtgtgtgaattttagaaagttttctttgcaccgcgaacaccgcattagttgaatcacattgaaaaatcacattcctgtagccaagattacctgttgcctcggcacccccgcaaagagtagcaaattcacctataaaagggtcataatggtcaattcgaaaggtaaagatttttgtgacaactccatcctcattgctatacaccgtcgctcctattgattgagaatccccaattgcaacaccagtattgcacaacatccaacctgcaggaggcgagagccatttggactgcacaacaacgatagatagattaaccgcaggaagttcattaagccttccattaatatgttaagaataactgcaatgggagttgattttccattgtggataaggctgtttctctacttctagatactttcaaacacaacggcagtccccctaagaaaaggtggtaatgaatactgctaggccgattctgctccttagagaaccaattcagccaaccatcccaattgggaaagtaagccacactagttctaatatgccgtgaaaaaccgaaccaaatttctcttgcaaaagggcactcccaaaaaagatggagagagctttccaatgccaaagagaagaaaggacaataaacgtcagatttatagaaaatggttcgaagtttttccttattgagcaggctcttggaaaggattttccaccaaagcatcttaagcctattatggattttttctccccaaataattctccgttttctatcttcagccgtagtggttcttagattcttgataactctgtaggccactttaataaaaaaagacctcattaggctctggcaaccaaagccagaagtccttagaaggccggttggggagggtgatgttaagaattctcttcgcatcctcattcacaaaacaatgtttaactaactcctcattcaaatgattttgagaaatgaagttacttatcatactaatcccacccgaggcatcaagatgaggtgttggttgaaggttatccctgggacccaaggatcgaaccaaatggacgtggagactccattacctattttgcaacaaagacccttaaagagatagctgcgagcacgaaggatgcccttccagagaaaggagtctgaagttttggcttccaagtcaagaaaagtcattaaaatgttgtcctttgatatacttggcctccatgagttcacgccacatgcaatccttgtccatcaaaaattttcaagcccatttcatgagaaaagccttgttggtagcctctgttgatctaaagcttagacctctaacaacttttggatggcacaaattctcccaagaaaccatgtgcaacgttctttttccatcaatatcgctctaccaaaaatttattagtaattatcaatcttctttgctgtcgagataggaatgacgtccgaggatgcaacatagttcgataaggttgagcccacaacctttaccagacaagtttttctctcacttgacgaaagtttggccttccatccttgaatacgctttaggacacgatccacaatctgttgagtatcctccgttcttttgagagatataaacaaaggtaaacccaagtaagtggccttcctgttcattcttttcatcccaagaagctacgatatggcctgagctttcctactggacacccttttggagaagaaaatagatgatttttggatattaaatgattatcccgaccagttgtagtaagtacctagacaatccaagaatgatctagcttcacgtaaagatgcctgcccgaataggactatgtcatcgacaaacataagatggttcagtgtagccctgttcctcgctaatttgaacccttttattaatccattgttttccttgtcaatgaggagacgtgataatgttttagctgccaaaatgaacagagatggagataaagggtctccttgtctcaacccctgctccgaattgaatttcccaacgatggagcaatttagtaatagtttaatttcatctaccaaaatgcaggcccttatccacatagtaaaagatctggagaagtttaagtagcacagaattgataaattcccactccattttttcgtaggttttctccaaatctaactcgattaacataaaccctcccttgcctttctttctattcattgaatgaacaatctcttgagctatcattgtgttttctataatgtgtctacctttaacaaatgtcgcttggttaggggagatgattttatgcaataagactctcaatcttgtctcaataatcttggacattactttgtaggccacattgcataacgcaatgggccgataatcattaacgaaggccggagaatctttctttgggacaaggacaatggaagtgttgttaataaattggtgcagctccaaatgggtgaagaagtgagtaaccatttcaataagatcagcttgtacaatgttccaatgatgagaatagaaacttggtggtaacccatcgagtcccggagccttatccttgcccataaaaaacaccgctgtcacttcctcaccattaggaatggcattgaggatttcattttcatgtacagtaatcatcttgtagaatagaccatcaagaagtgacgggtggcagcttgtatgttttttgaataaatcattatatttcagaagaaaataatggactatctctttctaatctctaatccaatcacccactgaatagttcttaatacaatgtatgtaattcttccgtcctctaattattgttgtggccatgaagaactttgagcacatgtcaccttcttgagccattgaacgtgcaatttttgtttccaatgaacttcctccctaagcaaggcctccatgagtttttgtttagcctgatcaattacattaaaattgttagggttttcaatttcagctactcgtagatgggatgtagctatttgcacttgccaagataggtcaatgaatcgtttcttattccaactttgaagtttacaacatgtggctttcactttcctatggaagttaatcataggcttatgatgtagtctcgtagtccaagcttccttgatgacccagaagcaacaggggttctgagcccacattgtgtcatacttaagaggtcgacctttgcaattagaaccacctattgtatctaagagtaatggtctatgatcagaactagaggatgagagatggttaataatcacatttggaaaaaggatgcgttaatcggtggagacaagaccaggatccaatctagctctcttcatagctccttctttacttgagtttcttccacctttagcccaggttaactcggggccttagaaacccaaataaatcaaaccagccctttgtaccattcgacgaaggtcaaaagcatatcgagaggagttaccttatttggcatagttgaagtattctgagtcattcaaagttccattcatgtcaccaaaaaccagtataggagtggtagcattgagagccaactcgccaatgtgaagtcaaaaattctccttatctcccctatggggcggcccatacatgccaagcatcaaccacgtatctcctaaagggccagaagtaatttttccaacaatcacgaacttattggaggattggatattgcacttaacccctttcatccagcacatgctcaggccacccaaaagttacacaaggggataaaatgtatttcctcaaacttgattctattacaaattctagcaaatttgtctagtggtaatcgagtctcagataagatcatcatctcgggtttgtgttggcggataagagccgccagtttccaaactgacgtggtattcctgagaccatgacagttccaagccaagattttcatggcgacaaaatgaaaatccttcttggacatccccattcgaattccttggaattttggctcttcaacatcgatttctgtaatggtgcagcttccactaggcttctgatgattttcaattacgacaaagtggttatttaaatccacttttagatcaaaattttttccttcctagtggctttgagtagcagtgttacttccagtacaagttttggatggtttcctccatttgaaagactttggtgcaatcgagaggcttaattgattttttggtggtcttccccttttcttacgggtacaattctcatctatagtgatcactgtcttccctcgaggtcttccccttcatttggatgaacttggttcgtcattggagccagtggaaaagtcttcaaagttaagagcaaagcttgattcatccaatcgcttggggtaattcgaagcctgaggagtagatgccttctctaaaacacagttctccctgctctcatcatctaagtcggtcgaatgagaaatattctaaggtaagaaattagagttttatggtgggctaaataatactatgtctgaagctttacatttcctcagtccagttaagtattcatggacctaaaatcttcaatgtctaacagttcacgagccttaggttgggcccaacactcattggaaggccacttgactatgtgggtctgggtacaaagaagcaaggcactatagggagttttcaagcccttaggattagtagtagtatcacttgaattgagggattggttgtaacgtcctaacaattagacacgttacgacaaccagtaatataatctaatcccactaaatcgggattactagacaataagagcgagaaatattaaactttaattacaatggtataaaaatataatttgtaataatttaaactatacaatcaatccaaaaagtcaacatgcttcgggatcccataaaacgttttacaacatattacaacttatttacacgctggcctaagcggcgaaattcgagaatataaaatatatccaatggtagacacaactcgcttggtctagtaaggcatcatatttggcacttttgaaagaaaaacctaagtgtacctagaataggcatctataaaatgaacataatatttgtagccagatgataaattcatgggagacggacccaaaggtcaatatggataagttacaaagatttggtgaaaatagtgcatgatctagggaagggaactttatggatattccctttacaataagcataaaaaaacccagtaattgtttgatatcttttaggaatattataaaggtgcatgataggttgtacgatcttagcagaaggatgggcaagtttcttatgacacgaggaaaaattataacatgaaaatacagttggggaagtaatagtacagacaacattgagattgaaggtctaagcagacttggtgatgtgtaattaagaaggctctacgacataaagtccttacttaagtattcctgttagtagtgtttccttctaatcatagtgtttcacattgagattatatttttgacgatatttggaacatgtaatatatgatttaaaacaagtggtttagaaaagcaatttaagtgaaagaatgtgtgaccaatgttttgaattcacccatatgcacttgatctgaaccaacataaggttgtttgtgagtgaagtttgaagtggttgtagttcaatgagtggtagcacctgagttagggtaccaagtatcattagcaacactatctggagttgcaagttaagctgaatgtttaacaacattagctgcaccaacaccaaggaaatcaaagtttaatctttgatagaatcttgaagtaatgtgacacatgggtcttggtccaggaatcatggaagaattaggaagcgaagtagttggtgtggatgagctacgacgatcattgtagtcatttggagttgaaccagatgtcttcaatcttggtgaaacaacatatggagtccaaggtccacgacccgaattggctgatgagccattatcgatgatggatttggtatatgcgttgttagaaaaggaagaaaagtttgatgattttggcatgaaaccacgattagtatcaaggttaacagagtctagatctttattatgattctccatttaattttcttgagccaacaataaagtctcaatttcagcaactgagtattcatcattttgtgacttaacaaagatgacaaatgtgtgatagacagaatgtaggcctttacaaattgcaagagtatattctttcacagtgaccttgtgaccaacatatcctaatcgattaacaagtgttttaatttgaagcgagtagtcatttatagagagagagagagagag

SEQ ID NO: 17389 - DNA, 6924 bp, Cannabis sativa
  modified_base (3065)..(3080): a, c, t, g, unknown or other
  modified_base (3328)..(3328): a, c, t, g, unknown or other
  modified_base (3392)..(3397): a, c, t, g, unknown or other
  modified_base (3474)..(3492): a, c, t, g, unknown or other
  modified_base (3620)..(3623): a, c, t, g, unknown or other
  modified_base (3707)..(3711): a, c, t, g, unknown or other
aaatctaacatccaatatatgattggatcggatctggatacgcctaaaaacattggatgtgatccaatgaacacccctaaattagaggatacttcttgattgaaataattagagccgttcatttcaaacgacggggacttcaaacggtgtataagtaggtttcaagagttaattcatcttcttttcaacattttcaacctttgaaagtcttcctgctttctttgaaccaaggctcggaagcctcgacttactctaccccatgttcgccgaagacttcagctaccgaacctgccacaactgcgcgatagtgggagcattgtatacttgggcccattagcacgacattcttctccaacccatgccattatctagtaagtatctcaatgctctgtagacttttatgcaatttcatgcctaagctagaaatgttgagttcaagctgggtttggtacatactgcatgttggatttatagaacacttgttcataagaagagattattaggattaaactgcgtgcatatttctgtgccttgagtatgtctacctcattcaaaagggttgagtacgttcatttggcgtttctgaacttgcttgcatggctccaagattggggttggataaccattatactggcctattcccttcattctcggataagggtgcatcaaaggtggaaccttttgggagggatacctgaccctttcatgtgtagccgtttaaaattttgttgttgcatgtcaaataatcttcccatccttacaactttgaatcgattcatttgttctatgttaattgtgctcacatgtacctctcaaagtcagaatgctaggccctacgaaagagacggatttgataagtttctagaatggaggagattctacgagaaagaggaagaggcaggacatcgatcctcaacgagccaacaatcctaccccatttaatatgtcaccctctaccccacaactataccagcaataccaatggcagaaccaacagccgcaacagctttagcatcaaccattccaaccgcggttttagcagtcttccctgctcgagattccctttgtaggctttaaattccccatgaaggttattcctttggatttttccaccatgcagagggcaaaggagggcaaacatgccctgaggaggtggcacgaggaagaaagaaggattttgcaagtgagagcgaataggctttctactatgaaaagggccgaaacctctaaaggcctttttgccactattcctcttgggccaatggtggacactgaggctctagaaaagcggatggcacctaaggtggggagggaagctacaacctccgctatcaaactttttgcccatgtggctagcagtgtgcccgggttgcccctggagaatgggcgatttgcagtagcactgatgcattcacccttgcccacactgccagacaacaagcactggtactgtttttgttttctcacattttgttcatgttctaggcagctttgatggtggggagggtcgttaaagaagtaggcacccttgtcacagatttaagcaggaaaaatccaaaaatcaacagttgcatgctgccaacaagggtttgctggatgaaaacaaaattctaaagggagacctcgaagatctaaagaaggaaaaggagttgttggaggtcaactatggccagcaagctaaggtgttggcgtaatcagtgatcactgaaaggagaccataaagagattttgcaggggaacctcccattggccatccagtagcattcggaggttcggggcttgagcggtattttgagacaatgaattccttttgacctttttttcaccttttttttttttcatttttgctttagttttgattttgcggaaataattttagttatgccctaaccgcgaggccatttgtaatagcctttgagatatctttttagcttttatgcttactttatttacgggtttattgcttgcttctttttcctacctttgcttgcttgctattcgatagatcgacttttaggattttgtgaagtgtttggttcgaacaaccaaaacttcaacaactcccttattgaaccctttaaagcatgcaataccacattgtggctttaagcttccttcaactctcaatgaaagcaccaaatttttaccgagatttttagaaacgagattaagtaagagcttaagaaattaaatgagcgattaaataactgagatggaattttaacatggttcgggcattaaagatccctagtccacgagtcaatgtattggcctttgaggctttgaatgtattacaaattaagtttttacagcttgaagaacccgagttcttgatatagtatcttcctctttaggtttctcttagtgaagaagaaagcttaaagaagttttctcaaaagtgtttttctgtcccctttacatgaagagttaaaggggtatatataggcttagactcgggtctgggcatacccgtgacccgccagggtttctgtgcaaagatggacccactattagagtaaatacattaaatacatgacattaaggcccacgtcaagacactaccttttggacagaggcgtctgtacagtgggaaacccatctgatctaaacaggtgtcacgcatgggtattgctacaataggcaagaatgtgagaaggtcaccattggacaaagaggagtgtatatgcccttgcgatacagacattaccatgttttggcagaggggacaacatctgacgggatgggcccaggcatcagaggatagccacgtcactgtaagaagactttcgaatgcacctttaaggcttccccgtccagatgcgcctccttaactctcaagaaggcgtagttcacatcatctcctggaaggaaaaaaaggagttcgggagcacgaggatcttatctctaggggtgagactcaagaagtatggagagctagagcccacctctgttttggactcgacctttgcatgccgaaaggctcgagctactgatgacgcaaatcaattacctcaatatgccactcttcgtccattaaaaaacgtggataataataataataatannnnnnnnnnnnnnnntaataataataataatgaatgaatgaatgaatcttcaatcacattgcaaaaaatattacaaactgcatattttggtatgatacaaacaatttatgcagtttgatcaatacccaaaatcaaaatccataattgttgtgtggattaggggtgttcataaaatagctgatccaattctatctgcacaatccgatccaattcaatccaatccacaaaatgcgtatatccacacttgtgcggattggatgttnattgacatgtaaaagtaatcgattcagttcaatccacacatatttaaaaaaataaaaaaataannnnnnaaataaataaataaataaattagaaagtatatatacaattaacattttaatgtaaagaaaatagtaatttaaacatnnnnnnnnnnnnnnnnnnntatatttcaaaatataatagatcaaatatatattctatttttatatataatttttttctatatacaatttaaaacaaaattaaatatttctttatacaattttttttcttcctttaaatttgttattnnnnttattttaatttattgttaaagatataaaataataataatttattttattttattgtgaaagaaaaatattttttttcataaannnnnaataatttaatattaaaaattaaccaattcaaaataaccaatccaattcgtaattttgcggattgaattgaattggatttaagctatcgtgcggattgaattagatccaaaaaataaaatcctcacttagtgcgaatcgaatgcactataaacaaaataatacgaattagattggatgaacaccccttgtcgatattgtttttcacacagtagcaaattaaacccctgatcttaagggttcaagtgtttaatttgctcaattaataaaattttaagatctctggtcaaagaaatgtttttaaaataagtaacaaaaagctatgaaaaaagtattcaaaaaatgattattgtaatagtctagcaaaataaatgaggggaaaacccctaagatcattatacaaatccattcaaggatcaatatatttatagattaatctaaagcaaaacggactaaatcctctcatatttccgcaggccaacaattccgtcttactttgtatcagcaaaagagcactttcactttccagttccccctccaaactacgcgtaggagttgcaacttagattcaaactaggcacatttttccacgagtagaagagcaaaccatgccgaatcttgtccaccatttccatcaagcttctttgagacaaagatgtgaggacatctgcatatatggcagttcaaagagcaaacttgccagtgaagattttttaatcaacaagcgactgcaacatctgattcagtctgtactaggtcggagtcaaggaccagaggatccttttgaaacttgttcctcagctgcccacatgctgcatttgcctctaggccccttgtttggcgtgtactaacagttatcttacgggattccaaagcagctgcaaatgctgagacctgcagatgtaatagataaattcaagctcaaaaacattaacacaatgcaaaacttgacaaatatgatatgctactctagttgacacttgacaaggaaaaagaaaataaatgaaaaaacaaaaacaaaacaatgacgaataatgatcaattacttgtctcttgcttggacgcttgaattctgatccttctattggattgaaaggtatcagattcacatgataaatacgtccccactcctggagtagctccgctagttctattgcatgctctacagcatcattcactccggctgtagaatatgtaacaaagaaacttgcatcagtattaataatgtcaaattcaagcaagaagatcagtatatagaaggaatgaatagagatttacagtacctaaaagtgcatattcaaaagacacccttcgattggtttcaaggaagtagttcttgcaatcattcataattgcgttcaaagggtaggattttgcactaggcacaattgtttccctaagtttctgattaggagcatgcaggctgatgcacaaaatgatcaagtttaacaagaaaggtacacgtacaatgaatgaaacatggttgaggaattttttattgttactaggtgtgtactcctttggcagctgccttttatctaaatacagatttggtatccgtgttttcaataatcttatacattgtattttgaagttatatatttagcatcctgaactcaaatttgataatataaatatatcaatatgctcaaaatgtctcaattatataagttccaaatttaaatcacatatactttggccaaattaatcaaatttaactttagggcactaaatatgtacaatatcaaaatacaagatattggatgagtattattgaaaacacggaagtatatacccttattattatttggtcgtttaatcatgtaaatattctctctttttactttatttttactaacaagtaataagataacatacctgactgccagtgtggactgaagtttgtgagaagccagccttttaatagtgtttggtacacccacagtcgaaattgtaatcattctttgaccaatttgtatatcctaaagaaacaaagtcccattaaaaaatttactacatatgatccgttatgatgttaaataaaaacatttaaaaaaggcaacctgagcagaaaaaaggattaaactaaaccactgtcttaatatgaaactctattgtttttggttgatgttagatgacaaatatccattaggccttttttttttcctatgacctaatagctgcgtttaacatttggagtgggatgttataagggtacagtcaactaattttatctaagtgcatggatgtatattaaaatcactgaacatagtgctgttacagaaaataacagaatgagtctatctacaacagagatgggagaatacaatcttgttaggctgttacaacatctaaagtaatggtaaggaaatccaaaaaagaggagtgaaaggaaaaaaaaaaaaaaaaaagcaaaaaaggctatgctgcgaaatggctggaaaatttgataggaaccttattcaggcaacggtgtgcttcaagtacagatttcagattcatcattggctcacccattcccatgaacactacatttgtgaccctatgcttgaaaatttcctcaacagccaacacctgagtggatgtcagatattacagtcaatgtgtatacattaagagaatacaattcatcttaagacaaattattaaacaatttccaactaactgtttccatcttgttcaaagagattgtgcaaagggagaaaattctaagaaacctcaatcaccttggtgtttgaacaaatgggcataaaaattacgaagctcaaacctgttcaacaatttcatgtggctgaagattccttgaaaaacctccttttccagttgcacaaaatgagcagcccaaagggcagccaacctaattaatcaaaagaaaggtagttgcaataagtactgaaaaataaaaaagtaaatttgatatttataaatattaaatagacacttgctcacaaataccaatttgacaaaaactaacattacaaattaaaagctaaaacttgctaaaaatcattttagaaaattaacctgggatgagacacaagcagtaagcctcattggacctttttcatctacgactggtataccaacagtctcaatcaacctgttatcctccaactttattaataactgcataatcagtgggaagcataataagacgctggaaataccaataaacagtagaaacagtaggggatacagagagagagagagagaga

SEQ ID NO: 17390 - DNA, 7831 bp, Cannabis sativa
  modified_base (998)..(999): a, c, t, g, unknown or other
  modified_base (1365)..(1369): a, c, t, g, unknown or other
  modified_base (7792)..(7797): a, c, t, g, unknown or other
atccttagatgtcttattaagtaaaaatattattatgcagtttgcaatggcgcttgagtttgatgtaaattttgctgtcaattcaaataatatatttatatatagaaagtgtttaaactcatttgtagattcaacatggaaaaaaaggtcaaaatttgtacatgtattgatgaagatgatgattaataatatgacaccaaataatgataaaatattataattaaccaatataatagttgacgaaaattagaatgaccgaaacctatgggtgagtgaaattttgaaataaatttacatttcaaattagttgaaaattcaaatattagttgagattggtgattatttggctatgtcatctgctgattgttagtcactctccttgtgtagcgaaatattttctatctgtggaaggaatttgaggaattgaaatttccatgaaaaatatttacactttgcttagacataatttctttagatgttaccaacagtaagtgggttgcatcgaagattgctcaaaacaattcgtgcccagatatgacagttataaatttgaatggttatgtaattttttggtatggagtttagtttactagactattcttacttgaaagagtaaaaggtggtcataaaatgtgcttctatattatatccatcacaaattgttgataaaaaatgttttgaaaagattataaataacaatggaaagaaataagtgaacaataggcatcacaaagatgtccccattgatagtacaatggatattcaattattgggactaaatgatcatactcaagatgtttataaaagaaaataaggtaaatattattttggatcttaaaatttgtaaaaattattaatttaattctctgttttataaatgacaaaatgaactatatattttctaaaatggtaaaaataggacctattacgaaaaactgttacttttagtgacaactttttagtcacaacataagttttgtgactaaatgtgacttttnntcacaacaaaatattacttgtgactaaaatatagtctttagttacaaattgtcactaattatattttagtcacgataagtattgtgacgaaaaatacatttagtcacaacaaattgtaatttttgtgattgatacctttagctacgaatttttttagtcataatataggaatgataatttataattggtcacaatttttttactttgtggctaaaagtaagatttttcgaagtgactctaagcaattttcaacaattttattttttaatataactaaccttaatacaatttctgacacggacatatacagaaaatgtaaccagttttatcataacatctctacatcagattattattaagttttannnnnataaaaaatcagttcagggtcctatttatacaattttaacaaatacaaggtctattttgtcatttaacaaaacaaagggtccaattgataacttttgcaaaacacaagatccaaaatggtatttaccaaaaaaatatataatcctcaaggtgaaagatcttatttgacaagtaatttcatattgtctgcttactaagatgaattttcgtggtaagaaaattcctattgacactagttatttttgtgatatttacaatgaaacatttttcatagagttgttgggtcataacaaggttagatttggtaggctacgagtttcattttttctttgtctggcttagtgtggtgatgagtagggcagatgcagatttgtgacactttgttgggccatttagaaatctcgtaatgagatagtgtggaatcaaaaaaggcggcgagcggagttgttgcttttttcattaactcttgatcaatggagtggtgctcaaggtgaagggaatatcctttcacttaatttgttagtagcatgtgatggggcagagagctggactaaacgtgtgatatatacaattaagattaatgtagatgtaattatttttgaggaagataagcagtttggttctaagaggggaattgttagtcgctactgcttcttgtttgtaatgtgtctccttctttggcataagcaatagggattaaggaggttcttagttggttgaaatctcaaaattattccagagtagaggtcgaattagatagtcttaatgctattcaagttattcaaaattcgtagttcttttattcattcaatctaattcacactattttgctcatagagtattcaatgtacactaagtgcagattttatattttggatcccataataactcaaatccaatcgaattcgcaaaattcggattgaattgattattttggtgaattactttttagtatggaattatttaatatttattagaaaatatacttttttttgcataactaacaaaaaaattattgttattttacgttttcaatccaacaataaattaaaataaaataaaaaattaattgtatatataaagaaatattattaattttattttagtttatattttttatttaaaaatgagaataaaatatatatttgatttactaagttttgaaatattttcgtatatcatatatatatattttgtattatatttttaaattattatttttatattaaaatattaattgtatatataattttattgaaaataaattttattaagaataatactaataataattataccaaattacacttgcaacgcagaaaaagaaataaaaaaacaaataatattattttttatggtcaattattttgtttctaatggactgatagggaaaaaatgaaaaaatgaggagtattttgatacacaaagttgaaatatataaggaaaatgacaggctattgacactgaataatataagattcgattccatccaaaaagtatcaaagttttggtggcaaattaacaaatgacaatttcatttctctaccataagcttttacgaggtcttttttatgcacagggctcagccttccccagcaagaatcttccttaattggcttccttttcattccatatatattttttcattcaatttttaagccaaaaggtataactaaatacgtggtgtgtgacaacttatagaatcaattattgatgaacagtagtatgtgttcctctatgcaaattgcaaacgcacgtagcagcaattgccctttacaaacttgatttaactctattatagaaaaaggccaacatatatcgtcaccaatgatgagagcagaaaaatacaggacgacctttaaattcaaacaaagtaccatcatgtcattcttacttatttttatttatttttgaatgaatctttgtaattattatgatggaagaagatatatagaacccaacccaggtcacatgcatttctatcatgggaataactccaaaatagttctttcctttcagttccatcataactaagtaactcagtatctgattttgcaggttcattttaaaaaaaataaataaaaaatatctccaaaataaagttgaagagatgagtatattcattttttgtttcatatgattcaaacctttaataattgccattttcctcatatttgttacctctctcactagacattatagtataataaaactgtaaagaataggatatgcttccttgcattgtttgtttcattttctccattaataatagaacctaatcttttaatttacaaaaaggctgatgacatccctatacccaaaaccaccaaactatattaacccaaaaaataataataataataattataaaaataagaagaataacactatcaacttctgattgaagccacaagttttcccattcagccgttttaagctagtgatttataatgacccttttccaccttgccccttccttttccccttaactaacaactgagcgttcatttttttaagcaaccaataggaaaacgacatgtgtaacaacccgggtggagctccacaacccgagtcatccatccttttgtgaacccgaatcgaacgactgagaggatcttgcaccgcttttcatccgaaggaatccgtacagtttccgaatatccttaacggaatgaaccccttcgcaaaaaaccccagcgggttgacccgattcttccacgtagctcctccgtccgatcttcccgttccccctcccatcaccgtccgtttgcaacgccgtaatgaccgttttgatggctcgactcggcgagtttctgttcgaaatcatgagttctccgatctcggcagcgctcaaactcgacccgttttggaaaatctcttccacttggggaaaaagcttgtgttccttgagacccaaataactatttgccaaattcttaaaggcggtgaaatcacacaaagggaaatggatatggacatcgacccgacccggacggagtattgcctgatcaagattctccttcccgttcgtcgtgaacaccatgattctctcctccgcaacgcacgagctcaacaacccgtccatgaaactcaacacgccggacagagtcaccgccgtcgatttcccgattaagaaccggtcgagatcctctatcacaatcaccgactttgcagtagtctgcaacagtaggattttaagatcggaatcgtcggagactttcgaaagatcgagatcgtagacgtcgtagccgaggaaattggccattgcggcgacgaagcttgttttcccggtgccggatggaccgtataatagatagctccgtttccaaacacgacctaatctgtggtaatattgtttcgctttgagaaaagattcgaggtcggattttaccttggctttgagatcggcttccatggcgattgtttcgaaggtggagggatgattgaatgggatagatttccaccgtccattctgttgatgacttgaatatatgttaatataaagcttcaaatctcttcttctctgctcaacctcgtcggcaacggtgtgtatatgctgtagatacggccttaaaattctacgcttatcagctttacgaatcttgagcaccaagtttcgaccattgattttctcgcccttttcttcgttcacccaaacaagtttggccccgagaaaacggtcttcgattttctgatttggatcgagcttgaggacgatctcgttggactttttcccggtgataaggttggtgaaatcggagtcctcgattgaggtcaaggagttcaaatactcagaaacttttctgtagaggtgattttcttgcatggtgtcttcattgatttcggggactttgaatgattgatagacatgaaagcaatcctccatagctccccaccatttcttcacaatataaaccaacccagttctgtacaaaagaacacgaaccaccacaaatgcacaaaccacaaccaccaaaagaagaagaagatacgaaataaccattattattttgggtatgcttcaataatggagaaaaccccacaaaaaaatgaaaagtgggtaataataataataacaatctctatttcagaattagaagcgaataaaactcaacactaacaatcaagaaaatgggtattagcttttttctttttgatgacaaaatcatatttgtttggtggaatgaaaatcaatgatagatgagaacaaggtatgaggggattactagaatagtgaagaagagaagagttaaagatgagagtgagattaatggaaatttaggggcgtttctatatatagtttgtatgtaaatttttatgtgtatatatgagatatgatatatcgccgtcaagaaataagaatttaatttagtggtaggctttgggtttatgagccaggttgttctattctttatgaggttgtttatttagcttacgtaataagttttattataatcattttatttccttctttttcaattttgattccgccttttggttattccaaaccaaaaaaaatctaaagcgtggcttcaccgcgtagattattgttattcattttcttggaaagtcattagtcaattttaatgaacatttaattatttattttcctaatataagaatcaatatctgatcaaccaagctcaagtggctatagaaaagtgcgtgtgtgttggaggtcatgagttcaagtaccaaattatgtatagttgtaatatataaacgcttaaataaaaaaaaaaagaatcaatatctgatcaccaatactactatactagctaatttagctaataaaaaaaataagatttattaattatcacgtatagtaagtctatccccacgaagttgatttatgagcaatgtgcaaagtttagcatctaatttcatttttcttaatatgttattaaatttttataaatcaatcgagtatttctatttctacatgataatttaaaattggagaaatattaaaaggtattaattgttgtataattttataatggaatctcatataatttaatataataattttatagatcattattaaacattaaaataccacctactatttgtacttaatatcaatttaataataattaaagtaattactatttaaaaaaattattttcttattaataattactaagaaaatttaaaattaatttatttttatttattgataattagtaagaaaataaattatttaaattttaaattacacatgttgtactcttatgaaaatattttatttatttattaataatagtttgaaattaaaaaaaaaaatcataactagcataaaataatttaggacgtgaaaaaagtttaaaatttaccaaataatatcatgggatcaatatttgaatttaaattgttttaccaggatggaagaaagaatatagttaaatttagtattttacttatcattttattttatttatttattcgaatcaaattatgtcaatgtttatttaattatatatcatttctttttagaaagtatcatttacttgtttattctatcctcgaaacagagttattaaattagagcattgctattaggcaccagtagtacctagcactcttaggatgtgttgccttgcgattggctagtgatactccgtaaaagctattttattaaactatatgggacccgatacttaattagattaatagtaatattgacacataggaaggtgctggacactactaataccttttagcattggaattattgacattggaataaagattgtggaaactcttaacactaaaataaagattgaataaaagttggggtaactcttaacactaaaataaagatttgtacgtatgcacttcaattttcaattaataaaatattcctgcataatatatgttaagtggacgaaagtggctttatatatataagtgagtgctatataaaaagtatgttatgggattgctgctacatgataattatacattataatgtattcttccaattatgtctctctattgattaattagttggttgtcgatggattgaataggtaatttgagaattgttaaagggtatttatattttatagtgcttaatattattattgtgagttgtaatattgtattggtgctgtttaatattagtgtcccatatcaatgctctaagcaatttggttgcactaattaatcaaacaaatctcttttcaaaaccatttaaaaaaaaaataaagaataaaataacgaaacaataatctaatccttttaaaaacattataataatatgtgagggggcagttaaacttctaccgtacgtatatgtcgttgtggattataaattaataacaataagacttgagattagaagggacgaaactaataatatataggtaatattaatctatggataaaaaaagatcgataaatatatatacagtagaacctnnnnnnaagaatacacttgggaccaagtaaattatattct

SEQ ID NO: 17391 - DNA, 2235 bp, Cannabis sativa
agccactaatcaaattctcaccaagatccaataatccaagattagccatatgtcctatttcatctggtattgcccccaatattttgttacttgccaagcttaacctttgtagttgcccgagctttccaaggctttgtgggattcctccatctaaattgttgtatgataagttcaagtggactaagctactcaagtttccaatactctctggtatgtatcctgtgaaacgattatcttgaagactaaaatagtacaactcttttgaaagagcaccaacagaattcggtatattcccaccaaatgaacatgaagccaaatgcaatttctttaaatgtgagcactttgttaaggcacttaataatgtaaaagatttatcagagtcactaaccaggttgttagaatgaagatatagaatctcaaggttgtaaagctccccaagttctaaaggaacttccccctccaagtaattaagacttaaatcaagtagtatcagttgagagagattggagagacttactggaattttcccagagagcttgttattcaccaagtacaacttctgtaagtttggtagcttggaacccaattctggaggtatttctccacttaaaccattgtaattcagtgaaatttcaagtaaagaagtgcagttgctaatctctggaggtattgatccctcaaaatagttaacgtgagcatacaaaatctttaactttttcagtgcacctagctctgctggaattttccctgaaaagtaattcccactcaattctagtcttgtcaactctgtcaagttggataaaaatgaaggtatggatcctgtgagcctattaatggagagagctaagaatgtcaagccctttatatgcccaagttccttaggaatcacccctcttagattgttgtctgtcaagtctagtacttccaagctttgacagccttgtagtgatgctgggatattaccatgaagcaaattctcaaacagattaagactttctagttttgaaagttctccaaatgaacttgggatttcaccatagaatctattggtttgtagtgacagtgtagtgagaagagaaagattggataagagtggtgataatcttccttctagtttcatgtctatgagttcaagagcaacaactcgattttcgagtcttcggtggcaggtaactccagtccagttacagaagggatttacttcgttccaagcttgaagatgactacccggatcacttgttatgcttttcttgaatttgagtagtgtctgacagtccatatagttcttacaagcaaatgatgaagctgaacaagagggaacaattaaaaataatattaaagcatagaaaaagctcatttggattgccatttagcaaacttttgattctttccaataagaaaaagaaagaccaatggtattgtgggaatggcagaatggggaaagaagctaggccattttcttagaagcatgtggtaatgtgatgaccattactttgaaattatcaagttggacacgatctttcctcattttcaatgacattaaatggctaagtgccttggggccacattcttaattttttcttttgaaatgaaactccatcaaagcaactacctatgaatctcaagtctgatacattattattatgctcaaaagtctcaaactctgatacatttttcttgatggatagttacaacttacaatgatattaaacaactgcagggccacatcctttattttctctcttggctcattttgacttgtctgttcacataggtttgtttggaaaactacttggtaatgtaattagataatttgaatagagtataattcggagtaattactaaatttgacatatttgtctatagtaactatataaacattgtttatttattttcatctcgatctaaacaatagagaataaaactcttatttgttacatatccccatctgtcatgagtctaaacagttggtctaaaacttcataaatgatctctacttttgaatgcaaatccatcccaaacaacaaagatgtggactttcttttctatcacaatccaaccaatacctatttcttttacaaccaccatctcctttattttcttaattattcttgctctctctttccaattcccttatgaggaataaaaattggccagcaaaatgtatgatgctgggctgtcagaagtagccatagcgagttgctcagcagcatatatacccaattcagaatcgaa

SEQ ID NO: 17392 - DNA, 3466 bp, Cannabis sativa
attacacattttatgaatttttattcaatgtgtgcaataatgtttttttaaaaaaaaaataatttggtaggaaaaattgaacaaaaaaaaaaggtcaaaaatttaaagaaaaaagtaataatttagggtaacagcttactttatattttggttttttaattttttttttatttttctcataacataatatacattttttttagaaaaaaaaaaatcatatttttgtaaacttttagctgtaaaaaaataattctccattatatttctaccatctacttttttcattgcattcatttagtcaaaattcatatcatcttatatcaacctttgctatataaagagcatcaatttgcaaaatcttacatatataaattatgcaaaaaaatgtacaccaataatcacacccttcataaaattataaagacaaatgaaacaaatgtgaaacattcaaccttcacattctttcaatttttagtttttgctcttacaacatagttctacctatgtaaacatcaaacatgaatagtaatacaaagaaaaaactcacatctttaaacttgaataataaacaaaatataattgtgatcattcattctctcaacgcattgtggcaaaagggttcctcttcaactcaagaggttgagaaatcttctctgttttagcccatggaaacttgtgcttagccatttttttcttctttgtagctactcccatgatatccccttggttctataaaacaacattgtattcaatagaaaaaaaaagttagctaaaattatgataacacaacacaataatcaatcaaagaaaatggcctaccttgagacaaagcccttcttcaatatcacaaattgggtaatcattagggcaacaatactcagttccaatgcaacaaactgcattctcatactcacaacaaccataaattaggcaaataccatagaactcgtataagcaacaacatgtttcatcacttgggcaataggagaagtctccacatttggttggcgaaggagggggaggcggtggtggtggtagaattggtgatgggggtgggggactagacggtgatggataaggagacggcgtggaagattctttagtaggataagatgccatagcattaattgcacatactccgtagggtaaattagtgttcctttttatgtaaaagtagccttgtattccccaactagtaccccatgaattcttcacaatccaatagtcttcatcgccttcagaaccatatccaactatcaaaacggcatgatcaatatcgtcagggttgtccgagcaatctccatcgtagattccctgttcaagtatttacacatcagtctttaatttttaaaaaagtaaatactattttaaacacggtattttacgtaagttattgatcaatctttttattttttgttaaataaaaatttagattcagtattttgtcaaaaatgaatataatgataccatgagcttaattttacacaaaatctttttggattagaaataaaatagaaattgaaccgcaattgttagagttagggaataagaaattttagggttagaaagatgaattttcagagttagaataaaagtagtttgaccaaaatcaggctcaaagtatcattgtggttctttttataaaacacaaatagaaaagtaaatcgataattttgcaaaatttaccctttctacaactagaaactattcattattaatcaatcttgaaattgaaaatgaactcactccagtgtagagttgaaaatccaatgctgatccatcaataccaacactaatgggttgatgaatagtagcacacaaaagatccctatcagattctcccacatcttcatacccatcaattgtaacaactttcctttcctcctaatgaaaaagaaaagacattaatattagtgtgtgttatacatacaaacttttagctaaggatatggatttggtaacaaaaatgttacctttgctttgttacatgtaccatcttgaccggtataagaatagtcagattcagagtcaattccagcattgtttataacccattcaaaagcatagtccatatagccaccatcacatccataattggtggaatcacagtccactaactcttgttctgaaaggcttatgaggtctcctgtcactatggcatttactccttccattgctcctgtagaagagaatgcccaacaacttcctacaaactttaccttaattagtttatctcaaaaagctttaatggacaaatttgtagtacaccctctaaaagggttatttcagtatctcgaatatagtattttagtctaatttattttttcatgattgcggatattattgtttataaagccgaaataaaagtccaaacaatttattatcacacgtacaacaaaatgttttaattttattttttcgtcattgtaaattattgaaatttttttgaaaacttaccggtaatcctaaacaatcacaacataaacgattatgaaaaaaaaataacttaaacttcttcttgataccaaaataaataagaaatataccgaaatcccaactcattattttgtgggataatagacttagagcttactttccacacaattgacaattattttgaatgtgtttaaataaaatttcaaacaattatttattaggagcttttacaaaaatattagattttaagcaaaagtttacaattttactgtcacacgattttttttacaaaaatactgtctttagaaaatagctgtaaaacaacaaaataaaataatataaaacaacagtagaacaactaaaaaataattgtaaaaacttaacacagtatgaaacttacacattatttttgaaaaaaattccacctcacagtaaaattacgaattgaaaatttcaatatgtaatgtaaaaatctctatttattataagaaaaaaagtcacacatacaacgaaatatcaaactttaattttgccactagaaactattcgcaatttttttaccactactcctaaaaaatctaccttgtactcaatcatgaagaaataaaaacactcctttaaagagtttactatagttaaaaaaaacatttgggataatagagttaaagcttacttaccacagtcaccttgatcttttacagcagtaacaacacctcttttcctccaatccaaactcgaaggtgcatcacaagaatccaatcttgtcctcataggattatttctcctcctctttccacccaaaggctttgtaacattagacaagtatagtttcctaaactcttcattgcttaaatctgcaaaccggttcaaccccaactggtgaccttttcttgacttactactctccaatatatacttgacatttctcttgaaattctcaaacctcatctcagcctcctccggtaaccggtaaactctcttgtgtttctctttccaattttgaaacaactcaacaactctcatctcatcc

SEQ ID NO: 17393 - DNA, 15453 bp, Cannabis sativa
  modified_base (14041)..(14047): a, c, t, g, unknown or other
cttttcttttaaatataccaaaatttaatttatatcccgttgatcaattattggtacacataattattgttaatttaatattaaagctaataaaattataataatacaaataataataataaatcattcatcttgtctctctcctttcaatcccccttctctcagtctaccaaaaattcattcaaaacctcaacttgatgtgataatcaaacaaatcatgcaattaatttcttcaaaactcaatgatcaagaaaataataaaaactaaaatttcatacttgatgcaaaaaaaaaaaaaaatctaactttaccaataaaattatatattaattcatgaacaagaacaaaaaaaaaatgacagtgggagatctataatgtggaatggagattggcggaagcttgcttctctctcaagtggagccactgtcaggtcagtcgaccctttttctagtagcccgaatggacccaagtcccgagctccttgtttccctctttctcatttttcttcttagtcggatttaatggcaaaccaacagatcccactttgactgccgaagaacagcaagatataatgttctcctacgtaccaaattcgtcaaaaacccatagaaattgtcttactcaccctacaactttctctctcttctctctctccctcctaataaagtaatcattttgaaaaatcgagaagaaaaaagaggaagaaataataagaagaagcagtaaatagagataacaatactgattttttttttttcatttcattttacaattataattataattatgtttgttttttattttttatacttaatttttggttaaaaattaataaaatatttttaaaaaaaatgttacttaataaatgatcaacgcataacatataaaatcaaaggtatatttaatagaaaagtagtaacagaagtaatagaaatgtaacataaaatatttactccgtaaaacaatatgtatttaagtgtataaaaattcaaaagataaggtatttatgccgcaaataaaaaaaaaaacagtagttcttatagaaaggaaaataacaaacaataaatgtggaagtgtattaaagataacaaaagtattgtcttcggagcaaagctaaaatggagtacccattattgtatatgcctgttcaaatctggaatatagtctctacgacaaaataattgattaaaatgacaactgtgtttcccaatgattaaaacgttagatcatgaaaagaaatttcaatgaagaattaaaatgcgaagaatcatttactgtaattctttactttagaagttaatatagaatgtgttgttagaaagggcttgtcagggaagaaaagaacaaagacaaacataacgaagaaagaaatcacattacatcgatcatcatcatcaacatcatcctgaaaaatcaaattacaacataacgaagaaacacctaaggatcctgatatcaaaacctacgtgataaatcttaaagcacacgacaaacaccttaagcttgatcgaaagaacccttaaaaaaaaaacacttgtaaatgggctaaacttggaaaaatgagtagtgggaaaagctcgtaccaaatcttaagctgaccgaaacatagatgcaaggccgagccgagtaatgaaagcgcaaaacggaagatttatgggatcaccaacggtctaaccaacttcaacccaaatcagtgtgttcaaggatctaacagtcagtcactattcctagatttctatcgcaaaagcagagtatcaacccagcttcaaatcgaacatggaaaccagctaatccggaagttttaagtctctactatgatgaggattgaacttttacgaggaaaaatgcattgaaaaatggttctgtgcagccaatttgaaaatgattttcatgtttcaaagctgataaaaatgcagaaaaactagtagttcaggtgcagagacgcagatgcagtggactagtaagtgcagtgaacggctttgagcatcttgaaccagctaagaaaagagaagagataaaccccaaaactttgtttccgaacaacgcaacagaagattgtcggatgcaaccacatttccagtataatccaatttaactcagtaatatgggagcaacaagaagtagaagatagtgaagcagaagcagggatgatgggaaccgtgtgcactaaagatgcagtgagcggtcaacgatgccattatagccgaaaaccagacctcaaatcaaaacaagcacttcaaatcaaaataagcaaaatgaaatattaccacaaccaatatttttaataacaatataaacaggataatatctcaactaaaaaaaaaagtagaaaatcgacctccaatactcattaagctgaagtgagaatcgatgcaaatcggtgtccaaagaaccccttttcgcatccaactgtaggagccatccacaataccaagtttctaataaaaatctcattgtcacatatcaacataactaacatgattctcgtcaattcaaccaatcctaatagaactaaaagtgtaacactgcatcatctccaggacagctagcatttactccacttgacgtttcacagctctagactctagtccctgaaatgagagtcaaccatgaaatgaaatgccgataattcataataaggtaacagtaaaaataaataaataatgatatgtgtgtaatatcttgatgtaaattatgcttacacatatcataaactcaaaacaaaagaaaaatatgttaacgagtgtcaccattcaagttaatttttaatttgaaattgtttagtttgcaatgaattaatcgattagtatatgctagagaggcagcttagcatacccattggcataaggtgacacacggcgagcatggcggaatggaggagtcctgctgtagcttcgaccacgtgcaataggtgatatgctgcggcgcctgggagatctcctacgcggactaaaactcctgtcacgacatggactttttttatttttgtgctcaagattaacacaccaaaaaaatttgggcttggaaattatatgtatatattgccacattttagattaagataagatgctatcatctcatcctgaaaagcttagtgaataattttcattcctttttccttactcttttctaaaattatatacactggattttgcaatgcagaagtgaatacactgctgaaatggtaattatgttttccagttaaatgaagaaaccattactctttgccatgacttcgtgaacaaatatccagagtaccgaacaacaaacctgcgtccatatctatcatagcttgggctcctgcggcgcctaggagaagggctcctgcgccttccactacccaaacctcgtgagccaacacgcatacgacattctctagcaaaatgaccaggctcaccacactcatagcacttcaagtcctcacctccaccacgcccgcgaccaccaccagcacgacctcccccaccacctttagagttatgtgaaagctccactcgccaaccatttttccctagacaccaagaacaagaaattttagaaaaaatcatgatacaccaacagaaaggagatcttcagccattcaaaaatggctgtttataataattagaacctaatcgtctgaaaattgatgatgccaacagtcctactgcatgaagcttccaaagagaggaggtaacaaatgtatttagcaacaaataacacctaaaaaaattactgaccatccaaagcttgaatggcatcaatagcatccctgcgatcatcaaattcaataaatgcatatcctggtggtctcctagcaacccaaacactgcaacaatttcaaaaatatcctttcagaggaagaaaaaacaaaagaacattcctcagcaattccaaacaaaaaaatacatagtgaaaccataactgtgtatgaacacaaaacacacagttgtgtaagagttaattgcaaccatcaacgcaagttctaccaaaattacggtagaattcaaatgcttagaaaattaggtaaaaaaaaaacaatttcggttacctccgaagaacaccaaacatccggaattcatcctctagatccctttcactcactcgaggatccaaattcccaacataaactcgagccatcttcggaattcacaagtcaattccaccctacaaaaacaaatcgacaaaatcactaaccctctgtttgaactttgctattaagaatgaaaacaaaatctacacaatttcgtctaaatataatatgactcaaatattaaaaaaaaaaaaaaagaaagaaaagtgtcaattaacaaaatttaaaactttcataaattaattcaaaatagtaaaaaaaaaatctttcttttctccaagctaaattcaatttcgaaacaaaacaaaacctaacataatcagtctttgctttgctatccaaaacaacgacacaaaaaataataaaaaagaaaaatacataaatgtttacgatcgaatacagtgaaacataacataatttccatagatatgtacgtacaataccgaaaagtgaaagagagatcaaaatcaaaatccttgccttacgattaaaatcgaagaacaatcgaagcatgagagagaaatcttacagagaaattgggttcgaatcttgaagattagtaacgtgcgatcgaagaagaagacaattcggattgatcctttaaaatccctaaaccctccctatgaacaagaaaaaaaaggagagaatgattcactgtatgggtagcttgggactgaatacaatataaacactttccacgtgtctatcatgggccttggatattgggccttgggccgtgactagtgtgctttaaggacaactgggccgaaaagaatctattacttgggccaatgactgcaattgaaaaggcctaatcatcggtccaataacagtttagttaatagatgggccccattcaactacctactctgtcactcccacaccttatctccctgtactcctagcttttgttttaagaaaaacaaataataatgataattaattatttggtattagatgtttttacaaagtattaatttggtatggaacaaaaaaaattgtatatttgattttgtatttttttttcttgataaatttcaattgatttttgtattttaaaattacatatacataatattttaactcaaatttaattattaaaattaccaaaggtacaaaaaaatacttaacataataatcattagttaataagttgtgattcatgaatcatgacgttcttgaactaaaatattcaaaataaatgtatacttttcaagcaaaatcattatgcaatctattgtattgcactatgtcattcttaaattttgtaatatttttatttttatatattataattaaccacacatatgtaaactttacaatattattatatgttaaccaaatgaataatcaaatttataatatactaactatatgatgagctaatgaagagcattggaaaaaaagataaaacaataattttttaaaagaaagaataatttttttatgttagcatgtgcaaagtttgtgcattttgataaagtagaagacttaaattagtaaattaaaagataatagtttacctaaacaataaattttcaattttttaaagatgaaaagaaaaatggttaataatttctgacaaatgaatcaatttgaccaaaagtgttgggtggtgaatggtgatggggtatggtatgatacttatgtaaaatgttttgttgttttttaacacaattatttcgttttctcgtaacttggtcggttgtccttacagttaacataaagatatatcattgagtattgtcttttatctccattgagtcgctgcaagttcgaatcacgggtcatcaagaagaaaaggttttgacttgccaattgcctctgtaatctgtatcccagcaaaaagatcaaaactttccaagaaatggtttgagaagaggcacataaagagtatctgccatctggggttgctttgtttacagagattgaggttttttccaagtgggtttttgttgtaatggaaggaggagataggattgaagagagtagtagtgtaaggttattgagccgtaggcctagtgggagtagtggtggtggtggtggtggtggaagtgagtcaaggtgggtagatggaagtgaagtggattcagagtcacctccttggtctcttgttgatggtaatgaagggcgagaagggtttggaactttgagaaggagacttgctaagaagcccaagagagttgattcatttgatgttgaagccatggaaatttctggagctcatggtcaccacgccaaggtaataatttctacttttgtttgatgttatttggagaaaccaatatcatggtcgtttggggttgtttttgttttcatatgatgaatctaatttatggacagcttatggttttgtaatgttgaataaattagagtatatggttcagttactcttgactattatgaagttttaacttttaagtgcttttattatgattgaggatttagcttttgagaagtcaactgaaaagttctttgattgaatatctctgataaatgaagcaattttgagtggactgaattagtatgtaaactttcaggaaggaagaattctaaaatcctaatctaggaatatgatcaaacaatttatttatgctcatccaaaacaaaacaatatcatcctatttaaggcaacaaaaacaaaataagagaaacattgttaccttgtgatgatgaccatgaattctcatgcttctccttgtgctcatcacatatcttcaacaacctacattcaaagaagacaagaatgcaagaagtgtccatggacactactgtcccttttctctccaaaccacccgtatgccatattcctcacacacactaagagtgtagtcaaattcccataccgaaagtgagagagaaatggcttggccaaaatttgttgagaacacatgttagtatgttatatctatcctattatgacccaatgctaataccatgcaataccaattatatagttatctttgtatgctaatatcaacaatgagtaagctactcttaattatgttagtccaaataaatattctaacagttagtactttataaatgtatataatagtataacaacataaaagttctactttacttcccactgatattttggaaggaagcagctcaaacataaaagcttaccatttactaaactgtttaagctgaaattccaagcatacattatttcattagttggaaaatcaagttctaggatatgctgcagtgaatcaaacaatgacaatttcaactgacatttcaaagctttattacctcgatgacacaggaaatttcaacatggcaaactgttgctttagcattccaaactcttggagtggtatatggtgacatgggcacaagccctttgtatgtctttgctgatgtctttagcaaggtaaaaattgactcagatgttgatgttttgggggctttgtcactagttatgtatacaattgctctcataccactggcgaaatatgtcttcgtcgttcttaaagccaatgataacggggaaggtcagtattatctctaatatctattggttaaaatccatctgaccaatcatatacatactgacatttttcatggttccaataataggaggaacatttgcactgtattcactgatttgcaggtatgcaaaggtaaatatgcttccaaatcgtcaaccagctgatgaacaaatctcgagttttaagctgaaactgcctacaccagagttggaaagggctttgactataaaagaggctttggaaaggaaatcatccttgaaaatccttctcttgctgcttgttctgacaggaacttccatgattataggagatggaatactaaccccagcaatgtcaggtgcttaattggatattgtgttatttgcaacttgtaaatataggggtgcaatgcaacagtgcctacctaaaatattctggacttgcctcttttttggatcaggaaatgctgacacaaaatttaaaccggtagaaagatttgtttactgtaactaaaatattgtagctttaccataactaaggtttaagtctcacttatggcttgtgggtttgtgttaggatcccacattgaccaagtataggactacttgggcaccctcctctcttaggctagcttttgggaatgagttctacccaaatggttgtatcaagtagtattagagccatgcacccttaagtgggttcgacttcttgggcatcctctcttaggctagcttttgggagtgagttctacccaagtggttgtatcactttgtcaacaaagctggtctaagaaattgctgcagttcttttatcataaaatatgttattattcatgattaaagagggcatataactccatcaaaaacaggctttatgaattatattcttctgcagcccaagcattgatatgcaatatcgtttttgtttgaatatggtctggtgctatcatttaacatcagagatttgtaataacaaattatttcctcttttatgacagtgatgtctgctgtgagtggtttgaaaggtcaagtacaaggctttggtacaagtgtgtatcttttcctttcactatctgaggttcattttcattcatttcctatgggcaacacctaacaaatacatactaaaacaccattcatgttcatatgattttacttacagatgctgtggttggggtttcaatattcattctgatcgcattattcagcatacagagttttgggactgctaaagtcggtttcttgtttgcgcctgtactagctttgtggttcttcagtcttggttgtattggggtttacaatcttttcaagtatgatatcacagtcgtgagagcacttaatcctatgtatatctttctcttcttcaaaaagaacagcagccaagcctggtcagctcttggcggttgtgttctgtgcattacaggttagtttcatgtacattgttgctctgtatcttaacatctaatgctcttaaaatcatcatttacttaacatgagcaaacataagtctttgtttgagattatttatagctatggagctatattaaaagggctactactatttttagccttgagtttggtacaatgctgaatagagttttccttttccctttgaagcaaacaataaagctcgtttatgatgtgttaaagtataaaagtatctgacccaaaacgagtagctcaaatggtcagacatgtggtttgcaatccctcctaagtacctacatagcaattgctatagtttcctggtctccccagataatgtagggttaggcgggaatcctagtttaaaaaaagaaagtacaaaatttgttttgtgggtctaattacaaaccctgtttaattacatatcttgcctgaaaatgttgccacaggagctgaagcaatgtttgcagatttaggccatttttccgtacgatccatacaggtttgctttgaaaatttacatcttttttgcctttattgcatagattttcttagtaagtcttcatataattaacatgttctgcttatacagattgctttcacttttgtggtgttcccttgtcttctcttggcttacatgggccaagcagcatatctgatgaaattccctcatgctacagagagaatattttatgattctgtcccaggttaaacttgctaacatacatacatatataggtatatgtatacagatgtttgtgtcatatgttggtacctcattttgacatcttgtttcttaatcttgtgaacaaaacagagagtcttttctggccagttcttgtgatagcaaccttagctgcaatgattgccagtcaagcaatgatatcggctactttttcatgtgttaaacaagctatggctcttgggtgtttcccaaggttgaagatagttcacacctcaaggaaacaaatgggccaaatttacatccctgtcatcaattggtttctgatgatcatgtgcattgttgtagtttcaatctttcgaaacacgactgatattgccaacgcatacggttaagtatcttccattcttcttatgatcatgtgcatagtcatttagttacatcttgtgaaccttatcacaaagttcaattcattgccaattgttaggatctttacttgcacaacacaccataaacaagaaatcacagtagcgagtctacaaatgagaatcaaaacataaaagacaaacactttaggaatcacaataaaatgcaggaatgtagatgaacacaatgaaaatttacttggttcagatttaatctttattcaaaattagtcctactccaaggttcggtagagcctgagatcaacctatgttgaacagtgttacaccctcaattctcacagatgtacaatctggttttcgctcgagcctaaaagctcttacaatgctctctctaaacaagcttatacacagcttagaaaatggcttagtacattgatttctctaactctctaggagtgaatatatagggtagatgtacacgagtagcttttggaaggaaacactaactgagttggttaattcagttaggatgaatcttgagtgatctgttagttgcaatggtcaactaactaaaataacagacttgagaatgccaagtcatcaatccgagtgagatgtagaaaataggagccaaaacttcacaacattgttacttataagaaatattagatagcaatttactgcttttatgcttctgcttcatcaaacacataaatcatcaactagcaagaactaaacccaattcacacattggctaatacagtttcataatgttcttgcaggcatagctgaagttggtgtcatgattgtgagtacaatcttagtgactcttgtaatgcttctcatttggcagaccaacttgtttgtggctatattgttcccacttgtctttggatcaatagagctcatctacttatctgcagttctaacaaaactattggaaggtggttggctacctcttgtttttgctactttctttctttgtgtaatgtacacatggaactatgggagtgtgttgaagtaccagagtgaggtaagagaaaagatttccatggatttcatgcaagaacttggctccacactcgggactgttcgagtcccaggaataggattgctatacaatgagcttgtccaaggcattccctccattttcggtcagtttcttcttagccttccagctatacactctattgtagtttttgtttgcattaaatatgtcccaatcccagtagttcctcaagaggaaagattcctgtttcgaagagtttgtgaaaaggactaccatatgttccgatgcattgctcgatatggctacaaagatgtcaggaaagaagatcaccatgcatttgagcaactcttagttgaaagcctagaaacttttttaagaagggaagctcaagatcttgccttggagggttccttaaacgaattagaccacgatagcgtttcaattacatcgagggaatctagaatcccatctggagaagggtatgaagaagagcttaggatcccattaatggaagaaggaacttcttttacagaagacaatgctattgctaccacattaccatctagtatcatgtcatcggatgaagacccgagtttggaatatgaactctcagctctaagagaagcaatagattcaggattcacttactttctagcacatggggatgttagagcaaagaaaaactcattttttctcaagaaacttgttataaattacttctatgcattcttgaggaggaactgtagagctggtgctgcaaatatgagtgttcctcacatgaacattcttcaagttgagatgacatatatggtttgatttcttcattcatagttacactttctcttttattttttcttttttaatttattgactgtgttgcaaaaaacccatgtcaaaaacaataatgataaataaataaacaaattaaacatacaaagtcttgtcctgagtcctgacattatatgcctttttgacttgtttcatatttttgcttattcatgtttttttgttgtgattgtactacgtgcatgtcattttcaggtttgactaatgttctcccttgttttctggttttgacttatttttaactataaatcccagattggattctctgtttttgctatgatggcataaagaataataataatccatttctcttttcacttttttttttcccatgtaactacaaatgttatatatattcatacacatgtaagtgtaacaacaagtgttctattcgtattaaaattgtctttaaaagggttatcaaaaaaaaaaattctttaaaagatttttgttttttgtttacaagaatatctttgatgaaaagttcaagttgtggtctagaacaacttcactttgtttggtctactttattattattattttttttttctcttgattttttgaaagcttaataaggcataaaagcaataaacactacttttgacttggttaaccctcaagcattactttcttgccatatttcccaagaccaaaaaaattaaataataataatatcaacatcaaaataaaatattattaggactacttcttttttctttcttataattgaaatagtcattttttttctagaaagaaaagcaggttgatatgtatcacaccattttcaaataattgaaatcactcattatttacctttcttaaaattattttatttttttaattaagtacgtatttgagactcaattcaatgattccatatgggagttatttaggtgtctctcaaatactttttgtgtagggattgtcaaagtgttttccatgggaaatgaacctcatattatggcatttgatacgcaattaaaaggtagttatgttggaagaattattaatactaatattaatattaatattaatattaacaaaagagaataataataacatgtcgaatttattcttcattgttgtctaatgggatgtttaaaacatagttatgatattatcatgagtcattttcatggattttggattaggttgggctaattatgaagtggggtttgctatatcaaatcttacattgtaacatgctaaaaaattagtatacattgataatgatatcatcacatatataatgatttcatatatataaatatacatattagactatgaaaatgctatgtaaaagtctataaatatgtaattatgtagctattattagatatggaaggagaaaataaaactttggtttaattggaatttggcacggacttgaagagtgtattttaagaaatttgtcatgtctcgaagaaactattatctaacaattggtgctttcattgagaaaaattacagtgaaattcactgtaagaactctctgccatgaagaaaatagagctttcactatctttataaattaataataaacccctatagcattttcatagtctaatatcttatattcatccaagaaaaatgtcaaaagatgattacatgtgatttataataattataatgagatttaatataaattattagaaaaaaaaaatgaatgaattccaaaacttttactattgccaacttgttttcactaatttttttttttttttttgtcaatatttataaatttttttaacataaatgaatagcccttacaaaaataaataaataaatagcaacatgcaatagctaggtcctattaactaatgaaatagaacaaaaagttctatacctaatattattaaccaatctttaattaatcatcatgtgatcatcacatttagtttttgtcctctaatatcaattatattcaattattttatgagcaaaaaaatcatcatcaatgatgaaatttaagtctttactataatacaagttatggacaaacaatgcatgcatgcttatgcttgcatatacatcaaaagaaattaacacatgctattataactagcatatgtcatatttttatagcaatgttgtttatataaaaaaaaacttaagaggtttacttattattattattattatnnnnnnnattattattattattattataatggagtatttcttttttttattgatttaatagaccctaacacataaccaactagtctggttaaataataatgataagatattaagtaagataaatgttattttggatcttatgtttggtaaaaattattgattaaacaatttattattgttaaattttattttttttttttgaaataaaaacttattgttaaataacaaatcagatattgcactattaaaatgatacaaaataatataccatgaactcaatttttgtcaattttttttaatataaccaacttaaaactaatttttagcaccaataaattaaaaaaaaaaatgtaattagtctaatcataacactttcatgtcaaattattattaagttttaatttaataaaaattgagctcagataatttttttgtgccattttgaaaaacttacataatatttgaatttacatttaataaaataaaaaatttaattaatccataacttttatatagagtctaaaataatatttattctattaagtattgtatcgggtcacaaataaaccagtgacgaaaccaaggagaactttgtgggattatgtaccctccttcaagttttttagttttatattttattcctataaaaattatacttttgtcccaatatatttttttattcaaatatattttatttcaattttacttatatatatacatatttttattttttccataaaaattatttttacttttatccccaaaaattataattttccactaatattttcttaaaatttgtgtcctctctctaaaaatagctagctagctcggccatcaataaaattgatattaatttttttagaagaatattaaatgtaaattattatgattaataattggtaatatgcaggaccaggtgtaatgagtgagtttgtattgtagtagtagtgaaatttaaatatgtccacccaattaaagccaaatttacgtcattggaaaatgactacaaaaacgtcaggcaacactctttttaaattttaggtaaataaagatacttaatatcaattatattaaattatatatattcatagaataatgttcttatatttatgaaagaaaaaaaaaatcattcatatatttatatatatacatatttctcacaaaatcaaatggccagggaaaacattttcgaacaattaatatgaatttaatttcagtagatatatttgtgtgtggggtataaattataaataatattccatatatcctttctccctctccacttgttatgttgcaaaatagatatttgatcttgtgtaaattggctattcaagcaaaggaaaagataatattttttttgaaagaaaattgtgttagacttttatttgggcttacattaagttttattgg

SEQ ID NO: 17394 - DNA, 4129 bp, Cannabis sativa
aaatatgagatttctacttttttttttacaaaaatatagcataaaaaaactcatataaatgtaaaaaaataaaaaaattcataaccctataatattatctagttatgccataaaaaataaactatactcttaatttccatttatgaaaattctccattttatagtgtaatttttacaattttaactttataagatcttgtgatacaattgtagtttggtttaaaaattacaaaaaccacatataccctttggtttaaaaaagatgttacaatccggacatgcactgcggtcttaattcagtggacaaatcccattattcaaaaataaaaaacctaaatcctccaaaatatatttagacatttccttaaaagaaaaaaaaaaaaaatagatgggataggtcatttgtataggcagtacttttgtttgactaaggaaaaagtaccaaccgtagctgagagcacctgttatatgttaatggtatgttaatggaagatttccctttatataaccaaaaaaaaaaaaaaattaattaagaaaagtgtttatcatagctctctctctcttccctttgctccatctcctctgtccctatatctctatctatatatctatatatattcacgaccttaaaagcctcaaaccccacatcaaaatatctcttttttatttgttcattgttttctcttaatccatggcgggtgatttgcacgcgcttcccaattccaacagcgtcggtgccagtaaggatagctcgaagaaggcgaaagagaagaggaagaagaagaagaagcgcggtggtagtaagaagaagatgaccgttgaacagactctggctttcaagtcagtgagcgagtgggtttctcaggaccagtcttcttttgtcactgctgcttcttgcgttgttgatgattttggggttcagaagagtctcggcagaggtggggagaagctggtcttcgaattgcattctcattctaaatgcagtgatgggtttttatcgccttccaagcttgtcgaaagggctcatggaaatggggtgagttttgtttagtcctttttgtttttgtttttttggatgaagagctgaaatgggtttggggttttcttggacgagaagctttagtttgtgtggtttttctatatgggttttcttcgtttactttgggtttcatggtgtagtgatgaacgataactctgttgttgaatcttacttggtacaatttctattccttgtggttgtggatgaaaaccttaaaaatgctgtctttaactctttttgtataataacgtctttgttaataactttattgtgtgtttgtagacttgtgtttatatggcttccctgtcttgttttggaaacttgcttaaaaatcacaaaattgtgaaaccattaacaatatgagtctccatgatatgaaaatgctaataagaatagtgacttgaaagtttttagctttaaactagcctcttccttctgcttaggcagaaaaggtaatcattgtcattcgacttatttctggatgtgtatcatctattgttgtggttgtgaaattcaatttttttttcatgttattttttccttttcttttcatgttcaggatacagcatttatttaatattttcccccatatttttgtctcatgtgcgagtaaaagctgctgcactttagttcttttgaaggttaaatgatcgaataatcattcttttctttgaaattctgagaaatgactacataagaaaactatatattgactgttatgttaggataattatttgtcttgaatcttattctaccggtgtgtctaaaagtaaaatttctacctcatctgttcattcctttgacttcagaccactgtagttttcatgtagtagctcattgtgcaaagtatcaatgtgcttgtaccaatatatatatatttttccatttgaccatgcattggaagttattttcttcatttgatttttttggtacatttgtaacttgtaaccaagtatatctcaattccaggcattaagatgttccacagtgacaatgtttttagtatatatatacacaatacataatgtttagaagctagattgacttttctttttactgtacttttttaggacatgttctaaggctgttcactcttttagaattttcattaagtgttcgcttctaattgaaaggaaaaaagttaggatttgtatggatcagaacttagaagagaggagatataataaggtttgaggaatgttttgaatttctttgaatgtagaattatttctctcaaactcttcctatttgtttagtacttcaatctctatttgttgcctttgttttgacttcatgggagcttttgactgtgaataagaataacctcacaaattatctagaaaattctttggcttcaacagcaacttatcctgtagacctaaatagatcatgaaatttaattagtaatgtgctcataacaggtgaaagttcttgctctgacagatcatgatacaatgtatggcatcagtgaggctctagatgcggctcgcagatttgggatgaagattattccaggtgttgaagttagcacaattttctccccaaggtaacttgttaagttttcattttatttttttcgaaagaagtttttttccaaggaacattgaggggttagttaagtggtcaggcattttttatctttgcatttaattgaagagctttaccatagtgttttaaagctgattctcggtatattgttttctctttgcatctgtggttgcctgtcctttttttttttgaacactattttaacccttttcttttaataatgttccgttagaaaaacaaatgctgatttatctcttttccttatttagtctttccaattgttctttttggtacttacagaggagactctgaatcggatgaaccagttcatgttcttgcatactacagtagctgtggaccaacaggttgtgagaagctggaaaattttctagctaatataagggatggtcgatatattcgtgcgaagaatatgattgaaaaattgaacaagctcaagctatctcttacgtgggaacaggttgctagaattgcaggcaagggagttgctcctgggagagtgcatgtggcgcgtgctatggttgaagcaggtcatgtggtgaatctgaaagaagcttttagtcgatatctttttgatggtggacctgcttattctacgtaatgctctatagctcagtatttagtatttccaattttaattgtttttctcttaaaaaaataagttaagaagaaatctgtgtgacatataactgttcaggggaagtgagccgcttgccgaggaagcagtgaaagtgatttgtgaaacaggaggtgtggcagtgttagctcatccttgggcattgaaaaatcccgtggccattattaggaggttaaaagaagccggccttcatgggatagaggttttcagaagtgacggaagactatctggtatgtcatttttcttttcctcattttcagtgaaataattctcctgcattgtgatttcattgtgtatctttatcaatatcttctacatgcatcaaatgtgtaaaaaccgaatggtaaagctaaattaggatatatttctagttttagagtaagaactggtatattaagcactattgtagtcaattaaggatgtttatgacaacagggagttttgtaacttataagtgtttctgaaaggcatcattttgcttatcatagtttgataaatttgctcttttcaccatacttttgtaaatttattattattgtatgaaactgctttagcatgtagtgccatctatattgttgggatatgatttcgatttgcaaaccatttcagtctctgagtgctcatctttataggggtctccttaatttatgttcctgattaacagtctacagtgatctagctgatacttatggtctactgaagattggagggtcagactatcacggacgaggcggacatggcgaatctgaactaggcagcgtaaatcttccggtgttggttctgcatgaatttctcaaagtagctcggcccatatggcacagtgccatcagagacatattagagaaatgtgctgaagacccttcagaatcaaacctagcaagaattat

SEQ ID NO: 17395 - DNA, 3782 bp, Cannabis sativa
aaagcagccaaagatcgaattcatagccatgtaatttcttggattttcattaatatgttattagctatctctatccatatctctaaactatgtatctggtcaaaatttagcttacatgcaataatgatagagcattggcattttgacagcccaaggaaaagaaaaaggaaaaaagaaaatacaaattagtggacaatgtatcggtgagtggaaattgccaattggaatggtatatctttgcttatgagcttgagttggggagctttgtgtgaaagatgagctgaacctcattgagtaaggcttccaaatcgattgcataatccctttgaaattcatcatcatcagtatatgttgtcaacaactcccgtagctgttgcctcattctctccaatgcagcatcaaaggcacataaatcattcaaaaccccagcagcagcctcacttgtctcccctttcaattgcaatacacttttgattgccaaaagggcctgtatgcattattccaacccattacttgttcattagcatcacacaccacacaatgaataaatactaaatagaaaaaataaaataaataaataaaacatcaccttttcctttagatcaaggtcagaagaagctgttagatcaacaacagacttcaacagaatgccattcctgaaaaaagaaccatgtttttcaacctccaaatccgcagcaaccgcaagatcacccacaagaaagacagccttcttttgcaatcgaatatcagtggttgagttgctcagtatgtcctaaaatatattgcattgtcattacattacattacatacattgcttgaaaaataacaatgattggtttatttaatgaggctgctcacctgcaatagctgcacaccagcttccgcaaagaacaattcttgaccaactaaattgtttcgaattaaagccgaaacagcatagagtcctttgttggcttcttctacaccatcagatttcaccatcttcatcagcttggacaatgccccgagttccagcacctgatcacaattattcaactcaaaacctatttttatatttaaatcttgtgtcattgacattccacgcattactaaaaaggaaaaagggcatgccttgctctgaacttcaggattattttgacttgatttcccaagtatccaagcagcaagagtcctagtatccgaatcaacatggttgagctcttgtataaccacagcaaggcctccaattttgcttaaatctagcgaacaagaacaataataataatattaagtataattcataattagaaaatgagaaaagagtgaataaaatggtaccatttgcattatgaattggctcaacaagtacaaggagctcctgtaatgcacgatgacgatcttccagtgacaaagatgaattactcaagtcgtttattgcaattttcataagctcggcatcggacggcatgtgtagattttgtattaattcctttagttctgattgacgcttctttatctcatcttggggtaattgctgcacgtctttggctgattcttccaatttcgcaggatcagaatggcctgaacaatcaaacgaattaaaattcgagtttgagctgataaacgttattaccaagagaaagagaaagtgaaaaagagagaccaattgcccactgcaacattccgtcaagcgaagagaaacctccatcgatgtcatccgctttctcctcctctatcgtcaaagacatagaagatgattcattgaggcggtctgcactggtcatggccaagaccatcaacatcactactagtaagtgtagattcgccatggatgagtaaactgaagctaaagaacactcctttccttccccccttctttcactatcctcttcttaaatagtatattagttaatgaaatggtacacgtcattccgtgtaacctacaccgttgatgcaccatccaacggttcataaaacttaagatatgtaattctattgacttgttttaagtgacaaacgacatgtcgttttttagtagagttatatcggcgcgagttaagttaggcaggcgctttcttctcctctcttaaaccctaaaccgcagaaagaagaagaagaagaagatggtgaggctcacagccgatttagtttggaagagtcctcatttcttcaatgccgttaaggaacgagagttggatcttcgaggtatgtatattttttgtagccctatttttcaatctagagtctttgccttactcgtcggtttgtatgctttaggtaacaagatagctgtaatggagaacttgggagctacagaggtatttcagtttcagatagtattacttcactggttttcctctttgttgaatttcatttcatttcatttctcaggaccaatttgacactatcgatctgtctgacaatgagattgtaaaacttgaaaactttccctatcttaaacgattgggtactttgctcataaacaacaacagaattactcgtatcaaccctaacattgggggtaagtaagtctagtcaagtcactgagtcagctcaggttttgtctgtgatcaataaaactctcttttggaactgaattggattcattaaattttggtttttttaatgttacgaactgcagagttcttgccgaagctacacacattagttcttacaaacaacaggcttatcaacttggtagagattgatcctcttgcctccctccctaacttacagtttcttagcctcttggacaataacatcaccaaaaaacctaattataggctctatgtcatccacaaactaaagactcttcgggttcttgattttaagaaagttaaagctaaggtagtgtttttttcatctccctttaaccaaaccccaatgatataatgtgtgcctgatatcctctacttgccgtatcaggagagactggaagctaaaaacctgttttcttccaaagaagttgaagaagaagctcagaaggaatctgcgaagaccttcacaccaggggagactcctactgatacagaaactgcagaggaagatgtatcacagaaacaagttgcaccaacacctgagcaaattactgctatcaaggtactgtgtgccctcttacatttaagaccatctcttatttgaaatagcttacattataacattcttggataatgttacttgagcttgctgattaaggtataagctgttaaactgacagaactatgaaaagatttacttgccatctttttaagttaattttgctcaattagtttatccatgcactttcacacaagtatctttcaaactaaagcatgcaattgcagtgctaaaagacttattctaaatgctacgggaatttatttttatttatttgattggaaagtttaacaagttcaagctttttcaaatgataatcataaaatctcctgatgttattgaataatacaaaatgttacctctagcttatactatgaaattacttaattttgaaattgcacatgtacatgtacgataaagaaggtggtttagttacacctctcactttgccactcatttgtcattaatgatgatgggtgaggaaaatattctttcgtattattaaattacagccagtggtattccacatcttatcaagttaaatatttaggagatttgattttatttaagttggatgaaatggcatgtcaagcttcaatttgtagatccttgcttcaaatcttgttattatgaaaaacaatatgttaggactggtttgttagcgtggacagttggctttaaaacccaaggactttgggcgttgtta

SEQ ID NO: 17396 - DNA, 4251 bp, Cannabis sativa
caaatcaaaacaattaatattctataccaatactgtaattttgcgtaaaaatagataataaaacaaaacaaatttggacagaaagcatctcataaaataatagacattgatgtgtattgtcctattgattgtatttttatataaatatattggtatacaaactcacacagaaaagaaaattcatcattgcacaaagctaataataaacacctttatgtgaactacagttgttgtaattgttgtataaaaatattgagattgtaatttctataagaaccaaaacaaaaaggcactaatacattgtgggagaagtccccaatatttagacatccgaattttcgctcaaagcaaattatatgttaaccttttgttttaacaaactgattgctattttatatgtaatccttatgtaaccttttgttttagcaagtaacgaccgatcaatcaaactgaaatttgaaccacaatttcagatagaaacttttcaacacaaaaataagaaccaaaaataaaataaaatagcaatgctaggtaaaagagttcttatactaactccataaaagaagaaaaaaaaaactcatcttaaactaatcctgcaaaattttaatagccgctctctctctcttctctcactctattatcaaaagactcaaggtcttttttatatgctgttgtattatttttcttatccaatggtataatatattgttatctgcaaaattctcttcgtgattataatttcacactctatgtacatcatctttcaagggtttatgaaggtgatttttccagcttccagctaaagccttcagatttatcatcatcatcatcatcatcatcttgcatgctatcttcatcccctgtagtggggcttccacctctcgttgcagctaactggaggggtccttggggagaacctgactgtgaactactagcttttgaagaatcgccatattgatcttggcccaaccataagccacctaaaacaacaacggattggtttgcaggggctgatgtgcctgatggaactctccttgtgtgaagtctatatttctgaattagaattaagccaaggagaaaaatataaggatattttgtttggtccacattcaagagcatataactaatttatctgtcaaaagtggtgcaagactttgaatacccagcaaccaaaaagagaaaaataataattttctttttaaaaaaacccagggacctacttgcaaatgactcttcacttcatcattggtcagaccatctacttgcatgagttctctaatttgtttaggggtggccactgcagaagaaaagatcacagaaactccaattagttatgttttaaaaataataatcatagagacagtagagatacacgttaacaaactgttgtgtttaattaagaaatacagtcaattcccatctttaatttcctaataagtaacgtctcagaaacgattataactttctctgttgaatcacatgcaaacccaacgagtggttctacatagaagagtgtacctttctttttgatctatttttaaaaagttaagtgtgaaaggtgaaaatcaattgcaactcaacgttaaagattctggactttttgtcggaataccaaaaaaataataatattgaatattaattaatgtcaaaccttgtgaacctccgagttgctgcaaggcattgacgaatcgcctgtgcaactcaggtgaccaacaccttctctgtttccgagcagtctgctgtgacccaattcgcaaattcgaatgaacattagctggcgaggaagagacagctcgaccagaattggatctagcattgccgcaacccgattcctccttgggattcttcaagcccggagtgagcaatgaaagccctggaatcgaaaactcatctttctcttctttcctcaccaaaaaaccggaatacggcttaataaacggtgcaaaagacctctctgaactcctatttctatagctcggaaatgggtcttcatttttcagaatcttctcatcattcatctgggataaatacataaacatgaatgagcaaaaagaaaagaaagaaaaggattgtgcccaactggaagcaaaattaccacatctggggttttgaatatttcttttgtgtaccttagtttgagtcatggaattttgcttcgaattcttgtttaaatgatcaccactggatatatcatctgtattccacagctgaacagagctcatccagttctttttatccctcgagtctttttcatttttgtttttcttatgttcttcgcgttcttcatcttcttcttcacaatccttcttcattggtataaactcctcgagcactggctgaggatttgttgtcactgcacattgggatgactcctttttcagagttagaatagctgaaaacgaagaaaacaagaaaacaaacaacagaagaaagcgttagaacccacgaatcattgttcccaaggatgaatacgtaaaactaaattaatcaatgcacaaagctataaaagaaatcaaaaaccaatttctagacagaataaaaaaaaaatccacacaagaaatgaaacccagttgaaataatgatgtgtacgatgaaaaaaataaaaagaacaggaggacagaccgtcacttaacaaaatcatgcatagaggaagctcgcgtttgaatgcgtcgatcttcctcatttcctcttccaatcttcggacgaaatcaccgagcttcgaggccctctcgggtacattttcgatggttgaaacctcgttgagaaattcatggatcgatttcgggacataacttgctctgaaatccagactcagctccgatggaatcgaacccatttgataaatctctaaagaaaaacctcagatctttctttgtttgttctacctgttctcgttacgttaaagaggaaaaaacgagagaaaatgagaaacacttctggagaagtcgctgtattaacaaatattatacgacaccgagtatatatgtgtgtgtatatatatatatacaagggaaaaagatgcttggtaggatagaaaatgtggactttgaaatatgaaaaaaatagaaaatgaaagtgtaaatttaaggcgagaagaaagattctgaagaaaaaacaaaacagagagtggggaaggattgataaaccaatgataatttgacagctgtctaatttgttgatcgggtagtcgcatatgctataattaattaaattttattatttatccagatgctattcctaattttctgaatttcgttgagaaactcggtcggatttaataaaatgacggaattggcctcagaatatttgtttaattacggaatattaaatagaatagatactgtttactcttttcctctccgccaaacgaatttgcggtggatggtgcatgtatttaaaacacctataatcagaaaaaagaaagaaaatacttctcgagtttccacatctcttaagtttaaaattatccttacaaaaaaaagaaaatattaattttatcttattgccgacaaaaataccaattctttctttcttcctccctttccatatttttcaaatcactaccaattcattagtaaaaataaaataacacatatgacaatattctctttttaatgaatcccactaggagttaaatacacagtctagaaaatagaaattttattttctgaaatgaaagaaaaaaactagaagatggatgtataggttttgaatagagtcttgcccttgtattttttatgaacgattttatgggtgagtttgattgattttattgtttatttattgcttggaacctattgtactaagtaagagaaattattagtaatttttttttaaaacataaaaattataaaacttttatattttttccagtaatagtactactttttgacaataatatattcaaaaatgttgaatttgaaaggatcgttaagaggagagaaggattattatggtaaaataatacttaaattaatagagaggaaaagacgtttgagagcttgtgtctaatgattacttcagtaatttgaattagtaaagacaattaagtactaatttctgttatttttataattatttataaattttattatttgtggaccccattattagaatggagtattacagttataatttttcaattccagagattttattaaactctaagggtattatttattctatatgtgaaattgtgaattatgcaatttttgtaatttttgctcggcgataacggaaaatgcgatggat

SEQ ID NO: 17397 - DNA, 2787 bp, Cannabis sativa
ttgtagaaaagtaaaataaaaaatgaaaaagaagagggggggttgctctactttttgggggtggtatggtggtggttgatgatgtatctaatcggaagccatgcctaattaaagaaagggtttttaatttattggcttcacgcgagtatgagtatgaggctggctgaggccaaggctgctaacaccgacccccacctaaattccaagcattcccacacaattataccttttctatttattttttcagatctacagtcaatctgttcacaattgccaatgccaaatgtgggcttcaaattatacaaccatactcaaatgaaagagaccctttttaagaaataaattatgtatattaaaagtattgagtaaagagctaccactcaactgttgaactaaaaattcaaataactaatattgacattaattagtaatgtatggtctacctattatcactacattgactcaagaagtgtgttttgtgagtgtattcccttttaaaataatggtttgtttgtttttccatatattctcttgttttttttccaccaatcttgccaaaccctatgtgctaatcactaaatcactaaaaagtcaaaaaagccactcacattttcattgttattattattattttaagggggaaaaaagcagtcttggatcttagtcatttacccggatccgaaaataatggcccgattgagtaaatttcgaggggtcggtcccttcaataataattatattaggcacaaaaaccattgttaaatcatggattgtgtcaaatgtcaatcactatatgcgttctactactagccagttagaccatagttttgcccaaacaaagaactcctttcggctaaaattatagaattacttaaaagtctctcgaagtttggtgatcatcaatatagaggcccgttcatatatatcctgttttagcactaattatattacagggagcataggctttttttaacgagtgttagagctaaaacctttattttctgctccaataaatgagataaacctttttctattttagctagctgtttgtttaccaaaatgtagctacaaattatgggtaaagtattttataattattttataccttttacctctgttttttttaaagaattaattttttattttattattatttttttaatatttaattaataaaaataaatatataatacttttttggctaattagaatttttacccctcggactttgacatgtaccaaatcatgcgcccctgaacttcgaaggtcgttagaaatgccacccaaactattaagattgtctaatttaaggaatgttgtctaatataggaatttcggcagaggttttgtaagtaaaaattgttcaccttttatacatgaaaaataggggtatttataagcacatgtatggaagagggcattcccttcacccacctagggtttcttattcagcacgtctcattagctagactttacagcttggcgatatgactgttggtagataggaaacctcctcattgtgtggtgcatgactattgctatccaactcgcggagctacggacacgtgtcgcccaaaagtttcaccttccaaaattagtgtatatacaagctgttagataagaaggagctacagagcacgtactcgcactaccaaggtctgacgcatgggacaagatttaatttggtgtcagaagatatgcaactgtcgggtctagttgcagattaggcatcagggagttccaagaacgtctggctaaggctttcccaaaccaaactaatttgctactatcctagagcacatgtgacttctactcccttccattagaagcattattatgagaatcctggagtcctttccaccttcactagcaggaagagccttcgggtactacaacgcctttcgtaaccccgagaagcgatgggcatataataacaatgtgtaatctaatgtggcatctttctgtgattgccatgtacacttcattcgataacacagataatagttagctttaatgaacaagtcaaaaaatacaaataatacatttaagctagaacctaaccatctcaggattagatctattgatctaagatcaacaaagtgatattgactcataaagatataacggtaagtttatgatatcttttccactatcaatatcggtccagtctgatatatactcaatacatctcatactagtacactttgctaatgccctcgaaaggacattccacatatcattgtgtaagtaaactttatcgctaattatcacgttagtgtaaattcagtgtactgataaatcatggagctaaagactttgaagcatatagttataattattttctactgtgtagacaatactataatcatgaataactatatgttcaggatttgatagaattaatacattaaatatataatcatgaaagtaatcatgtgaaccatgcaatataaaataatttatgatcttttattaattagtaaacttaattatattgaaatgagttttatttaaagtataaaattccgacgattatgtaagttgatttagagagaatagaagagataacgagagttgtaatgacataaggtgtatctgatccttattactacaagtgagaaattatgtgcattcattgagtgatttagtcctagaaattgtgagcaacaagttgtagctctgtttttttagctcaataaagattcaaagccactagggctgttctggccaagaagtagccaggcaatatgattatcattctatttgaacctcgtaaatatttgatgt

SEQ ID NO: 17398 - DNA, 2872 bp, Cannabis sativa
aaatattatgaattagtttaaaatctaattccaataacttagtatgagttcggggttcgagtcgaattgggggtacgtgtccaagttcgggtctgaggacagggtcgggtcttggacaagggtctaggggcaggggcaggggctgggtccgtggtccagtttaaggtttgaggtctgagtcggagtcgaggtcagggtctgagattcgggtcgggatctaggtctagggttcaattcaagatttgagtccaagtttggatccaaggtcggggtatgaatcggggttacggttcaagtgtgagtttggatccgggttctaaagtttaaattgaagtttgagtccaaaatattaattaagaaaaaaaactgtttaaaaatattttgaaagtatttttttttttttgtatttaaaattttaattcttaattaaaaaataaataagtgaaaacagttttataagacatgattttaaaaaatatttttacgtttctaatgtaaaaaataaaagacttattaaaaaatgttaacaaacacacccataacaaatattaaatttaaatttgatatagttttataacttattatcattaaacaccttacaacaaaatatcactaaataaaatacaaaaatatcattaaatttgatatagttttaaatttaaatttgatatagttttataacttaaatttgatatagtttttacgaaacatattttgtttgctaatttcacataagaatattttgccctctataatttcttttaatcagttttttggatttcgaccaaaaattgataattctttgctcaaagatccatgtatatttggctcatttgagatcaatctttgaacatattaagctttaagacataatcattaactttatgaagaaatgaactctcacaatcactattttgaaatcatagttcaaagcttctcaattattacatacccgagtctactaacaaccataatatgcatcattaactctgctcctttactagctccaaggcatacaaagcagagaccaatatcttattattcactaactaactactcacagatttggtgttcatactgagactgaagcagcagtagcagcattggctggaacaaatttaaccgaaacgctattcacgcagtgtcgttcatcggttggagtttggaatccttctcctttgaaaacatgtcccaggtgaccaccacaagctgcacaagttatctcagttcttctcccatctgggtcaggctaaggaaaagaaaacacaacaatgtcgtttgttaattgcattgttaaacgacaatgactgctcaataaacaaccaacagacacactcacagtgcggtttatagctccaggcagaccctcaaagaatgcaggccaaccacaaccagagttaaatttggtactagctttgtaaagtggtgtaccacaaccagcgcaatcataaattccttcttcaaacaacttgtcgtatttcccagtgcctcgttccctacataccaatcaaaaatttaatcaaatactgctgacaataccaagatccaagagcagaatttaagttagattttcagtttaaaatataccctctttttaactcttgacaactaaacatacaattcttgagtgggagactacaaaagctataacaattattactagtgcccatgaagactttaataaccacattgctctaaataacatacccatgctcaaacattttacctataattcttgtttaaaacattcacaatttgatagtattgccacaatattgtgctaattgtaatagttttccaattcattgaattgagaattgaataattgtacttgtagaacgctgaaaccccaaatctcagtatcacagaccatgttttcaaaataaatccctaaaccaaagaaacaaatgcttggacaatgaacaactcaagaaaaacatagtcaattaaattactattgtgtaatcgatatagatatatttatataaatcttttgttaattactctgttcctttttgacgaagaatcctaaactgttcaggagagagaatagctcgccactcttcttctgtcttttgcactgggattggagcaggtgtaggtgtagtcgccatggctgccgatcttcgcctctatctgtcggatcaggattagatgttatttggatttgttttcttggaataaatacaattttctcgggaaaatgaacgtagacagaaaattgtcgtagagagaggggcaggagctcgaggtgacttctaccatcattatcatttttatttattttttacatttatttttgtaatttgaaaaaaattacactacatactacattatttttatgttatactacatttttgtaacgtgaaaataacgattttctttataacaatatgcaaacaacaatctgtaataagaaaaaaatcataaaaatataaaaggaacttgaatttttataaaacataaataacacacttttagatttgagattaggtctcgtaatatttcactaaaaaatggtattgttatgggaaaaactaattttgataaatgaaagttacaatgaagaatcttcaaaaatctcactccacgtatggaaaaaaatagcatatgttatatttatgagcaactctttaatagttttaaaataaacatcatgtatcttaccattctaatatattagagtaaaaacaaaaacatctaacgagcaaacaatttaaaaataaaaagtcgattaaaaaataaaataaagccaaaaagagtcgcttgtacttcgaagatagtaagtcgaaaaaagtcaccaaaaatccaaaaatcgatccaaaaagtagacccaatagagttactcgtgatttggggatagtgagtcaaa

SEQ ID NO: 17399 - DNA, 9350 bp, Cannabis sativa
aaaaggaaaagaaagaatgagtgttttttaacatacccgaaatactgatttaaaaccaatacccttctgtcctatatatccagcatttgatcctttctttgttgaacttccaacatcacataatgctctaatattctgggcagaaaaaccacgctcattgtttaaaacaataatacctgaatcctgaagaataaatgtcagtgttggttccacgttttctgggtagatattgtcatcagcattctgaacctgcaacaataatgaacgatgagatgtatttaaaagaagatacaaaatcatggacttgttcacgaagcagactcaaacagatgagttgttgtcaaatcaataagaaaatatatgtcagaaaagaaattaaataaaacacaaataaacaagaaaagaaaatcagatattcccgacaaaaaaagacctaaaaaaattattttaggagagaaaaaaaaaatacagtaaaaaagcagatgagaagtcctccaacaaggaaaaaagccagagatggcaaaacttgaacaagatttaaatatttacgacaaattgaaccttcaagagaagtcaatgatgtagctgtttaaaaacattatatgattgaattccttccaaattccaatcaaccttgcaatactcaaagcaacttcgggcatccttcaattattattcatccaacaaatccaaaaaatcataaaactgtgcacacttagtaaagataatcaaggaaatctccccgaaattcggtattctgaagattatatgcccaatcattacaattcaataacctgaaatctgaaatatccagcatttctgttcccatgggtggtcatactggaaaattctttccaatatcacatttatgcctttcttacatagcatccataaatgtaaaattgaccagaatccatgtactcaaacatttatcgtgagcatactgtatattaacttattaggatgtatgtcaggtagaataactttcatattaataatgggcaactactaacatttcacagatttttccccaaccagaccactcaaagggggaattttgcacagactatcatagtcttggatttttttctttttttgaaacctatgggtatctgggctccaccccaactaatcccataggatacccggcaggccccactgcctggtcccaagattcaacagggactttatgtggtggctggaatccaaatctgagagctctgccaaatcagaccctgctcaaggaacactagccactgcaccaaagccctgtgggctattgaaaatcttggattataattaccaggaatatctcgagtaagagtacttttatgttataattcaagagaaaaagaacacacaaaacaagtaaaacaggtgagtattcaaactaaaatggcactctaaaagagacaatgaagtgcccaatttgcacattaaaaaaaaaaagagacaaaaaccaataattttgttagatgaaagcagggtaacgcaataattgaattgtaagcctcttttgtaaagcacatacataaaatataatactggcttatttttcaattaattacaaaatctgatagtaaaaaaatatatagttcaaagaaatcaggggtctccttaccagctcaagaagaaaatgtgaatcctgagaatataattcctgagaaagacaatgcaacgctcttcctaagcgagcatgctgcttctttaacatgccattgtccgcgtttgaaaggcttgaatccaggccaaattcatcttttctgatagattcaataacaagagctgcatcttcatgttcattaagttcagaaatttgtagtgagccagacacttctgcatccttggccacagcagaaactttagtatgttttcttttcttttttaaagcaactttagtatgttttctgcttttctcgttttccccaattgtaacacattcatccttattcccttcatcagatgtgggaaactggcttatgacatcttgcttatgtacagaacctggttttctattaaatacttctgaatccccagaccgatacaaatcagtagactcattggaagaaagagaatggtaatcattaatccactccatgatgccaagagttaaacctacttcatgaagcatgagacgttgttctaattgcttgcattcacataaaattgctgaagcagcatctttggtgacaggttgcatcccgaaaaggaatacatcagcagcataagaacgaaactccgagggtagataacgaaggcaatcaaggacaaaccttgaaagagcagatacagctacgttcattttggtcaagttactttgtaacttgctatcagaattagtcggcatagcttcactagccattctcccttcactaaaaaggaagtttccacagctatttgactccacattttctaaagaattattccagattactttaaatgcatgttttgcatggcatttcaagagggaaaagggaacatgtttttcccctccaacgattgagaacagagataagaatttgactgctgtttggaaagatgatccttgaattgctgcttccaaaaatgaatcaacagtagctgaaggatcaattcgaaccaccttcccatctccagtcaccaggcacaacaattcatccgttttgacttcattcaataaccatggcacaagaggaccaagtgaaggagcaaataaaaggtcccaatgtgaccataatgttagatccgacaacattggtgcctttagtaagacttcgattgcatctttgttcgttacagagttgcaggttattacatcttggtcatcagaatttctcgtagaattactcttcaataagtcatttttgttcttggctgatgattctataacatttcttgtagataatgtgacagaaaatatgacagatttagaaattacacagcctttatctttcatttccatgcttagaaaatcttccaaagagccattagctacaactttgaaactaacaaatgggaactgcctcataagaagtgaagatacatcctgcttggttatgtttccattctcccacaaattattggaagcttgtgacagtaaaaaaaccaattgctggtgcatcatccgaacctccaaaggacttttttcacttacatcacccgttatcaacttgcacagctcttgtggtagcaaagacgcatatttttctagaaaaagtagaaaatccccataaccaagggatctaaactccttgacacaaaatcggtctgtaacccaacgctcacatttggaaaggtttatcaaaatgctataccttttctcaataattgaatcattatttctaggggtttcatgatcaagcttgacataagcagtgactttcttgataatatcttcaactgaaacacctgtagtagttgaaatcattacaagtctcaagaaggaaaaaagaatatgaatataaaattattccattagaatgaacatttccatttattttttgggactgcaatactttagtttctaccaaacatagggaatgaatgaatacagattcctgaagttggactcaaaaatattttcacaataccaatgtattcataatatgcaagccctgccaattttgaacttgtttcacatgaaaggttaaagggtttttttgcattttttgtaattataaaagcacaaactaaaaaattatgcatctgagttaatgagcatgaaagcacaatcaactaggggaaatatcacaaccataccaatgatggatattacttttttttgcatttgttgtaattataaaagcacaaccatgaagaataaaactagggaaaatatcatgcacctccttgagatttaatgagcattcatcttacccctatgttctcaaaaaagtaatatgcatctgagttaaaaacaaattggattaaaacaatcaactgtgtcatatttggccagaatttcagtatgaaaaccaattggtcaacgagtagaaaaaaccaataacaatcaaacagcatgtataccaaacacaaaaacacactaaaacgccaccacttacggaaaataaaataaataaaatgcctcctcttcctttacccttcaatactattcaatatatttgaataatatttaagaacaagcatggttggctttataacttaaaaactattttcagtttttaaaagcagaatattgctttctaaaaacaatagttgtttgcccatattttttagaaacagattttttgaaaactaagttaaaaataaaatataataagagaacatcaaaatgatgttttctattgaaaaaacaatttaatatttcttggtttcccagatcggggtcccattttgggtttgagtattgagtctagggtctggcttcaagtccaagtgttggggttaggggtcaatgtccaaggtcggggttcgggttcggttctgagtccggttttgtctaaagtgtggggttcgggcctaagcacaggttcgaggttcgggctaaattaggtttgagtagaggtgatgggtcatggttcgagtcaatgtcacaagtcaaggacctgatcaatgtcacgggtcaaaattcgggtcgatgtcacaagttgggtccgggatttggggtttgggtccgaggtcaggtccaagtcgaggtcacgggtcaagacttagagtattgtaatttttttttagagaaataaaaaaaaaaatctaaaatcctatttttagaaaacattaacaaaatgaatcttgtgttttgaaaactctctacctcctccctttacccctctctgaccataaaggctcaccaacaaaaaaattcacactttctttgtcagtcctgtcgctcttacaagttttcttccttcatctttcttcattttccctccccctccctctctcaaacataataaaggggctcttttacaataggttttttttttttttcaaaaataaataaatacgactgaataaggttcaacccactttaggcattagccattttataatatacagatgaaaatcatctaaataacagcctataatttcttttttaacttgatctataaattaatccaaggtttatcatattttccctttaaattatgatgcacaataacttgctacaatttactagtatttaacagcttttaaaaccaaaaacactcaccccgtgcatgttgttcactggtcactagtacatcgtttcttggttcaacgcttatgctctcatactcgacattatcatttataagaggctttagtgtttcatatttgctaatggcttgcacagtgtcataaatgctatcccacattcctaatttgatagatgaaacctacaatatgaaaacttcattacaacatgcaatgtcataaaattccagttgaaacaatacatatagcttcatacatgttttgaatatgtctgcacttaaatgtggtaagaaagagacaataattgatcaccatcaacttacagcaacatttaataatccaatgaatggataacatgaacataaagacatcatcttcttccgatctttcgctttataaaaccgaagcatccgctttaaaacctacatgaacaaggagaaatctgttcaaaaaaaaatgctacttctaatccaaaacattatcaagacaactcaaaacccaaaaacttgtggagttatttaataaagaagaagagaaaatatgcatcaaacatgttaacgttaaataataaatatatgttatactagtcaagttttaaatatttggaaggaccaagaggttgataagcacacttcagttcatgggataaaagataggtttccatcatatgcatttgatttagataatgaaatgcattcttatgatagcttatgaagtaaaaggagacttcaaacatacctgacccacattaacacctcgacatctatccttccaaatagcaatgaacatcctcaaagaatcatcggtaactgaaaagtcattttcagtggctgaagaatcatcttcatccatatcgctactctctttgggtcccttcccattatttacaagaacatccagtcctaccttctttatctttcttaatttggcaggttcagagttgttgcaacttagctcttcaaattttcttttctttttaactgctccactactgttacagtgcttgtggacagtattagctgaagccatgtactctttagtttcacctttcagcccaagccgtgttatctcctcagctgcagacgggtaaggacaactacttggtcggtctgaacttttaacacgtgttgagatgtcagtagcatcgccactatcatcttcataaacacaaccatcactaaattcatcctctgagcttgatgatacgaatttagtgtgcttgccacgaaaatccttatgtacagaagaaaatgattcaacacgatcagaaatggcattaaaacgttcatctagttcttttttctgcaaggatcgaaggagttgcctattttctttgggaaaatcggtcttcacatgctttcgaagtttggttagtgcagaattttcccacctcttggccttcacgatataagatgtatgcaacctatgataaaaagtatattcagatgagatcacacaccaaacttcagctaacatgtatttaaagttttataatagtcagcatgaatgttgataaaattcctctggtcgatacagggaagcaaatcagacaaaagtgcatattgtcaaataaaaaatcgataaattcaggataattgagccagcatattggcaaattgtcatcctttacagtcaagacatgtttgctatgcctactttaatacttcatttgttattcttagcatgtcttatttccataacaaataatcaaagaaaagcttctttcttttaccccatttaaagacgccaattgttaataaaaaacaggatctccattcttaataactccataaagaaagctaaaaacatcaaactacaacaacttaaaacagaaacactctgaagcaaaaacatgaataactttatattagttgatgtgaaaaaaaaaaatcaccatcaaaagatataaatgaaataaaaaaaatataaaaaatcgtatgaccagtgaaagatataattctccggagcaacgattgcaataaaaagccaattataaagtttaaatataaatatataaagggaaactaccatctacaaaacttaacaactacatgtttgactgcatgagtgagtgttcgggtgagtgacatggtataaaataatgatggcaataacaatgaagatgatgtttgcaggcataacaaagtggtataacaatcttgagttcaaatcccactctcaagtcaaataaataaataaagaacaaggttttcagagcttgaagctacactagaaatgtacataaggaagtaaaaatgtgctgctttatgtcaaacaaaagaatatgataattatacacacctcaagctttcaactcttatgccaagctcttccttcgtagcaactgattttttctcagcaatgaaattcaaaaaatcatcagcctgaatacctttactagtaaacttaacttgatattggaaaagcaatgacatcaactctttagatgttatcttaaaaacttcagttgtatctggatcaagcgagaagtaataaactataagagggtgtcgaaccaaagggcccaatcccaactcatcaaacttagcaaccccttcaagctggcagattgcttgttccaattcatacaccgaagtaattctccgcacagcaacaaagcaatggataaatgcatttatctgaaaaaccaatacaaaatacaaaaactgagtgaaaattgtatgaattatcaaaaatattgctgccaaataaacgaaaataacagttacagaattcatctttattgacatgaaaaatatggttgtgtactcattcagtatattttggcaaaataaagtattttcaataggagtaatgctaaagacacaatacatactttttacgcacaataatgatgtgtatttaattaccatcatagattattatacatgggaaccgtgttactttgagattaattatacattgttgtgtgggaaaattgtcaaactaactatgtaaaatagtaaaattggcaaaataacaacactcgattaactctatgccactatgacagtcgcacagtacaaatctatggtcgcaaaacgactaagattgttattttatggtcgcacagtgtaacttatggtcgcttacatagtaagtttgctaataaaaatttttgtaaagatattttgctaataaaattttccgtagagtctatttttacaaaacactatcttattgtgtgtaagatagtatgtgaaaattaagtgtgttctttcgataataatactctatattttaaaatcttagtaacctgaaactcaaattattaagcaaaaaaaactgaaactcaaatttgatcaataaactatctattatcattacactgatacaaaatatagttcaaataatcactagcacaattaacttccttatcaaattaagatcaaactatcttcaattaagcaaaattctaagtttaattcaactaaaaaaaacaaaaaaacaaaaaactgtctttataacattttaatgatcaaattagacctatgcaatcccaaaatacaagaaatgattactgaaaacaaaagccatcaaatttcaacattacctttccttcaacgagaataatattattaagcgacggaacttcctgcatcctaaaccccaaagacaaccacgaatcaatcttaagagccgaaatcgcagcctgagcaacctgccacgacgatacgcttttaccagcagcaataaaatctttgcgagccttctcaacagcgtaaccaaccttctcaatcatattatcccgattctgaggagcactatggaactggaccgcgggagcagaaaactgataattggcggcggggaaagtcggaggaggaggctgctgccattggtggtgggaggcgttctggggttggaaggcgacggggctttgaaagtagctgttagggttttggtagagataattagagtttagaggttgttgttgtgagtagtatggcggtcgctgttgtggttgtggccacctccagtggcctccgtccatggcggcgccggcgaagaagttagagagagagagagagagaaataagcgggagttagggttatggttagaagttttaaacctgtggttttatatgtaataataacactacagagcactctcttatttgtcaatattaagtatcgggtcacatataatttaatataatagcttttagagagtatcgctaaccaatcgtaacgcgacatgtcccaaaggtgct

SEQ ID NO: 17400 - DNA, 6350 bp, Cannabis sativa
  modified_base (2796)..(2813): a, c, t, g, unknown or other
taagttgattcgaaaattattgccctattaaaaaaaaaaaaaaagtgtaattaagattttcaattattgaaattgttaaatttaagaacttttgtttaattttaataaaaaaaatttaaaagttcaagtgtaatgatttgttacatgtaaaattgtgagaaaaaaaaatcctaattaacttaaaaaaaaaaatattatcaaaaaaaataaataaataaaaaaaaacttactatagtgtacaaaaattattttaaagaatctttaattggtaagaaaaattagtgtttgtacattatttgattccatttattattatatatttgaaaaatataatacgggtcaccttttccctcccccgaactctctctctcaatttctttttcactcttttgccgaccaaatgaaaccccagtagagtcccaactttctcattctccgacgcgctttctgtctttctctctctctctctctatcccctccgctctttctctcactaaaaatgcaggatatatttggatcagttcgtcgatcattggtgtttcgtactccgccggagaatgaagaatcgtccacttccccaatcggaggaggaggagtaggagtcccaactttggtggacaaaatcaattcctgcattcgaaaatccagagtcttttcaaaaccctctccgcctcctcctcccccgtcacaaccggcgtcgatcaccatagaaaatgctgcgcctgcgatcagatggcgcaagggcgagttgattggttgcggcgcctttggacgcgtatatatgggcatgaatctagattctggagaacttcttgctgtcaaacaggtcgctttttatagtttcgttattttttttttatttcagttattaattggtttttttttttttttgatatatcaacctattctcagttttttcttatggtttaattgctttctatctttgatttcgagttctttttgaactgtttctcgatttaattttatttgattttccttctctctcttttgtttttctttcgcattagtagttccataattagttgtttatgtgtagagtttaatttggatttctttatttggcgttcaggttttgatagcagcaaatagtgcatcaaaggagaaaacgcaggtttgaattcaaacttttttgtttagtgcagataggtaattcaagttgaatgtttgtttatggtggctaaaacctctatatgggattttacatttttaatagcaccttaagaaaagtaaactagatattccgactattatatttttttttttggggggggtggggttggggcatacactcctagacaatgaagtgagtaatgtaatttattttggtttgttttctgtaatttaatcacagccttctatagttgaggctaacttaattaggaacttacttccttactgtttaatgctatgaatttgtttgttgatctactgatttgatgctacgagtagactcatctcaaggagcttgaggaagaagtaaagcttttgaaaaatctttctcatccaaatattgttgtaagtgtgaacttctggtgtctaattaactgttaaaagcctatcgttattctaattgtgtatttgttgtggttccttagagatatcttggtacagtgagggaagaggacactttaaatattctgttggaatttgtccctggtggatcaatatcatctcttctaggcaaatttggatctttccccgaggctgtaagttcttcctaattaaacttgcttatctagctataatttaatactcataaaccaatctgtcaagcaggttgtaagggcatacacacatcagttgttactgggattggagtatcttcataaaaatggtattatgcaccgggatatcaaggtatgttttcttttccttctatgctagtgttatgcatgtgggtaaatgagtttccttattaggttgatgacatgcattttgaattaaatttcagggagcaaatattcttgttgataataaaggatgcataaaactagcagattttggtgcatcaaaacaggttgttgagctggtatgtacatccctcacctttcacatatacaatatgtgtgtatatttataactgtgtatatatatatatatatttatatatcattttgtcaatttgtttaatttattgttttgtgattattgcaggcaacaatttcaggtgccaagtctatgaagggtactccatattggatggctcctgaagttattctccagactggtcataatttgtaaggacaataaataccattctagcatcttctttttgcttaatgaaattctttgggggataggatgagagttaatggacagagtttattgttttagtttagaaaatttaatcctagatgcgatcatttactttgtctgcttcctattgctggtccattcaagatagttatcatcactgcatggcataaatcctttttcttgattatcttttggagagctgaaagttactgctatatgtgaaaaattgtctagctctgctgatatatggagtgtggggtgtactgtaattgagatggccaccggaaaacctccgtggagtcaacaataccaggaggtaattttctgctattctcctatcacttatcagagatactgttcaacaacaaattgagattttctttttctctaggttgcggctctttttcatataggcacaacaaagtctcatcctccaatccctgagtatctctcttctgaggcaaaggattttctgctgaaatgtttgcagaagtatctcaaatctctctctctctctcnnnnnnnnnnnnnnnnnntctctctctctctccctctctctgtctctcaataatttgaattcacaaaatgtcattcctatgcttcgtgctatattaaaattttaagtttaaattacattcttttattagtgatgttcattttcatatttgtctaatggcagggagcccaattcaaggccagctgcatctgaattacttcaggttatataagttggtcaacttcactatatgttacctaaacatttctggcagtgattgaatccttgtattatataacattttactttaatgttttggaaccacttgcttctgattaccatcaaagttctaactatttaatgcttaatatatacagcatccctttgtgaccggggaagacatggtatctcatcctccgtcttgtgctcctgttgtggttagtcagagttatattgtacttgggcacttttttatataacttgttctctctcagattttattgataaggagattttttttttggaccattaggaaaattcagaaatacctctgcaatcatgtggtaaaagcttggaaaccttgtaagcattgcacttttgccccttgctgttttttttttcctaaatgatattatacctcaggcagtgttttgctgtaattactttctttgcctttaacttggtagttctatttaattcccagtaaaatgtcaacttgctccgacacaactgatatttgtgaaatggctagtctgcactgctctactggctctcctggaaatttattggatagtaggtttaattggaaaggaaatagcagtgatgatgacatgtgtcagattgatgacaaggatgatgtcacagtgagtggagtaaaactcaattctttgatgtctgatgactttaaggtaactgagcttcatgttatctggtttcgatacttactaagctttcaatagtgacagatcttatttaattatgtgtgtcttttatatccagagttataatcctgtaagtgagccctctgatgaatgggagtgcaaattcaatgaaagttcagaaagagaatacgaaggattaaatttggaaactgagcaacaaattcctttgccgactagctgtcctgaaattcttggtgatgtggataaagatttctcatttccttgtggaccatcactttctgaggatgaagacgaactaaccgaatcaaaaattgcagctttcttgggtgagaaggtaatgtttctagttgtattttgagtcatataggctgtcatgtattttaaaaggactttgatacaggtatgggttctggattttcagacctcttacattttcatgctttccactaatatgagattgtgggaatgtccaatagccatgtctaagccgtgtactgttgcccatgtcatattgtttggttaaagtaaagggttactcattctattgttctgttctcgtaaatttgctcttgctctgaaattattctgttttcaattgtaataacaaaattcaggctctcgaactgaagaaactgcaaacacccttgtatgaagagttctttaacagcctgaatgcagttgcctcacctacttatgttgaaagtataagcgaggaaactactccaaggtacttgaagttacctccgaaaagcagatctcccagtcgtggtcctgttggttccccatctggcgcagttgattctcttagtacaggaagtcctgggagtaatggtaggcctgtatcaagtatttgtaacgcaatcgatcaaactttaaagaacacaccttcacctccacccagtaatatgagagggcttgcagttgatgcacagcaggagccaaatagtccaaggtttgttcaaactttacacatttcagtttcccatgaagtgatagtagtccttgagaatttttttagtgagtattctgatatatttatatggaacttacagtatgagctattcagagagacagaggaagtggaaagaagagcttgatcaggagcttgagagaaagcgaggttgatatttcctgaatatgccaactaaatatttttttcttgctgtgctcaatatgttgtagtttgtgcggatatgattcttttgcttgtttcactttagagtttcagaatttatcaaactgcatgaagtgataagtgtttaaatggacctactaattacatattattttacctagttcaaagtgtcacgtgtctatagttcttgttcttaagggtaaatttgtgaatgggttgctgtcaattctgagatacaaaagtttttgtttgctgaaatgcataaacaaccttaatagttttaggtgactttccttgattgctcaatttgtctgcagagatgatgcgtcaagcaggtgcaggagggaaaacgttatcacctaaagatcgagccttgaataggcagagaacaaggtttgcgtctcccggaagctaatgatgtatgtatccaagaatttttttttgctggcctttcaagagttctaccttatcttatagttgaatgaagctccaatatctggtgagatagaaaagtaaaaataacaccagctgcagtcaattttcgacctccacaacaaaactgcagtgcattctcattcaattcaactcctcattgttcaaccgaaaaatggctgagctacattgaagtgtgatgatgataatcctatttttctttcctttttcccatttgggtggttttggtggaggaattacctgtttctctgagtttgtatccaaagtgcatagattttgtaatattttatgtagaataatttgtgattagagaatattatgaattttttatgccacttttttatgtgtggtttgatcagaatacatccgagtcttgtgattacagaatacaattttctccaatctgccatattgagtaagttcatttattgttttaagttaacccattataattctttatcagaaagaatttaagattcatgagattattacatacaaaaataaccatttacaatcttgtaacgattgcgattaattggaggcaagcaataaattacatgggatcttcacaccttacaagtaaaaataaaaataaaaaataaaattaagcatatcaatatggacatcgagaaaatatcttcaaacaacaaaatccatcccatgccaaaacaagatgtatactcagaagccattccattccatttccatagctcaaattctccgagcagaaactccaactgggatagaacaagctggacgttgcttcaaaccactcattgtagttattatcccatcactactcttgtaaacattgctctttctgctcttcaggggtgacaccaaccttgaagccagccttgaaggagagaatgaacggcgtagtttcgaggcagtagacatctttggagacttgattgaggttctttttggtggagaacgagaaatcaatggtgggctcttgatcttcacctgaaacttggaatttgagtgcggagatttgatcaagaacttatgtggagtatgttgctgtgtgttttgttgcttgtttcctcttgcaatgactggagaccttgtcctataaaactta

SEQ ID NO: 17401 - DNA, 4646 bp, Cannabis sativa
cttgcaataccctggcgacgtgctgatttggcaacacacaagtttgcaatataaccatatctattttgggatgtacggtttatgctgcagaagagaggagctttcacccgttcctgagtgtcattagttttagttttaaagtacacttttaattccaagagatggacaatgaaacaaatatagaatgcttttatacccctggaaaggtttctccatgcaacaagtaccgaatgctcaaatcgagagttccaaccacacttttcagtactgtgcgtttcacattcttcgtttccttttttacctgataaattagacaaaatactgagtaaggtctcatacggattacaatcggtcatcaaaacttccttgccatgtaaatgagtgagaaacttagttgtgctttataatttttttactcatgtatagatgtcataccgcaacaatgcatgcacatctttcatttggcctatgctgccatttgtttcgctttttaatggcattaaactcctataacatgaaacattattcaacaatactgttatatttaccaagtgattgaattatacttaataatgaaaagaaatgaagaatcctacctgctctgcaaatttccttttgtggttatcgacatatctgtgttaaccaagtgtaggctagaattagcttggtgatatacaagtaatggaatgcaaccaaacatttgaaaggtccagccacaggtttcctaaaactagtcgaacctgaaactaataagagtttgaatctatcccctctccttttttttagaacaacctaaatgggtctaccaaataactatgacaggaattcatacaatctttagtcaaagtatactgaaaaaccaaggccatgtacagatataagtgatgaaatccaaactttaaattaatattatggagaaagagggcgcacctgtcacttgatctatcctcccagtgactttctgcacgaagccatgctgcagtctaccacaagtttaaaaccaaacaagcacctcaaattaaattatgaacaaaaataacccacacccaaatattcactggcaaactatttatccctctgctatatcatttcctacccagaattcttcatcaagaatggcgtctcttgcaacaaaatgtccaaattcaagttttttttcttgaattaaatctctttctgatggttgcagccggttaaattgcagatcagatgattttaataattcacgttgagtaataggtgacgataatgatggaatctgtacagaaatttcttcaatcttctttttttcagaagatttggcatccattgtcctgttaattcacccaggatatatatgtagataagaaaatgaaaatacaaaagaaaacacacaacaaaattaacagaaacaaagacaatccatatcagaaataacataaactagagactcacatggtaatggcataggttctgtgaaatcttctatgtgatttgattctgccatgggagaaactcaataactgaagcctgtgaatcgaaattgtcgacatttgagcagttcttcctccagaatctctcctggaggaagaattcttctgcaaaaacgagattttatttattgagaatggtgtaaaccaatcccagcatgtgaaatttcctttgatgcctgcaagtagggtagctggcgattaaaactaatagaagattgggaaaaaaaatgataccagagtacgaagttatggatataacagcagttataataacgctatgattgacaagtggttgaccacaaatggaggataagacaaaagatccacaaggacattatgagcttatttatagtaaaaagaagcctctgaagagattgaaccagatcattcatgggtctgtcctgtttctactttcccatgttagatgggacccgcagtatggtaccccacatcaatggtgacgcagtaaatctaagctggtttctggacctctatttgtattgaaaggtcgaaagagtttaaaactcaagagtcttacattcatattatccaaattccaaatcatagttgggtgttcaccaaaaatgtgtgtgtttgacagcatagcaacgttaaagatttgtcttttgtgtgttgattggctgggacagcccagccggtgcaccaatcatgtggttgtaagcagtaaacgtatcatattcatatatttgtaaacaaaagatgtaaatctctctagtagagatatatctccttttatccattccattgaaatccgtactgtacaaatgagaattatccaatttacttattaaattaattgaattaatccatccaaaaataggttgtgttccatttgtaatttcaagattcaaccaaagaatatcatttacttttaaattccttactctgcaaatcatatatatttacaaacaaagaaacccaataccaaaataattaattaattaattaattaattacaaaagttgttcaatttttattttatttcgctctacaagccaaattccgagtagattcagccgaataaacacgccacttttgaaaaccaggtgaatattttcattattcttgcaactaattaaaaatccatataacaaaaaatcatttgactgaaatcccaactttttgacacataaaggagaaaaagaagaatactgaaatggtgttggagtgagaaaactaacttaccagtagcttgaagagcaagcagacatatggagggaaagaaactatatatggcgttgcagaaaaacagggaatgggttttgatttagggttaagagttcataaagtgctctgatcaatatagcctaaccttcagacattccaagctaattactctgaaagtttaagaaaaatagacgaaattgatttcaacggttgcagagcggtggcgacgatggaccgttatgacggcgttgggttatgtttgaattcaagggactttgttgagactatgaggaaggtagtggtgatgggatttgtctctttaatctatttgggaaagtgtgatcttgtgagtgagagtgcacagttagctgtcgtgtggtatagtatatgatctcttcgcccacggttaggtacgtacgtactgcttcagataagtaatgataaaagatagatgtcatcttattttgttccaaaaaaagattatccttaataatgtcaatattattgagtaaagatttaatctcgattctctaatctaattctatccaataatagctaaaataaatattatttattttgtttatataaaaaattaaggtaaaaaatgagaagggtgtttttttttatcatttaaataaccaaatagggtgtgtcaaaagtgcagctcaaaaaatattaatcactctaaatttggagccaaatctttggtcccaattttttctctgtcccactttaattaaaatgctccaagttctccaattatatcccttatttttttttttcttttgaaacgatatatccccttattaatgtgaatatatttaaggattattttattttatccttaattcatgtgacattttttttttgttaaataataataaagtcacttgaataaatcaatttttaccccaatatattattgatgctaacgtaagctatactgatacatttaatatttaaaaaatattaaagatacaccaatctaattttctttttaaggagcaataaaaaaataggttactaaagttattaatacaattagttttaagtgaataatataacataatattaaatcagtcttttttttttcttgatagaattatattattattaactaaaatctgattttattaaagtgtctttattattattattattttaaaaaaatggcatgagaagaacatttaataataataataaaaaaagtcggaaaggtaaaataaaatagttcttaaatatattaaataaggagatatacatttaattgttttaattagatgaggacaggcagagaaaaattgagagaagatttggtccttctaaatttggccgcattctccgagacatttatgaagcttggcttgcttttaaaattatgaccacagcttgaacgagacaataatgccattgcacactcttttgttcgattagctttattctctggaaaatccaagtttggtggtgaagattgccctcttgtttatggcctttgattaattatttgttattttattgttattattggctttttgcttgattaatgaagttatattcactttcaaaacagaaaaaaaaaaaaaaattaacaaatatgttattatatattatcttttcggtacaaaaatgatacatattcaaattgcaaatattttattttattgcagaaatattggaaatattttagattgggcatatttaaaaagatattttgtgaagtaagtccttaaaaagcatatggattgttatagtaaagtaggagcttcctaatcactttattaatttttccacacttatctcataagtatgatagacactcttgagtgcggattaatatatagtactatctattcaacaaaaaaaaaaatcaattaatctcagttttttatactaaaatataattgatgtgtcagttcaaatcttgtgcttaaaagttaaagttaaccaatctagttcttttcaaaaaagaaaaaataattctttttc

SEQ ID NO: 17402 - DNA, 4857 bp, Cannabis sativa
ttttttataatataatcatgaatccacttcccttgcctgattgctcctaacctaccagaagcatttaacaagcttaccatagtatactcactaggctttattctctcctgctgcattttgccaaaaagctctaaagcctcaaataatctcccattcctaacatacccactaatcatagtattccaagaaatgggatttcttaatggcatcttattgaacaatcttacagcctcatcaacttctccacatttagaaagacccataatcatagaattccaagaaacaacatctaactcagaactttcatcaaacagtttccatgcttcactcaaaaacccacaaacggcatacatatgtatgatggtgttacgtatatacctatcacttccaagacccaattttgctattctcccatgaagctgggccccaaaataagcctgcccaagtcgagcataggccttaaaaacagaagggtaagtcaatatttgaggatcaaaggatgaagtgagtaacatttcaaggaagagagagactgccatttgaggagttgagctgtgagcgaagcccctgatgattgtgttccaaatgaaatgatttgggtgtcgtatttgcttgaaaaccatgaaagcgtagctcatgtttccggcgggggaagcgcagaaagccaagacgcgactggcggcgattttgtctttgattagtccggttttgatgagtggtgcatgaatgttttggaggtcggacatggtggtgcaacgtttttctagcaaagagaggtatggttggtcggagatgaattgggtaatggaaggggatgatgatgatgatgatgatggagtgaaagagcagcaacatgataatgaagccatttttggaagtggtggtggttcttcgtttttgttgcctctttcttattttatctgaaatgtttgcaatattttttttcaattttttttcatttgttataataaaccatttttgtaaatgatttttgttttctgtattgtgtattttatttagaattatttaaaaatttacataatattatatataactaacaacaaaatttcaaagaaaaaatttgaacttaattaaaaaattataattagtatttccctaaattacttgcggaaggacgaaaactgaggagaaaatgttaattagatgaatttgtcaggatttttttatttttatacttgtaaatattttttttataattttatgaaattttatatagaaattttttattaattataatttttttcacaataaaaaaaatatgtatgtattttattttttttaaaaaataagcatttacaaaaggagtttttttatgtgtatactaaaataaaaaaaaaatatttgaaagttattgttaaaaatatatgaagaaagatctttgttatcgaaaaactattatgtttatttttatttaaacgaaaaagaatttcaaactaacttttatcattacaataaaataattgcatatattttttataaaaaaaaattaaacattgtacttgtaatattattagtataccaattaatttataaaatgatataaaaaatatataaaaattttaataactttgaaaatgagagatacaaatttatttattaacatacaatttcaaaatatacatgtcagttattttataataaatcaaataaattttattattattttttttgaataaatttaatagaaatttaacactgtataatatatatttttgtggtaagaagagagataactttgttaaaacttaaaattaaatgtcacatctaagatgtgaagaaagaagaagaaagttaatttattaaagattacttaaaaatcatgagtttaatttgaaaaggctaagaatctaatctatataaggaaaagaattaaagaaagaagagagagagagtagagtggcatggaattttactagctaccataactgaaagcatgaaagaaaagaaactaccatctaccatagtagtgaccacaccacacaacccctatgaaaatggccaaacaaagcttgtaacaccatgcattgttgttggttggtagtaactctattaattcttctcttcaccagctcaaattagacactttgcaacaagtaacatatataacattattcctttctttctttctttattatgaatatatatatagttgaaatggacacttagaaacaagacattgcaccttttcacatactttttaactaccctttttcaattcttcactaagcaatctccaacaacaaattctcattatacaaattagtagtgttcaattattcccatatgttttaaaaatattacatactataaactttaattttgtccaaacaaaatttgattgcataatgggaaatgacaaaagacattatgatattagtatgtcaaggaggactagaaggccattccaagtgagagatgttaagggaatgatctctccgaatagtggtggtggtggtggcggtgaaggagaagagaatgatcgaaagagcttgaagcaactcatcgacggggatgagaaaaaagtagggcatgagggcgatgaaggcggtagagggaagagttctctcggcgaacacttagtgatggaaggaggagaaagagaaagacaagaagagaataagatgcaattgcaaatagttggagtgcaaaatcagaatgatggtatgaatttgaagaaaatggtgagtcgttatgctaaagttttaggccatttgatcaagaaaaataaggactcttctaagaaaaaaccaactctcatgttaaaattctagattatatgtataaatatatacttgagctttgagttgcatttatagaaggctgtgatatgcagtgtatatatatatataaagaatattgaaatatgtatatgctataatatccaatgatctataataccctttagttgttaagaattgtttgatgaaagatctgagtaagaattgttttttggattttatatgggtggagatgttgatgaagctactttgatatgctatcaattaatctcatttcttggactaattgattattggataagttgatagagttcatagcttttggagagagaatttatcaaaagtgtaaaacatataaagttttcttggttttgatttttaaaaatatgcaataaaaaaaaaaatagttgttcctatttatgtgtgattgatttggaaaaggtgcggtatgatatttatgcatatattttgagtgcacatatcattactcaataaaagaaagaaaaaaaaataagaaattaaacttttataacattgttaagtttaagattttgtgacatttagatgttttactctttataaacaaaaaacaaattgattaataagaaaaattaaaggatgttagtgcacaaattggtgacacactgcactcaccaatgtccaccctcacattttttgctaagaaaatatttaaacaacacaaagagtcatattattgttgggtttaggaaggcttgcttttagtttttttttttgttaataattgaaataaaatgcactaatcatttaaaaacaacattaaagtaaactttgctaatctaatgaagattaatatttactgagaaatgtggaaattaaaatcaacttctttctttcccacatggtgctcactcactctaacaaaagctagaagaaaaaaatactaagtatgaggaaaagcatgctaattttcaaagataaaatatgcaaaagcataatttattaaggaaaaggaagtttgtgttgtaatagctactagctaatagctatagctattaagaaaaaaatcaataaattaccatggtagtagtagcaccaaattatagattattaattaatttatacactaataaatactagtcttaatcaaaatattcccactaaattttaatggaagcaacaatcaagaagggcctttagttttattttgagccaaaagaatcaaagctactaggaatataaaattcacataggtatatttggaatccaattggtcaaaagtgcaggtctaggatttatagtcttggattggaagatcaactttattttgaggactaaatatttattaatttcaccaatacaatatataaattaatcttggtcccctctctccattaccaccattattcatcctctacaagataattaattcttcccctaacttcttcttcatataattcaaaaataatgtcattgtagtaaaacttgctataaagcataatgaaggagggagctcattatggtgttatacttatagtgattaccaaaaattattgttttctattattaattttttaaaaaaggaaaagagaaaggtaatcattcccacatacatacattcatgtcaaagtcaaaaacattttccttacatggaaaaataatggtcatgcaatttgattatttattatggcactaaaacataataaccttccttgcttccacacaaggccttggccaagcaatcaatatcaatccaatctcaaaaagaagaagggttttatttagctttataaaagaaagaaagaaagaaagaaagaaaagaaggaaaaaagggtagggaaggagtcagagaagtgaggcttagattattattagattctttaaacttttggtaacctgggcatgagttgaggggtccaatattcttaagacttcttaagtcattgttccccttaatcttactactcggttcacttgataacctattttattatgtagtgttgctcttcatttcatacatatatatatataggcagccgattttgtgcccatatatgcaaaacacggattggaatccgttgtacggcaggggggccccaccgtacttttaaatgttttt

SEQ ID NO: 17403 - DNA, 3928 bp, Cannabis sativa
  modified_base (117)..(128): a, c, t, g, unknown or other
  modified_base (298)..(298): a, c, t, g, unknown or other
  modified_base (349)..(355): a, c, t, g, unknown or other
tgacttcttatggttatttctcctttcttgattgtgaaatttatccatatttgtgtttaataaaatgtttaagattgatcaccttttacatactctatgatctcaattcaaaatctnnnnnnnnnnnnttgagaatgctaaaattggataaactaggttccgatgtgaaacaaaagtatttgcatagcctttgtgacaattagattattgcgtaatgcttatttcatattagtctaattcaaagatgattagataacatgtaatttagggcctaaaagatctgaaaagagttaggatnatttttataatctatcattcacattaagaaagagagtagtaattagcattnnnnnnngggtaattaaatcaacatgattcttttctctaatttctcgtccttgatttaacaactttttttctttctttaattttcttggttacctttattttaaacttcgtcaaaattatttttatctaccaaatagaatcaaaaatctagtttagtggtattcagtccaattccctgcagttcgacctcacctgtgtgagtttactacttgattatgtgcacttgcatattgttcatatttttcgtaacaagaaccattacctacaagcattttttccttgcctttgtaagatgtcctctgcatcagattggtggcatctggtgtaacatgattagaagccccactatccagataccagccatcatcggggggtcgatgaaaaggctatgttggcctgtggagcagattcgcttcatggtggagcagcatcttcaactcctgtgaaattgacatcaaaacgtttgtagcaatgttgaacagtatgtcctgatctcccacaaagttggcaaatcactctggaattgcttgaactcccacgacctctgtaagaactattgcctctgccccttccacgagtagcattgtgtgaggtattagaggttggaggtcgaccagtttgagagcatccagagcatggatgtttcttggcttgagcaatatttgcttgaggagaattcagatccagcaaggcagtggactgagtaagttcaagtcgcatctcatgattctggagcataaactgaacttcttgaagagtgagtttgtcttgggaagttagattcacgacaacagattcatattgactgcctactcaaccaagaacataaagaatcaatttttcctcagaaatagagttgcgagcagcacgaaggccatcaacatagtttttcatcttcaacatgtactcatcaatcgactgggaacctttcttggtgttctgaagatgagacatgagatgaatcattctggccttggatccaagaacagtcatagtgcacaacatggccaatcataggttcagatattgatgacaataaccaagataaaataaattgatcaaggcgcatctatcgatgaaagtcagggttacgtacaatgtttcaagaaccagttgattcaggtacgtattattctggtcttggatgtcaacatagtataatatcttcaaaatcatgagcacggattgtgggaagcacttgagaccgccaaaaaaaatagttgctttgatcttatcttagtggtggtaagaacatggtggttggaaccacagtaggacttgtgaaattgtttgcagaggtcgccattgtcgattgctcttgataccaagttgattctaaggaatagaatgcaaacagagaaaagcaagagaagagaaagagaatgaatcaaagtgtgattcttcattgacatatttcccatattacaagctatatatagtgtagctataagagtacacaagaattcttaacaacctaacagaaaacgatcctaactaactaaccaacatagacagttagttgttaatcacaatggtcatcaacttcctcaacacttcacaatatatatgagaatactctatcaaaatagaaaaagacataagggaagaagaagtaaaaccgatcaattataataaaaatcgtgtttgggtacatttgttctttactcaaaatcgttatgtaagttggattgatctcattgttgaaagcagcccaatatgttgtggcattagataagtgatgttataggcctgagtgaattctaatatttaccatttcattccaattatagtcttctttttaacatcttataatctaccataagcattatacttcaattttttcgcctatacattgctttatcaactgtcatcaagtaaaaataaaacataaagaatagctagactcataaataataattaattaatttgtgaacataaagaatccacttctatatgattgatgactttattctttggtagattggaagagactctctcttgttaaaatcaattcttagagttattcctttcaacccttgtctttgggaggtgcactggattcctagaaactgtaatggggcagctctcaaaattgctaaatgggctaactccaccaaccaatttgtcgggatgttgcaggtgaaaataagagagcagtgggtgaaattattgagagataggaagtgatatgtttatgagtgtgaatagctatatggataaaatggactaagcattgagagcaggcagccatgagaaacatataaaaaaatataatcatcatgaggtggccaagaagcccccattgacgactacgattgcagaaacacaagtctaaaatttgactttgtcaaattccaaataacaatacccaaatgatcatatttgggtttaaaataatgtatagtatctaaattctcagaggatgagataagaaacaaatgagctgaataaacaaaccaacaaaatcagtacactaaaatcttcaaaataacagaaaaaccgaatatgttagtaaagagggtttgacgtcttcttcaatggtgtatagagggacaatgaggcttctgatttcaagaacaagaagcgtacaccaaacgggcatgccttcaggatggtattctttgatttcagcacattcttgaaggaatgatcgaatggtccaaacgggcagaaccctaaaacaaatgatgtagtgtggaggaagggaaccctaaaagaaaattgaggaaaatatggggaagcaaatatttgatagtagcgaaagatcttttggttctgttaccatgcaataaaaaagggatggtgattccatcaaaaaataaataagagatggtggaaaattaacaagcgaaaggcatgatgataattatatacatacatacatacaaatctaaaatctccaaagtcccacacaataaataaataatccataaaagagtccataaatgtctcatacaaatttagaaaaagtcatcataataaactaaggcatgatgagatattccaaactaattactccaatgacagaaagttaataacacaactgtaaactacgacatcataataaaagaatctgattgacaagaattagtatatgtatctcctaaattcgctagtattataatccaaagaaaccaatctcattattggctctataaccttaaggtcatctgtatatattgagtgggtatgttataccttaagctggctacttggcaacatcttctcccagagaagatgttgaaggaggcagtgcagccacatactttgagaaagtgcataagcagataacataaatacaacaaaaaacaatgaatggaaaggattggctgccatatcttccgagctgcacagacagtaaatgaacgaaatcttcattatgtaatgtatctgaaatcaattatttaaaacaagagaaaagatctttagttaccttgaaggggcagaaatataataagcgataccccctaaaggtacatactcagacttgttcatccattttctcaaaagatctacaacaaagtttctactgtatctcctgtagagtaaataataaaaaaggaggtcaatcaatgaaatc

SEQ ID NO: 17404 - DNA, 5023 bp, Cannabis sativa
caaattaattttgggtggactaagggtattctagtaaattaggctctaataaattattgtgtaacactaaccggagttcagataagagaaaagaaataaaaaagaatatataatgtgtgtgagagcataagcataggatgtctgagaggctccaagtgtgtttggtactaggctactactagctccctgtctgttcaccaattttcaactctttctctttctctctccatagtctcttcccaattattttgcatttctcaaagctaactctttttttttcttaaataaaaaattatatataataatagaaaaaaaacgagtctttggaagattatactatacaaaacccaacgcactcttcagatgcgcctctctctcagtcaatctctctctagctcaaataaaatctgaaagtttatgtctttctctttcttcaacctcatgaactcatgcttttcagaggttttgtagattggtggacaaatccaaaatggattttgggttggtgagcttggagagtttggtgggtcctccttctcatcatgagggcggtggtggtaacggaggaggaggtggtggttgtggtgggggagcttcttctcagtttaatgattcagatactaagtcaataaataatggtgttcttggatctgggtttgttaagcaagaaagatctgggccttgtgatgatgactggaagagctctaaagttgctaaaacagttgatttatcatcttcaaaaacaatgccattacaccaaggaagtccaatgttgagatctaattctcttggcttccatgctgatactcgccaacaagaacatatgcttagcttctcttcaaacaaatcacaagtttcttttctcaataaagatgctgcattagtggaaagaacctctcagaactctgcttttcctttttaccaaagaccccccacttcttactctaggaatacaggtactgtgtgtgtgctttcatttatgtgttttttttctttatatagattttttttttaaggaaagaaatgttggacgggtcttgtcagaattaatatctagattttggtaggaaggggatgtgggggattgagaggattaagctgaggctgaatcacattttataaagattaatgggtttgctgtaattaccatctgggttatctcaatgttgtggtaagagtagttgttaaggagttagcaaaaaagagagtagctgttaaggactagcagatatttcagatcttgagttttgacaagtaaaaaagaaaaaagaaaagctgaacctcttttctcatatgaatctggtgtttagtatttggtaaatttatcacttcaagatagatacaaagttaaaaaaatgtgaaaagggtgtgaaaataaatgggaatggcagagaagagttgttcagtttctgggtgtttcttcactttatttattcccctgcagaaatgattgtagatttttttttctggtttcaggttatggttctggaagcttgaatgcaggcatgcatgcgacttttactgggatcagagcaccatttactccatcccagtggatagagctagagcaccaagccttgatctacaagtacatcacttcaaatgtggctgtaccatccaatttactcatgcccctcaagaaatccctcaatccatatggcttggcgggttcctctgccgtttccttgcctcataattcatgtaagcattgttccaatcttaaatctttaagagattaaaaaaaaaagaagggtaaatccctgccttcttgacatagtactgtacatttaattcgggacagttggtatatgtgatgtccttttttctttctttgaatttttaattttttctcagtatgccttatcttgtgtaaggtatccctttattgctgttataagttccatagcatctgcaataatcttaaagtctctttgtttgtctttccaataataaagcctttcattttcacaactaaaaagcaaatattaaatttgaaatttgtctgatatgatttgtttatggtgttccttttctcttttttcccatttttgaatttcttatgcagtagggtggggatctttccatctgggttttgctgacaataccgaccccgagccggggaggtgtcgccggacagatgggaagaaatggcgttgctccagagatgctgttgccgatcagaagtactgtgaaaggcacattaacaggggccgccatcgttcaagaaagcctgtggaaggccagactggccaagctgcctctgggaccactaactcaaaggtggcgcagatagtgacccccgtgtcgacatctgtgatgcctggtggaggaggcagtgcgtccaacaacctcgccataacacagcaccagttcaagggcttgcagtctggtgctgctgttgctacaaatccttctacagatacccttgtgaacaggtgaaatatttaaggtttctgggttagatctaatttaatctatttttgttttttattaagcacttgtgaacgttacttaagataacaatggtgtcaaaaacggtttgtacctattgtttttactttccttttactttatggtgtactgtagaccccatcatttcgtcttttactttggtgaaagtgactagtcttaacagctggacttgggattcctttctctaagaggctgttatccattttcatgagaagttggatatagtctttgtaggcgtcttaattaatgtcttttggtttgaattatatggcaattattgagactggaaatctaaatttaattcttgttgatcctggtgattgttataagtttcaatgatatgtttctgtttttcaagctttgcaataggcattttctaagttaaaggggaatatgtctcttgcagaatgcaagaccttagaggggcccagtccgtgatgtcttcttcaaatgttaatcagaaatcaaatcaaaccacttttaacgttccaaaacaagtcccagctggaggatcctctcagtcagagtttgggcttgtttctactgattctctccttaatccctctcaagaaaatgcttacataaactccaaaaactatgcctctttccttgatttcagtggccaagaggctcaagatcagcatcatcctcttcgtcatttcattgacgactggcccaaggaccaatccaatcgatctgtcatcacatggccggaagaaatgaagtctgactggacccaactctcgatgtcgatccctgtgacatcttctgagttctcatcatccacaaactcacctaccagacaagaaaaactggctctttcgccactgaggctatctcgtgagttcgaaccaatgcagatgaatcttggggtgaacaatgaccactttagtgaagcaactcataaacaaactaattgggttcctaaatcttggggtagctcaatggggggtcctcttggagaggtcttgaccaacacagctggaagtgttaaggcatgtaaaaacccttcttcccttaatctcttgacagaagggtgggatgggagtcctcaattgggttcttccccaactggtgtactacaaaagtcaactttctgttctctctcaaatagcagctcaggaagcagtcctagagctgacaataaaaggaacattgatggggctagtgtatttgatgacgttcttggttcaacactggctagttcctctgttccatctctgtaatcttgtttgtactaatccaggcaaaagagttttgacttgctctaaagacaactcaacaagcttggacttaacattctgttgttctcattttaattattcccttttatgtttttcttttaatcatttactttcttcatggatttcttaaacaatgacatggctgatcctcatttgaacgggtactagccagtttgactaatgtcatctatgcaaacaatgtattttttttctttcttccattttttttttcagttttatgagcataatgtaatctaagcagtcataatctgtctaattataaaatatctcatctgggttttcttggcttcttctttctgaactgttttatcactattaccactgaatgattttcttgaaagtagattcttaacagaaacttggtaaaaaaaaataaaattacacagtactataagcacgagctatgtaagctacaagaatgatgagattatgcttcaggttattcccccaaacagtaaggacaaagcacaaagcaagtcaatgatatagtagggaaactttaatgatcatgaccctatataggctataatatttatatataaaattggagattgattattgagataagaccactgtgaagggccatcctcacactgcagatccttatcaaaacaccctttcaattggtctacaaaccagaggacatatcagtatggatgatttgatcacattatggtaataatcccttttataaattttgtattttgttttttattacatatatagcattttatattcaattattggtatgtagatacataagaaagtagtgtagtgcaaggatttttgggagttccccggattgagacaggaggcacccttgtggggtggctacccggcaggcaaccgcattgagttaatgggaatgggccagccaaggtgcgtgaccgtgagagtgagactggaccaaccattggacgtgactcgagccacctttactcctctctttttttctttctctgacttgttctgatagagcctttttcttttaaagctccgaccccgccaccccaaataatgttaaatgttgtgctgagtttggggcccactcacaaatcggataaattagagtactattgcttctactactatatctcactctattcatgtgtttggatattttgattttgtactattactactattattactaataatgatgccaacaatatatactatattgattgtatttcagctgtggttttagttgggaaatattccagttatatatataaaaaattacaacgttttaatttataaaggaacttaacttactttctatatct

SEQ ID NO: 17405 - DNA, 4270 bp, Cannabis sativa
taaactttgaaagctgaatgttcaaaggtgcagtttatagagctattctgacattcaaatgcaaataccagatgggatatgcaaggatccagaagcaaggcttgaggcagcagtaatagcactgaagacagaacaagtccagttccacatcccactgttccctaatgctgactgagaacttctcatcccgtcaaagcactcaaaaaattggtccacactgcacaaagaccagaagagttgctcactcttgaaacataagatagaaatatagatacaatataatattagcttagtagcacctaaaacttatttacatgtgttaagctatcagctcctaaaggtggcagactgaaacccttacaataacaacaaaccaattctaaaagaaagaaagacgtgaatcatttagaactgcatcttttctttttcccctttttcttttatttaatggcttggggttggggcccagaatgcagagctttaatagtaatttaataaattttatagctgttaaagtatttgcgaagagttaataatttctatagatattaaagtattcgtgaagggtttcgctaggatgtctccaggctgcaacattgatctaaagataaacaggtgacaacacaaaacaatacccaccttgccccaaaatcaagctcttcctcaataccaacatttttattatgaatggtcgacagaggtacccaatctgatataagatgtggcccagtttgcaaagtgtcatcacacaaatcttgcactgtcaaagaagataatttattggaggaaccaccacaaactggaattgtcttgcttgttaaaattgcaactgaagcagattgaggtgagatactgtaaggagcagaagtatggtgacaagactctgctgccttgtgaagcatacaatcacttctgtccttctccaaattcctaaaagcttcaaccgagtgtaataaccacttaattgtgctgggctgaaactgcaattctatagggtcaaatgaaacatctgagtccaccctgcggatatctaatgacccatttttccaaggaatacttagttttaagttccctgaaaatccacctcctttccctgtcatgattggtgttctgatactctgtgacggcaaacatggaaaggatgattctttatcaccatcatctaattgaagaagctcaagtattgctccttgaaacttcacatagttagtcaaacgactcatcccaaagaaactctcactttctgcttcgcctttactattagcatcatctgaaagatgagttccacattctatacttgaaatccgcagtaccaaagttctatgagaacctaaactatttccatccttctcaagacatggatcaaatgctactatcaacttgtttatctttacattgaaacttgtaaggaacaatttaacaaactttgcaatggccttaacaccttcatgtacatctccaatggtagactttgaagcattgtccatcatgtcctgatcaagctttcccaagtcttgatgaagttgttcatcctgaccggagtgatgagtttcagctacagcaggtgtgtaatactctttaccaggaacaagcacaagctcaagttcatccacctcaacagtgaaaccttcgccactccaaggcatttttaccaataaagatccgattgatccttctttaattattaatgatgctactgcaccaagctgaaaaaacagagacagagagattacaataaatactgatagtgattgagattgtggtgtcaaacaatgaataaaaaggcaaatttgaactagccctcgtgcttaagctttccccaaggtaattcttcaccagttaagctcatgaaaaggaattcaacacagagaaagaaaatcaatacgaatatgaagtataccaaaattcatattatccataatacaaaacaaatgaaaccacgtacactactctacactcaagcatatacccattcggccaattaaacatgtagaacacgaaaaacagatttaacaacacaatactcagcatttaacttcttcccttacttaattctgaaccaaattgcagctaagctaattccaacattctttcactcaaatacacagtataactatacatatagtgtggggtaccttctcattgagataatcgacattaagagcgagatcattaagctgaattgtgccccttgtaagctgaacatcgagttggtcgatatcaatgtcgcccaacaaaaactgacccaatttcttcttcaaaacaaacttgcaaacccttctaacggcccaccgcgagaacatcgcctcggccgacttcgcgatgctccacggaaacatggccgcccgatcgtcgttcaatcaaaatctcaattgcccaaaatgtaaaaacaccaaatttagggttttgggcaatcagaagaagaagaagttatggtgataacagagacgataagtttggaagagaggttgaacaacctccatcaacaacaaagtaacagagaaaattataaacgaatttcaagaaagagagagatgacagaattgggatttgagattcgatgaatcaaatattgaaaatcctttttctcttgcttttctggttttttgggttggcgtgtttgtccctccctccaaactttttttttcttttttatattttgcgaaaaataataattcaattatttaataataataattatgattagtgagaatgtaggcatagttgacttgataaaaaacccaaacataacagtacaaaaaattggatatggcaaagaggaaattaataaaaaaattcattaatttcttcaaaaaaaaaaatattctttttattctaattgttttaactattagtaaattttctatgtataattgtttggataagcttctaattttttaaataatgtttctttattttttattaaattatacaaaaatataaatagttgttggttgttttgtaaaagtgttttgtccattttttctaaattaagtttttaataagagtgatgtttctattgaattaaaatcttatttattaattgatttagtaaattaataaaattctcagtattcaaaaaaatatataaaatcacactaaataagtatttatttaattatcaaaactctatgaagaaatttattaataacaaagataaagataaagaataaaaactaaattttgggattttaataggttaataatatgattaatttatttaaaataacgaaatggttataattagtatagtttagtgaattttattttattttaaaatggatatttgcaaaaaaaaaaaaaaaaatcttatttattttacaaaattatacttaactcctaatagaaaaaaataatggcaaaatctctaatcttacctttttgttgcaacttgtgtaaagatgagtttttttatagccattgagtatgtgtaaagatgtggagatgatgtgtaaattttggaggcaaacaaattcttctagtgccaagggaatctattgggcaagttgagagaggatgagtacatgtacaagtaaaggagtaatgggtttagaaatcttagagattataatcttgctcttttaggtaagtaagggtggcttttattggagagggaagattcatttgttggtcgtttgtttaaagctcgttatttttccaaatgttttgttaattttatttttgatatctttaatttaacaaaaaaatatatatatatattttgaatattaatttcggttgaggtgtttatttggttttaatatttttgtatttattgaattatatatgaaagaaattatgtctagtttttttgtttatggaaaataaggcataaagggtaagtttgatgactcatcctttttctatctatccagatgtgtatatctaatcatttctgaatttcctaaaatgttagatcagatttttttgtgaagaaaaacaaagcaagaaaagtcttacttactgattatgattttgtaggtacaaaaataggaattcctaagttgattgaagatctattttaaggatttatctagtgagatgtgatcctgttcagaccgtgtatgaattgtcaatgaggtgtatattaattataaatatatcttatagcagctagatcatgtatctctttcatacacttcgaattgtattcatatcttaagaaaatagtctttattttgtagagaagagagtatttgtatcttactcagtttatatgtattttgtattatcttgagtctgtattcaagtctacaaaagaagacaaaca

SEQ ID NO: 17406 - DNA, 3767 bp, Cannabis sativa
tggaggcttgaagcggggacgttacaatatcttccaagactagatgtggatgttgaccagatccatcagaggcctcaatgtgttgagtcccataataagtagggaagaatttgcgtatgtgatttgggatttcagtgttggaagagaattttttatagaaagattcctcttttgagccacggttgttactttgaagaggcttgtaaaaacgccctgaattgtctatgagagggccaattattcctttacttgctttgtggccagcaacttgatgatctggtatttgaaacatggtctaatgggcaagaaataacacaacaacaatgtgtcaaaacatgatactcttgaaacaaaatatggtaagaaactaatgtttgtaaccccaaaatttaaaactacataaaaattttactttttgaatgtgaaaatatgattgacataataatatcatagggtgaatattttaggtaagaagtgcatatagttctatttcaaaacataatttataaagtgtagctcatggtatcattacttcaataaaatttcgagtacaattctaaaatgcaataataatttatcaaaagacacaattctacattgactaactctaaaacattacatttaaagcgtttactcttttagataagaccacgatttgatagtaataatagttcggatagaagcattaacaaccaaaaacatatttgtagtaaagagtaatctaagaaaaaatctaaactgatcagcactatatttctaaaattagtgaccaaattaaacccatattggtagagtttagaaataaagagtaaactaacataagatacctgcaacagagagagaattaatgtatagggactttattgaaaacaataggtatatgtatggtactacctttttttgcttttatgatacattaacttattaggaatctagctaattaggtgtcaagtcaatcacaatttaacattaatttaattctttttttttaacaaaattttacaactaatataatcactattcataacaaccaaacaaagtacgttagcattaattatgatgtgttcacatgcccatatatatataggagagtatcctttccatgaagcaagccaaggtttggtatataccacactgtatttagagcattgctatattattagtggtgcttgtaaatgattataataaataatattttatagtatttaaaatttgatactcaattatatatcaatgacacctggcacaagtagtatatatatgagactcattctagcgtgattttgcatgcaaagagttgaattgagccacaccccattacattacttacagttcacatgttcttccattttcacgtgaaggactcttcctatgtttatatttcttttcttttcttttcttaatgtatgtactaaaattaaaataaaaataattaattatgttgaagaaaataagtgctctctccttatattgtattttgtttatgtattattctgcccctatttaaataaaattcaaggtccacagccagttggtacagagttatttaactactcacccaaaagtcaagtcaagatttatgagtaagataaatattgatattagtggcggcaaaattaggatataataagtattggtgttagttagttgtcatgttacaactcatctagctataccatctacattcacttgtatatatcgtccactagataaatcagattattctatactactattgctttgtttctattcaaggtttctctgttaattaacaatcttagagcttgtttgatacgtagtattgtattgtattagtattatttaatataatattatttttggtatatattatgtaaagttataatctattttcaatacactcgactcaaacaccgattactagagctgcacacgggataggtttttggatggttgggttcgaattttttgatttcgggtgtttaaaatgtgtaacccaacccaattttcgggtggtcgggtctggcggatttcgggttaaatttgtgcaggtatgttgtggtcgagttcgggttttattggacttagtccgaatgaaattttatttttaaaaatgccactagattttaggctatcattattcataaaattaattatttatatcttgttctctataatattaaaacgtgattgattaatatatatatcaatgtactattacagtatatatattgtttgagcaataagataaatgggtaatgtttctaggcatatgagagaaaataatacaaataaaggtgatccataccatggaaagactaaagtggtagaagtgggcacaggacaagcagtgggcggctgggggcacgggcagagctttcttggaggaggaggaggaggagtcggtgcctgggaggatttggatgttagggagagcctcgccgtcaccggactgagccaactaccggagaagaagaaggagatgagaatctgagatgacggactggcaaggagatgagatgaagcttaaagaggaggtgggttaaaccgttaaagttttgaagtaaaagtaaaaaacagtattatattattcacttttagagttgttagtattattatattatatttaatagataataacttaatatttttttaaatgtaataaaaaataataaaaaaaaaactatttttacttattcgagtttcggatcacaacctgacaattatggtgtgttttttctaaaactcgatctcgatacctgtgtggcccattttcgggttggacctgacccgatcctacgggtttttaatttttcagctttttttagcagctggtcggggtgagtgggtgggtttttgggttttcgggtctaaatgttcagccctaccgattacggtctgggtcccgggtccgggtctgagtccaactccgattctcaggtccgagtctagctctaggtcttgggtccaagtttgggttctaggatcgagtcatgggtggtccgagtcacgagtttgggtccagatctgggtctgaggtcagggattagttttgggtcccaggtcctggtcccgatctcgaatttaggttcgggtccatgtttcggtctatgttcaggttttgagtccgggtctgggtccgggtcctgagttcgagtttgggtcctgatcctaggtccaggtctaggactgagtccaggttcgggtccggcaaccgagttcgggttcatgtttgagttcgtgtttgggtccgggtccaagaccgggaccaagtacgagtccgagtctagctttgggtcccgaatctcggctatgggcctgggttcgagtccagatttgggtttggagtctgggtctgggttcaagtttggggtctgggttacgggtacgggtctagggttcgggtttgggtttgggtcctagtccaagtttggaatcgggcatgggttcgggtctaggtcccaggtccgggtctaagtttgggtcctgggtctgggtccaggtctaggtccagctctgggtctcaggtccaggtctcgggttcaggaatgggtcccgaactcgagtcggagattagggttgaccttgaatcctttgtaaatattataatacaagctaatacagatcctgaagtccttcacactacttcgatcaactccaaccacactgtaaaagcagagccgacccatcacaaatttaatgtaatgaaaaaaatgggctatataattaacaaataaaccttaaaacctcttttcttcacaatgaagtccttgcttagtgaaaattca

SEQ ID NO: 17407 - DNA, 3810 bp, Cannabis sativa
gacattggagtataatcattttatataatatacataaatataaatttatatgtaagggatgcctcaaatatatatgctaggcttttcaacaatggttgaagatgcttatcttccatgtaaacttggaattccatgtgtctgcttgctagctgatgcttttatcttcttcattttcaactctttaacctattcagaagctcattcttaaggaatcaaactaaaaaaagaaaagatagtcaattattcagtgtattctctcttgcttcaacaacactatctacatcccccaagaaccatggtatccaccacattggcagtcggtgcatcttaaaattccttctgcataatatcaccacttcttaaaccacacaacagtacttgcagatattatatagaacatatatatatatatataaagggagagagagagagagagagaaagaagagtcaaattgaaagctcagctgtctgagaagcttccactcagtttcatatatcagaatttgaagttctaaggaaacactcaatccggttccctcaaaattttcaaaaactacttgatctaaagttttggacgacatattcacatgaaaccaagaaaagaaaaagcaaaatcagacctatactagtaaaactgaagaaaatatggcaaactaaagccactaacaatagttttatctttgttcaactggtataatcatcatccatgtgggtagtgttgtgtggattgcatctgaaaagccatactttgaggtccaaagtaagagtcatgaacagcagctctgtgaagattatgtccctggactttaagtccataagtgttaaccccataaggattggacataaaaatatttccatttgtcatatgaaaccccatgtttactccaccattacttggttgattccactgaaatggagtcctggacatggcagcagaattaggctgctgggagaccatgttagagtggtcgggggagggcggtcgcctcttctcgtccggtgagggagttcttgtgtcattgagattgactgttgttatgtcatggatgctagctcttcgtttatccttccctcctgataactgcctaatgaagtacttctgagcatgactcgccacttgggttggtgtccgagtaacaacaaaatttctagatatgttcctccaatcacctttcccatatttcttaagccccataagaaacaacctattgatcacgagcaacattaaataactaaaaaagattatgtgtcacctcaattgcttaaaaattatgcaactaaagcacagaacatggtgttaaattcaagagaaacaacttacttatgctcttcttcagtccatggaacccctttcttcctttcctgatcggcaggcctagttgatgaagatctcttcccaccaaaaccataggattgtttgaacccatcataggcacgaccattgttaacccaatccaaagtgaatgttgagcttgtatagccaggaattgggataagccctgcttcaatattgctaacatcaaactctaactctttatacttcttgataacatcttcaactgactttccggggatcatggccgccacattgtgccacctctcgggagtctccttatcgaacacggccagagcattttcgaaagctttgttctcagccgcagtccagttggtgcttttgccatcttgaagaagccaattcgagttggaaatataagaagcaggggaagagagaatttccattattactatttgttttatccttcccttgttttggattggtttcccacttcaaaacatcaagttattggattttcacacctttcaattcttcaaagaaacttgggcaatcaaggattatgagcaatgaaaagaaagagggaaaggagagaggaacctttggtgggaaatggaggaggaggtagagatttcactgcaataatatcagtgttaaatcaagaaagcatttttttttttggaaaggaatcagaatacactttcttttttttaatgtataggcatagcctgaggaatctataaaagacccaactttccaaaattcaaaagaaatgtgcccaaataaaattcaaaagtaaaaataaaactcaataatttaaagctagtagctccaagatggaacccaaggagtagtaccacagttatagatctattatcatctatagcaggagaataaagtcaaaaacagagaggaatataacaaaaacccagaaacgatttcaaccttatttattcagaaacctctcctctgaggctaaaagcttccaatgtccaaattaggaaagtggcagaaactaatggaagataaggaaaataccggtaattgaataaaaaccgagtacacaatttatatatatgtaaaaagaaaagaataataattgaaaaaaaaaaaaagctctgaaatccaagggattgaaaaccaaaataaaaaggaaaaaaaaacaaaaaaaagctgggacagatctgttctttcttgctttacctttgaggcagagcagcaaagtgaaaataaaaagaagaaacgtgaaagaaaaagagtgtattgcgagctaagaatgaagcgaatacactactcgaaaaagcaaactagtagtcttcaaggaatgaatctaaatactaataagagaaaagaaaaaaaaaatctattttgagagagagagatgatattgaagaaagagagagaaggcaaagcagagctgaaggtggcggtcgatgattggtggatacggtgctatggatacaacttacgaaaaaaggttccctcttattataaattagaattggcacacttctttctgtttcgtttcaattattattttttatataatttttaataaatttttgtcaatggaaattaatttttaaataaataaataaaaactgaggaaaattccaaaaatatgtcggggaggaataggggttgagggcagcttatgatgaatgatggaaactcacctgtcctctactgatataattggtcacagaatcactcaaaaaagtaattcaagccgtctgatggggttatagttttccctttatttttttacagtttgactggattttgatctttcatcaaagattgcaggggcattgtcgtcattacaaagatcagagtgaaagtgaggtagccgccaaaagcaacggtcccgatcagcggtgaattccgcttgcaagttgcaacttgactgtgtgggccccaccttacagtcaggcttctcctcattgggggcgctccccacataattgtaaagggttacaatctcaaggagctgtgtacatcaggaaggatctgattcctacacgtgtctagttttaattggaggaaaatacatgcatagtgtacagtccggagtggagcccactgtactgactttccaattagctgtatccacgtaagttggtagaagctcaaatcatggggccgagtgtaagccatcagcgaacacataattgtagccctctttgcctttgtaaaccttttaagctccgccaaccaaccaccgcctctcacatcgttttttttttagtggaattgagtggcaatgtgtgacactattcactctcttcgtatcgagcgtgatacaacccaaaatcaaatttatagtttttttttttgttttttaactaaatcaaatttattgttgatattattgaatatgtattaaaatagtttgcctagtttttttaatgttacatagtggtattatccttttgggcaagtttaataatgaattttaaatggggaattacccttatgctatttttgtaatttttttttaatttacagtttggatt

SEQ ID NO: 17408 - DNA, 5858 bp, Cannabis sativa
cagaaactgcaccgcaccgcatcattttttgcagtgcggttttgcggttttttagtatcgcggtgcgggtgcggtttgaaaaattaaaaaactttgtgcggattggtttgaaaaaatagttaaaaaccgcaccacccgcaccgcgattaccctaatccaaggattttgacccatgacccgatttgtgtgtctccatcaatgtctagttcttacacactgtcggtctattttacagatcccaatattttttttttttttgcaatgaataaattcaatcccaatattatttttttggttgttcgagagaaaagaaaaatcaaaagaagaaaggtcaaaggtcaaacatctaaggcaggctggttccttcttggttaaatgccctctgtttaggagcttaaacccagaaccagaagaagaagaagtgtgagtcaggaggaaaaatgtgtgggatttttgcctacttgaattacaacgtcaatagagagagaagctatattcttcaagtgctatttaatggccttcgtcgattggagtatagaggctatgattccgccgggatctctattgatgattccttttcttccgatccaaacattcctccatcgtcctcttcttcccattttcatcatccgctcgtctttcgtcaggaaggaaacatcgagtctctcgtcaaatcagtttatcatggtcagtttttttttttcttttttggagatctatgggttgtttgtttcccgggaaaatgatgggaataaaatagtcattaaggttggagtactcttggtttacttacgggtcgacccgggagattaacgggttgatcttcccgctttgtctgagcaaattgcatgccttttctttttatccgtcattttcttttcttctgtgtttgatttaatttggcaattaaagttgagcaatttcgaattaaaagagaaataaaaatggaatccaatattcaattattcttgcggtggagtattgaccccgtggacttaacacaagtattgtacattctccaatggtggttggttactttgtattgtattgtacgttctttttttattctgcaaccaaaacgaagtcttcttttttgagttattgattgttttccattttttttttatttttttaacaatggggttcacatgcttgcccctctttgaaaaatcgctttaaatggtagaaacagaccaattttttatgatttccactcctttctttcatcatcaactatagtacaattgtgcatcttcagatgttgggagtttatcttaatatcttgtcttcggttcagagttctaacaaatttctaactgtttaactttggatggctttgtttcaactttttttatttatctgctggttaatttaaagggatatggacagtaatgattcaaagctggaatattatgttgcactccaagctttaatattgtcaaattttgtttttcttttcttactgtgtgtatcactgtctcgcgcctcttatggcattctggttacagcatgatacttaccagagtagttgcacattgtaatgctgaattttgcagaggttgctgaaacggaacttaatttggaggaatctttttctgtccatgctggaatagcacatacccgttgggccactcatggagagccagctccaaggaatagccatccccagtcatcggatcctggaaatgaattcttggttgttcataatggagtcattactaattatgaggtttgcttagaacttcagcagaatggtttctctcccccactttttctgtttttgttttgagcttggcttttgagtgaaaagaattttttttaaatgtgatcaaattatgtgagtattttattattaaaggtaaattttgaccaaattttttgagggtttagaatgttatctatattgttataccaaattagttctccattggctctttccgagatctttctctgattccgcatgttttcaggtcttaaagcaaacactagttcgacatgggttcacatttgaatctgagacagacacggaagtcattccaaaacttgccaaatatgtctttgaccaagcaaataaagaaggtacttcttttggtttaagcatcttttttgcaagtgtaaatgaaaatgtgaaagtaaaatatgcccgaccagaagagggagaaatatgaatattttctgctttggcacttgcatggcctgtactttcacaatggaatactttttgaattgttaacttattactttacgtagtcttcgaattcagcagttagatttgacctttgattaatttatcatactcgtactgtgttttctctaaccttagagtgtcaattgtttttgtcacaggtgatcagactgtcacatttagtcaagttgtgcttgaagttatgaggcaccttgaaggtgcctatgcacttattttcaaaagcaagcattatcctaatgagttgattgcttgcaaacggggcagtccgctgcttcttggtgttaaagtgagttgcatgtaaatatatgcattgtttatacaatttatctttttttttttttgaatttttttttacattgctttaaatgttctgtagcttcttgaactcatcattgtttgagttctagtttagtcagtgctgatccttctatattctttttaattcatgtccaattttcataatatgcacatattttcttgcattaacatgtgtcactggtttaagggagctctgtctcttccatgcacaaattacaaaaatatatgaaaaagctgaatattaatttcttttgtatggctagaaagccagtggtgccgttaattattagcatctgagtttgatctaatttatgcatgttatatatttatgtttgtttgaaaaggcgaaaacccatcttagatgcatgagctgagtttttgacgatacagcttagatgtgcttctgcaggtttaattgactttctgatgtcatgtcaggaactgtccgaagatctaaatcatggatctgcgtttcatgatgataatttcctctcaaagaatgggcatcctaaagaactcttcttatccagtgatgctaatgccgtcgttgagcacacaaaaaaagttctggtgattgaggatggtgaagtagtacatcttaaggtattttgaacctccaggggctcttgtctttctcctagaacttgtaaaataaataaaataataagaatagtaattttttttttgtcaggaaaataataagaataattgattattcattttttgtacaatacttggggacaatctagactgattctgtggatcctgggagaatttatttctttgcttttcttgcttgagatatgagttcatataatttctttgcttacatgtatgatatgatgccttatatttttaggatggaggtgtgttgatcctaaagtttgatagagaaaaaggcgatcatgggggtgccctttcaagagttgcgtccattcaacgcgcattgtccatacttgagatggaggtagaacaaataaacaaaggcaaatatgaacattatatgcagaaagagattcatgaacagccagcttctctaactaccacaatgagggggcggctcatccgaggaggttcctgcaaagccaagactgttctcctaggaggactgaaggatcatctgaaaacaatcaggcgcagcagaaggattgtgtttattgggtgtgggacaagctataatgctgctttagcagcaagacccatcctagaagaactttctggtgggtacacctttcattttggtgaatgatttttctttttccagaaaacgcatctcattctctcttgtttatatcatttgaaccacgtaggtatccctgttaccatggaaattgctagtgatctattggatcgacagggaccgatatacagagaagatacagctgtctttgttagtcaatctggtgaaacagcagatacattgcaagcattagaatatgctttggaaaatggtgcattatgtgttggtataacaaacactgttggtagtataatagccagaaacacgcactgtggtgtgcatataaatgcaggttgcgagattggtgtcgccagtaccaaggtaaacaattgtagtaattgtctttattttgtcattcagacacttggttaaccattacttgtctcattattaggcatacacaagtcaaatagtcgtgatggccatggtagcactagcaataggtggtgacacaatgtctaatcaagcaagaagagaggctataatagatggtctatttgacttgccaagtaagtatccagttgatttttatgttttcttcatcaacaaaataatgtaaaaatcacatttttgaactggtttacaactgttcctttttatgttatatttttgcagacaaagtcagggaggtcctgaagctcgatgaagagatgaaagatcttgcaaaacaactaattgccgagcagtcacttcttgttttcgggagaggatacaattatgcaacagcccttgaaggtgctctgaaagtaaaggaagtggcacttatgcatagtgaaggaatacttgctggtgaaatgaaacatggtccattggctttagttgatgaaaatcttcccattgttgtcatagctaatcgcgatgcttgtttcaggttggttcccttattgacattgtattggagtagagtagttacattacaccatcatggtctgaagtaagttgtctactatgttactaacaattttcatctctgacagcaagcaacagtctgtcatccagcagcttcatgctcgcaaaggccgattgatagtgatgtgctcaaaaggggacgccaaatctgtgtgctccagtggttcttgtggagtgattgaagttccacaagttgaggattgtcttcaaccagtagttaatatatttccactacaggtaatattgacaccacaatctgatacatattctataatattatatgtgcttgtgttgctgtatggtgtcttgatgagaattgttgaaaatattccatgccttatacttagtaatgaatttgttcttctttgctgcagttgttggcctatcatctcactgttttacgaggtttcaacgtcgatcagcctcgaaatcttgcaaagagtgtgacaacacaatagagaaatttagctgttgcactagacataaaacacctcgtgaatgaatacacacctcaccttgagatttagtgtgttataacagtattgtacagcattattgattctttacccttttgatttgagccattgtaaatgattaggcacacatcactactaactagtcctttaatttcctcttatttagagtgaagttgtgatattgagtttgtgtttttttgtttgttaacctttgttttgattcttattttgattaagtcaatatagatatggctgtagaaaaatacaagagtttgtgtttgttaaaggatgggcatattgtggcaaaaataatcaatatttaaagaatgtaacacttaaatatccaatctttatttttctcgcaaaaaaacaaatagtataaaaatattaatccttcagtacccaaatagttttgaataaattaataaaattctattttaatttattaaaatcgttaaattatatgaaaatatgtactattgcataaattaatcttaaagttacataatagttttatttaataaaaatattaagtgaatattttttttattgtatgattttttattaataactacttttgtctttatatagttttgtaggtgttcatttgggaaatttgaatttccatacttacaaaaccccattatttttttcctaaatacatacttactaaaattggtaatatatgccaattttactaattttccaa

SEQ ID NO: 17409 - DNA, 4504 bp, Cannabis sativa
aaaaacaaaaaaaaaaaagacaaagaaaacaaattaattaaatgtaatttagtagtggttagccagtacaaagaatatgattttaaataagaaattcaccaattttaaaccattaattaccaacccacctaattaagataaatttgtgctattttcagaataccattaattgcattaatgataatgaaattcagaaatgtgtacttctaatattaataatggtccattgaactctagcaattctactccaaagattccaatccaatacagcactctactatagtactatacctaatattcattggacatcttgtataatttttttcaaccaacaaccacaagtcactaaaccagcaatcacagttggaattacaagcaagcaaacttgaaatctgaccccataccagaaagaaagggatcaaataatatagaagattgttttgaaaaaaatccaatctaacatgttatcaaaactcaacatgggctccctagttttagaaaataatcactatccacagccttggaaagaagaataataatgacctttaaaaattatagaccgacaaattgtctaactaaatctttgtactagtgatcaaataagttgcactataatatgatgatgacatttgttatcattattttattttattttagttttagatacaaattaatttgctagccttaagtggtctcacaaagagcagacaagagcccagagctgggataccatttacctttatttatatgtatatgtaatatgtatattatggatagtaaacgacaaagtgaagatactatttagtggggattcagaatattgttccaagggaagaaaaaaatccatcagaaaaggatacaaatagcctggtatttaaaagcccttttatcatattgttccattatgatcaccaactaatactaaacctttcatgaccattatcagaatatatagtcaacaaacaggggccttatttacagagaatcaaattgtgtagtccactctcgaggcacatctcatcatattctgccactcattccagctttattgaggttaaaagagaaaagattgtttgataccaagcatgaaagataagttgatcacaatcaaattatacagaattgaaagatctatttgctataattttattgaacaaaaacccaaatgggcaaaatctaaacaacaccatcagtcctcacagtaagattatatggtacaatctaaaataaatcactagctaagaacatagcatatctcaaacaacacttcacaatttggagtcaaaaggctactatatttgttaaagcaactgattaacatgtcatacacaatttctcgatgtatttgtgttagaagaactcaaaaggaaaaaaagatgtatacagttatctttacacaggattaagaagaaggggggaaaactgccatatagaaaaaacaaaaaacaattcacaaaccagaaatcataaattctatttctatatttaccatatatcacagaaagtgagctatagtaggttctttcaagttgggggcatacgtaaagacatttccactcttcacttcaaagagcttatatctcactcaccattgcatttcaatcctgctaagtaaacctgagattgaatgactgttcgtccgattttaaaacccggaacaactgtgaagcctacctttgccttcgattttggcaacaataatcgcttggtgacatcttccatgtataccatcgaaaaatctacacctctttccacttgaaatatctcaactacaggatcaaacgaaaaggccaacttgtgtaacgtccatattgagcttgccatgtttacataggcctcatagaacacactcaatgatctccatgagtttaacactacctcttttctatccatatcactgaatatcgaagactccatggtggggtggataatctcttgatacttgttctcacaaaatctagaaaattcgcaatttcggtccctactcagcaattccattggattgcttgatacatgttcgagtaattgcttcagtgaagaaccttttttatctaaatcagaatcattcccaatatggccattagaataatctccattgttctcagacaagccaaagcatttggagttaaaattcctgaacattcccatacaaacataggaaaaatatgcataacgattatgagttttcttagcataatcaatattgggatgaaccaaatttgctgccaaatccaaatcccacccagctcccctcatcaactcaatcaaaatcttagtaaatttatgagttaaactacaagcatcatgtaagacagaatcaaaaactttcagagataacaaaacctcacgagacgaattcaaattacccgataatctctttgataacatggaattagaattgtgaatctcatctaactttttccttagcgccataacttcgttgtctttttgatccatctcttcttgtaaccggtctgaaacggttccgagtacccgaagcttgctctggttctcctcaacctgggcttccaagcaagacccaatgggcaaatcagtctggaactcaggacatctacagaaatcgacatagaaacgtttgaattcagagagcctctgaagatgagagacgagagctcgatcagcagctttgatattctcttcaacaaaggggacatgggcggtctgtaattgaaggtaagatgcctcgaaagaagaaaccgtagcgaaaatcgacgaaatcaaggtttgagtcaattgggtattgatgggtctgatctgagtctggctcaaagacctcgttcttgcgaattcgccatgcttcttcaactgggtctcgtccgaaacagacttagtgagcttcagttgcgacggagtgaagtcgaaagccgagtcgggtttaataacgacaactttctggtcagtaattacctcttcggcagagtcgaggagtgagaagccatcagcatcttcccctgcttcttcgtcggcgaagaattcgaaggtcttggctttgaaagcgagagcgaatttctgaaacatttcagagatttgtggcggtcttgacgaaccatctatttcggccatttcttttcttttcttttttttttccttttatatactttttttttcactctgcgaaaagaaaattacaaaacaaaatgcagagaaggaataataacaagaagaagaagagaattcgtgggcttcttcttcttcttcttcgtcttcagctaaggaagtgccttggatgtcttggaaggaaggtattggtgttcttcttcgctgcaattttcctttttctttttttaattttaattttgattttaattcttaattcttattctatttgattcaactcagctctcctagttatgctgactttttttatttattatttttttaatattagcaacggtaataaggaaaatactagaatgacatggtgaggagtcaatttgtatgaccgacttagtggtaggtatacagtgtatgcactgagtctgatacacacctgaaactgattaccactgatgacatccactctcaattccattggcaaatcttctccaatgaaaaaatgtaaaaaaatatacaatattaagcacaaattaaaagtttgtgatatatttactctaatattagggaaagattcaatttaaggtgtcttaagcgctataagataagataatactgttattattatattttaatattaaatatcacacattttaatttattaattaatatgagaaagtgttaaataactataaaatgacacatcgatgtagtgtttgttgggtacactaagcgcatctcttagaagacagtattaatagttgctaaaatacacacatcaacttaaaaaaaaaaatcattttctatttcatccacataagatttgtcacatttttttttaaaaaaaaataactttaaaaattgtccacttagtcaaatatcacattaaattaaagacattttttagaacaaaattaaaaactttctaagtaaaaatttaaaaaaaaaaatgccatggggtcattgtatgtattaagccacacttcactgaaaattgatcttggaagaccacattgtatatatggcaagacaacttcaataggcatccccaattaaaaatgctctaaatgccaaataataatgctgtaatttttaatattttgctccaatacacaattgtaaaacttaatacaaaatttaatattttaattgaaagtacaaaaaaattaataattttatcattaattttgttatttttattatgtaaaacaataaaaataagaatataaataattcataattaatgctatagctaaaaaattctaaggtcaacttcaatagtaaaaactaaatttagtgtttaacaaacactaagaaagtactttttcacccctcacttccacatatgtcaaataggtttatgttgcgatatttttgcacacgcaagtgtacgtatcgtttaaagtagtagactcactaggagtgaggt

SEQ ID NO: 17410 - DNA, 5053 bp, Cannabis sativa
tataaatatatggctaaaattatacacatgattgtgtgtgcacaacactatttgtaaaactcaattaatttgatttatatatttatatatatatatataatatatccataagtaaatagatttattgctattaatttttttcttttgaaagaatatttctatatagttacagttgtgttaagtgcattgtttgatggttgatttgggatcggatttgaagaatgattttaagaaaaagaagagcaaaagtcgaccttgctaatttctctaatggccgatgttggaacagcactgaaaatcaaaatatgtgctcataagcaattacaagtggaatcctttgtacaaaaaaaaaataataaaaataattaaaataaaataaaaattctattcctacttggtgccaaaggcattttggtatcctataaaagatataaaattaaaaagtgatgtcaccttgatcccttttaagttttagaccttttatccttgttttgataactactatatgaagcaaaatggaatcttctcatattgaaagggccttattctactttaaaaattcaaacattttgttgtaccaaacacacacacacaaaaaaaagaaaagttatttcaaaaagaaaaaaatatgttaattttcttaataatatttaaaatttctttgttcattgctgtgtgacatggagtttgttgagtacaagctcaaaacatttgaaaaaaaaaatagattaattaaaatatgggataccctacttttgtatttagagctttaatctaaatataataataaaaacttttttcagcatgataaaaatcttttcaatcaaaagaaacaaataatataaattatagttttagttttactacaataatacaattttttttttagaataataatacaactaactttttttttttttgaacataatagaaaagaaaaaacaaatttgattgatcttcaggtggctttagtgagatatgatttgaaaacttgactttatttgaggtgattataccttatagttgagaaatggatgagaatcagaacaatggcatctgtatatatatcatagacacacagatatatgtatatatatatatatatttatatatatatatcataacagaggagaaggcacctttgttcatgtgattcatttaggaatagtttgtctgatgggattgttcattgagtaatattatctcatcttggcaaggtggtttgattgacagattgtgctcatcaatgggtgaaatacataaaaattctactcacacatgtccactaattatctaaataggtaaagatatatatgaattaactgaaaaaagaaagaaagaagatatatattagggattaaagaaggctttgtcaaataacaaaacatggaatgactggaaaaatagttgagatttaagcctctttcaaatcttgcctacttgttctattggcatatcccatatgttggttagattcaaagattgacaataagagatgctattacagaattctcattaaagagaattcagcagaatatatggttgtcacttcagtgaagtcatataattataatcatgtgttctaactaatcaataacttactctaaatcttatattaaaataatttactttacttttaattattgtataccttaatattataaaataaaatgcttttgtaatcttaataattaagaagttagtaaacattcttaattagacactttataatgtatcactttctctgctaaacatgtccataaaaacttgatagatataactatgtttgagaagaccacaccaagctaaccaccaagttaagaatatgttatgtgtgtaggagagagatattgacatgttatgatatgcgtaataataaaaataaaaataaaaaaattgctaagatcataacacacttatacaagttgcaaaagatgatggaaattgtggaatcccactgaggtggctatggaatccacataaacaaaaattatttagaatttatgccagctcaactttgtaggaactaaccctcttcatttttttcacttctctacctaaacatgagtcatgaatgtaccttaaggcatgaaataattccctatataaatgagtgagagctcattttgtttattggccttttatagcagaacaaatagaaagtaagagagtttaagtaagtagagaataatgtcaacaaaatcatttgttgaaatgctcaaatcagcaaaaccatttattggtatcattgtactccaattcggctttgcagggatgtccataattttcaagtacgctttaaaccaaggcataagcccacatgtgttggtagcataccggcatgctgttgctactattgttgttgctccttttgcccttgtgttggagaggtttctattatttctcatcttagtaattttcactaagttggagtttttacatttcacaggttgacacttgacactcttaatgtttttacaggaaaacaaggccaaaaatgaccaaatctgtcttcaccaagatcatgttacttggcttactagagttattatccttaaaactttaaccatactcttactaatttcttttatatggattatcaactaatctaagtctattctttcaattaggcctgtgatagaccagaacctttgctacactggattgaagttcacaacggctactgtttcagccgccatgagcaatgttcttcctgcatttgtgttcttattggcttggattgtcaggtaacattatacatcatcatactagcatacacataaccatgcccgtttaaggttgtaattttaatcaattaatctttgaacattttaaccattcataggcttgagaaggtcaatcttggtaaaattcatagccaagcaaaggtattgggaaccatagtgactgttggaggagctatgtttatgactatgtacaatggaccaatgttgaatcttccatggacaaaaccaactattcatcatgattctacacaagctactaacaatgaagcctcggttaaaggcgctgtaatgatcgcatcaggttgtgtaacctggtcagtcttcattatccttcaagtaagagagaatttcaccctcaactacctgtccatacttcacttctacactttttttttttgttagatactaaaccatttgatttttgtaggcaatgacattggcatcataccctgctgagctctccctaacagtttttatatgcttggccggtgcaatcgagagcactgtcgtcgcactagcattagaatggggcaacccttcagcctggtccttaggctcgcgtcccttgttattagcttctctttacagtgttagaattctttcttcatctaaatatgtttatcagctaaaaaaaaaaccagacaaatgtactaatgagtaaaagaaaaaatgtttcaaatttcaatgcagggtgtaatttgttcagggttcacatactatattcagggaatagtcatgaaggttaaagggccagtttttgtgacagcttttaatcctctaagcatggttatagttgcaataatgagctccttcatattgtcagagataatgtacttgggcaggtaatgcatacactagatttcccttcagttattatctcaatttgaaaaaatatgacaataactttacaagtattaattcagactttatgtatgtattatttattgttttgtagagttattggagcacttatcattgtcctaggcttatacatggttctttggggtaaaagtgaagacaagcccccagctgatcaatttattcttagtagcaaagatttattaccagaaactcaacacattgatcctgttatggatgggaattgtaaagagcttgtttcgattgatacagttcgaggaaaaagtggagaagaagctgtttaacataacattatatatatccaagtgattgtcaattttgatttcctagccaaaatcttgtattaagtttacttaaaagcttcagagttatcaaatttcaataagtactaagtaattaattagtgtttcatccttaactgttattaccacttccatgttttgtttgaaacttttacaaactcaagcatgaataacaaactaaatatttagtatgcattcactaattattatttaaatatttttttttgttactttatttgggaaagtaaaaatattttctttttgttaattaaaatttaacccacttcggaccccagccccaattcaaaggccaactttcagccttaccgaccccaactccagcctcggctcccggcctgaacccggaccacaaccccgagtccccgacccaaggggactcaggcgacaataccaaacagtaacaattaaattgaaacaaaaactaaagaaaatgaaaacaaatgaattaagtaacaaaaagaatgtaggtgagaatattaaacgaaacaccacaccaaagtacattaccaaatgacaacatactacatttactaatctctgtcccctgaatgatcataatcaaagccaaatcaacatgtacttcctaaatgtttgcgaccatgagcaatagctccaatgcaacatcaataaaaactaaaaaggaaatgtcaaaccatctaacacatcatcactccttaaacatgtaaaatatcatcaaaccatataacacaccataactctcatacccttgtactatctttttacttttacatgctttaattcttgaatctaatatttgaatcaattagggaacaaaacactaaaaccactttcaatcctctaattcatttcgcatagagcaaaatattagaattctttatcttaaagagtttttttgccgctgctgagcctctcaaactatcatttcacttccacttaatcatataaacttaaattttagtcgtaaaaccttttaaattattaaactattagtaaatttaagatgtcatataattttcacagttaagttaagtgtaacatagattgtttatattgatacacctactaatattattatttaataattataaaaaattattttaaaatttatatataatatatatt

SEQ ID NO: 17411 - DNA, 6274 bp, Cannabis sativa
atttcgaagtggcagtaacttctcatgaattcattttagaaaaatgaattctagatttgatgctttgtttaatattccaattgtactttttctttgagaaaaaaaatattagtggaactttaaatggtatgcttattgatatacataactttattcataagctgtgtatatatatgatgtatctcattagttttggtttgctgcagataagacttcacgtaattgccatgcatgaattatgcgagtactcaaagggagaaggcttctctgagggttttgatgcacacctcaacatcgaacagatgaataaaacatcagttgaattgtttcaaatgtatgatgatcacagaaagaaaggaatatctattcccacagaaaaagaatttcgaggttattatgcacttctcaagctagacaagcaccctgggtacatagtaagtcatctgcagcggatgctcaattgtaaaggtttcgttttcgttttgtttatgtaaataagtaattcctactaggttgaaccagcagagctctcacttgatcttgcaaagatgactccggagattagacaaacaaaagaggtgctgtttgcacgtgatgtggcaaggttgttcctcctcattgaatgtatctttgattctatcttcttcgtaaattcagtattctaatgattgatttttctctttatttttttattttgccagggcctgtagaacaggaaattttattgccttttttcggttggccaggaaagctagttaccttcaagcatgcctaatgcacgctcactttgcaaaggtataggttactttttcatttggtattgatcgccgttcattttataggaccatggccaggatttttaggtgtgttgcataataaataatgtttgtaatcaattaatgctcataatttttatgttgcaacctatctatgagaatatgcaaccattcatatgcagttatgacagtacagtgtactaaagaatcttgtttttattattttggtcagttaagggcacaagcacttgcttctctacatgctggtctccagaataatcaaggtttacctgtaatgcatgttgctaagtggctagcaatggaggtacttattctgatttaatttgatataaattatctttattacgtgcactggatattggaactatatctacttgtcttacattacatctcatggtgtttgaaactaggaagaggacatggacagccttttagaataccatggcttccttataaaggtttttgatgagccatatatggtgaaggaaggaccatttctcaatggtgataaggactatcctaccagatgctctaaacttgttgatatgaaaaaatcagatctgataatggaggatgtgttgccttctattgaagtcgtatctcctactaaagcaccaaaagtacaggtagctgagccaaccaagagtaaactaaatgtttctaggattggtgaaagggaaagacctgttcatgatattccatcagctgcagtacatagtcctaagcatgcagttgatgaagaaatgtgtgattttgaacttgtttcaccccataaaaaacacaaacaaacaaaattaaggactgaaatacccgtagttagtgtgcaacgtgaagatgagtctaaggtggttggtttcaatcctcctttatggggtttctccatgcctaaacccctgcctagcaaagtcagtaatgagagtaaatcaaattatgaggcttctctaaatattcccgcacagagaaatttgtttcaaatagaagaaccactaggagtaggcacatcaaatcaaatgccactgcaacttgcttcacaaacagcttcacaagatagacatcttgatgctccatttaaatgtgctgaagagaattcagtaccaagaagcctggttaataaagtggaagttgaagaaccttttgatgtcccccacgaagatgaaagtgaggaacttatagaagattatcaagatgaagttgctgaggcgaaactcaaattattactaaggttttatttatatgtaaatttttcactttttacttttttttccccattttgtgctggaaactctagtctttgaatgatcattgagaattattatctaaccatgtgctttgctgcttctggatgtctccgtttaggttatggaaaagacgtacatcaaggaagagagagttgagagaacaaaggcaatctgctgcacatacagcattggattcattaccattgggtccaccagttcaattgaaaagagatgtaagcttttccaaattgtgcagtgtactggtatttccattataagtttgcataatagtagcattccagaaagtcattgacatgattccccctctttccctatatatctattgaacggtcaaataaacgagctcgtgatttctttcaaccttgatgtctgtgtttcttttgtcttcacctctttttttttctttttctttttttttttgtagccatccagtgcatctggtgtgtttgacattgatcttgctttgaaggaaagatataacaagtataaagaatcatggtcaagacttaatgtttcagaagaaatagctgctatattaaccagaagaaatcctgatgccaaatgcatctgttggaaaattattgtgtgttctccaaagaataatccagaagctgaagtcagaaaagggagccaaactgcccattcttcagctagtccatggttgatctcgaaactcattccttctagaatagatgatgatgatgatttgttggtttcatgtcctggattgtcaatttggaagaagtgggtttctggtgaatcacgtacggatctgacttgctgcttgtctgtagtgaaggattcaaattctaatgatctgattgagactgtttctggtgcaagtgctgttttgttccctgtatgtgatagcatctcttggcatcttcaaaaagctcagcttcataaacttataacttcgataccttcaggttcttgtttgcccctactaattttaagtaactcatcatgcaaggatgaagtctcagatcttacctccataataataaatgagttgggcctcctcaacattgacaaatcacgaataagcagctttctcgttgtttcccttattgaaaatgagcaaatggaatgtttagatgggtttctcagtgataaccaattaaggaaaggactacagtggctggcaagtgagtcacctccacaagttgttcttcactgtatcaaaacccgtgaacttgttcttgctcacctgattccttccttggaagcactagacaggatcagtgatcgtgaagtaaatcctaatagctttgtcatagccttcaatgaagcattggataagtcaattgtggacattgaaactgccgtgaaagcaaatcataccagctggccttcccctgagattgctttactggaagagtacagttatgagcgtaaatatgtggaggaatgtgctcctgaaattgggtggagctcaatggagagaatcgaaccactgatatctgcattacttaattgcaaacttcctcttttccatgacgacctgtcttacttggcgaaaggtacaaatacagacagggagattaagatccagaaagaagaatttggaaagagccttattagataccttgcagaatcaggtattgggctggctataaatgaggctagcataatgctgcaaagttctctgcttgagttgcatggctcatgctaccgaattgttccagattgggttatgatcttcaagcggatattcaattggcggttaatgggtatttccaatggtgcattttctttggcttatgttctggatcatcctgatgtctttccagcttttggtgatctagacgagctggtgcttaaaggcagtagactttcatcgtattatgtaaatcggccatctctggatgaaatgatcgaagttagttgtgttccccttccttttagcaagggacaggtagtgggagctaatcaacctcctcctcagattaatgcctatagtgaagttcaagaacctgtcgacataagtgatttcatggagggtaattcagattttgatcaggatcatagactggttgttgcagatagtaacgttagagaagcacgggagactgacaaagtgaatgtagaagctgaaaatttgagtaagttgctagagaaatgtaacatactacaaaacatgatagatgataagctatctgtatatttttaattttttgtaaaattttgtattttatcgtggacgtatgaattactcgagttatgtccaatttttaaagggcaataatcaatagcaaaaaagcagaattttggtcaaatttgtttcataatgcaagtgttaatagctaatgattatcaacgaattaaagctaataagagtgctaaactagtagaatctcttgaaaaatagtgtttagctaaatgtagttgcaaacatttttaagttttggtgtataggtaaatctttttattatattttgtgttagtgctgatctttttccgagatacggccaatttcccaaacatccaattgctattttcattcaacaaaacttcaaaaattattacaagtctttttatactcaaattcaaaaaggcaaacatcatgacagaaattagagctacaacttcacacgaattcagcgtgacagcagtagaacaaagtctcggaaccagcgcggcttggcttgcttcctttgcagacgttccatgacatcctttttctggttacagctcacctcttctctcttttcatcattgctgctggttccacaagctgaagttgcagcttggtcttgggccttctcaatcatccaagtcttcatgtggtcttgtatagcatttgagtcaagtgctaatgggcctatctcatgggggcctccataatactactcccatccccgaaatcaaccttgtcctcaaggttggctagtttgtacatcgtaatgaactcatcaaaatctttccaagtggcgtcttccggggggcttaaggaccattaaaccaacacttgtcgactagtcttgttgttgtttgtgttccttcgagctgccaaaattgccaagcgaaacatgatgggtttgttggctatgctcagctcagatagcaaaaaacacttgactggtttcgagccatgaaatggtttgagtagcaacacatgaaatgtgggatgaattcgacttttcagaggtaactttagtgtataggccacatgtcccgcttctccaatcacttcaaaggatccaaaataacggcgacaaagtttagtattaagtcgatgagctactataatttgtcggtatggttgtagtttgacaaggaccatgtcacagagcttaaaagagatgtccttctgcttcttattagcctgttggctcattcgattctgtgcttgctacaaattaagtttaagttgctgcaatatagaatcccgatttaataaatcgtcttccacgacttggattgtagtggtgcctcgagtgtaagctggaatcgtaggtggggtgcgcccatacacagcttggaaagggacctatggcagagtgatggctggtgttatagtggtactcggcccaagacagaaatctgctccactattttgggtttttcgaattgaatgcttgctggtactgctccaaatagcgattcgtaacttccgtttggccgtctgtttgggggtgataagatgagctcatctttaacgtggtgcccatgagtacgaacaattttttccaaaaggcactagtaaaaataggatctctatcagaaatgatggtgcgaggcatgccgtggagtttggtcaccatatgagagaaaagctcagcaaccttggtggcagagtaatggtttgggagagcactaaaatgtgcgtattttgtaaaacgatctacaaccactagaatgttggtcacaccgtgtgagttgggcaatctcataatgaagtccatagaaagatcttcccacaccctttccggaatatccaatggccgttacaatccatagggagcggaaggtgtgtatttgatggtttgacaagttatacatgcttggacaaagtgcttgacatctatgcgcatcctttcccaaaagaaatttgcacccaagcgcatataaactcttaagagtgtatgtcggtcattgtggttagtttacgttacattttattcaaccccaacgtaaagaccgggttacaaaaatttaagtgcaactcgctcaattaaaaaaaatcaacctgcctaactaagccctaatatttat

SEQ ID NO: 17412 - DNA, 5828 bp, Cannabis sativa
acaaaccgcgttttgcctttttgtctcacttattcctttatatttcatttcctcctcacaactcacaactcaactcaactcaacaaattcataaacttgtttcctctaaatcctaatctcttccttcccgccatgaaattttctcaatcttcttataacactaataccaccttccatggctgcttctctcctctctttgctactactaccacttcttcttcttctgccaacacttcattccctctcaactgtttccatttctgaaacttctaaccaaattcttatctgtgcagtgacattgacagtacaatccaacaacagccgatctttttctaagtctttcaattgtactaactttggtaccgggattcgacttccgtcttccaatcccgatttttcggaaactgtttccggaaatggtttcgtttgcgggttgactaagttgcctcaacaatctgccttgctttgctggagattctccaccgttactggtgcctcggattttcagtacaagcgaatctaccttggtccatatctgagtgaactcgacgcgggagattcccacatttgtggaatagtcagcgggaccaatcgccttgaatgctggcaatggcacggattcaactcctcctccgggagtcaacagaatttctccaaaatctcagttgggcagaatttcttgtgcgggatattgggagatactcaaaacgtctcttgcttagggagcaacaatggcgtcgtggggagtgtgcccggaggaagatatactgaaatcgctgctgggttttctcacgcttgcgcaatcgccacgaatggaagcttggaatgttggggagatagtcaaggaagagagaatcagccccaagaaaagttccagtccctggctttgggagaaaaccgaagctgtggtttgagaccaaacggaacagtgatttgctggggccaaaacaacttcgccttgccacagtctcttaggcagagtgagttcatcgctatcgaagcgaaacgcagagttttttgtggagttttgaattccaacttctctttgcattgttggggtaaccgagactttgagtctaaaactgttgtgtttgacaaagtcttgcctggtccctgcagaagtaaatgtctcggttcagtgttaccaggctccgggttattctgtccacaaggattaagtgtttgtagagcagagatacctaattctttgccttctccttcaccggagactccagttccaccaccacctcctccgccgccgccctcgccccggcggaagtcgggttggagtaagcaaatggtggcttttcttgtggtgggttgcattggaacaacagcattagtattggtttgttgtttctttatttggttaaggttttctaaggttagtgggagtcgagtacatgactcaggccggttagacgatgcagttgaagctggttctagcagaaacaaccagagtggtccacgcagcactaatgatcatcatcatcgtcaaagccactctggtccggtgcttgaaaagcgactaagccatttaatcagtctaggaaacaatgggactcacttggaagaattctccttaggggtcctccttgaagtcactgacaatttctctgaagagcgaaaaattggaagtggcagttatggttcggtgtactacggaaagctagacgatggcagagaagtagccatcaaaagggctgaagcatcgacatcttcgtcgtttgtgggtgctactgccacaaaacgacaagaggacagagacaacgctttcgtcagagaactagaattcctttcacggttaaaccacaagaatttggttcgcttaattgggttttacgaggacaacaaggagagagttttggtgtacgagtacatgaccaatggctccctccacgaccatctccacaaaccacacgagagctcgccctcgcgtctcatcagctggtccgagcgaatcagggtggcccttgacgcagccagagggatccaatacctccacgactacgcagtcccttcaatcatacaccgtgacattaagtcctccaacatactattggatgccacgtggactgccaaggtgtcggactttggcctctcattgttggggcccgaagatgacgtgtcacacctctctcttcgtgctgcggggacagtaggttacattgatccagaatactttcggctccaaattttaaccactaagagtgacgtttatagttttgggatattgttgctcgagttactttcggggttaaacgccattcataaaaatgaaatcggggtgccaagaaatgtggtcgattatatggtaccatttattatacaagatgagatacacagagctttagatccaaacgtcccaccaccgaccccatttgagattgaggcagtggcatatgtggggtacttggctgttgattgtgtcacattggagggtcgagacagaccatctatgacagaaattgtaagtagcttagaacgagccttggctgcgtgtttggctcggccacagctctctcggtcctcaaccgagtcttccacgtagatattacaccaccaactctgacttggtcaatttgtaaatcaaaactgattcttcatttcttttctctgtatttaatttttatttattattattagtattatttcacacgtaaaaaaattcaaaaattttggtctcatttgttcactaaagtgtgggccttatgcttaaaaaaagtatgtgataattacctactctagaaaaatgatgccaagtgtgttattcgggtccatataattttccctttttttgggtcattggttgattcaaatccagctctggaaagaaaataatattcaatgacaatgtcaaattgattgaaaaataagaactgtgcaaatttacaagtcttctcggcttggaggacgacttcttgacattagttctcaatcattagaacgaaggttctcaaattaatgtgagagttagacctgcttatttaaataagggttttgtttgacggaaatggaaggagttggactattttgcattttttttttaataataataataataataaaaaaacttgttgacaaaataaattcaaagctcactttaatacaaccaaaccgaaactactcataatgtggtactattattattgggaaaaaataaccactcacccgtcatccaattattttgtaacttaaatggaaatactcaactggatatgtgtagcagttttcgaatgttgttcacactataaaaatgcaagtccctattcacacacacatacaacatatttattatgtaggcgtgtgtgtgagtgcaataactaaataaagggcgccataaatgtacgagttttccatcataaataaaatagaataaagcgatcacagaaaacacattgcacaaatgatgctattgtgcttacattattcattttcccccgttacaaggaatgtttcacactacatgaggtgaaataataccaccacacaaattttaatgaaaccaaaaaggaaaaagaaaatatgaattgttttttgtcactggaagctaatatatgtacaagcacatgtgtgaaatatgaatcaatatctggaaggggtttgttgccagtatattcagcatggaaccagcaccaacaaaaaatattaagaagcggcacaaaaaccgatatgttttccatagtcactcaactgttatgaaggcttgtaaggctcacgtctttaaatcttctatgccgcaagggatcctgaagcttccttcctctgctgaagaagattctctagggtgacatcaatttgtgcaaacacattctccttcgaatcacaaccatccatctgtagcaaaaaaaaattaaacaccgaaagttggatgcagaattataaaattgtctgttactagacacttcctaactacactatctatatgtaccagtcatttaattcctaacacaaaaattgtcggagttagagctccttcctctaattcttatcgcatcatagtcaatttctgcatgaaaaacctcagctacaatatcccagaaaatttgctcaattttatatttttctacaaatgcacattttcactaggaaacagcatcattctaagcagccatcagtcttagtcctaatattctctaatatcctgtgcacctaatacctatgatttatctcctaaaagaggtaacaggttgtcccttccatttacctcctttcttctcatgatgcttctgtttcttgggtaaatggttcccatgtcctacctttgtggtttatgattactattttaatgcaacaagtcttacaaatttgaagtaaaatttggcatgttattactagttacctttgttttgtatttgtttatttgttgatgttgtggttgagattgagacaaattgtagttgtgataacactaaacaaaaaatgaagttgcaagcttgacataactgattgtactaaacttgtggtccctatccattttttttcagcatgcaatgctcaatcacaatattcaaagttcagtttcaacacaaggcatataaaactagaaagcctatttttttttatatcttgaaggtttgactcgagaagcttgcacttgcaaattatactacatttacgttttattttctagaaaaataattttataaaatttaaaacaatatgcactcaaaaagagaaatattaaagcaagtctcttacaattttacaaaaatattttccattcattttttctctactctttttcattataaaacttttctatagtaaactccaagatccaaacatagccctaaggtgctaagaaaattctgtaaacttcaaaccatgatttcttgaatgaagtttatcaactggaagttccacctcattgtaggctcttgaaagtcagaatcatattggattagaaaagccagggctatattggcttaaggagaaaaaacatcagtgtttacacatgaatccaagaattctcttgcaactatgagatataatgataaagtaacttcacatataaatactatatctataactagtcactcacactattgctttttcacagaagccgctaaatttgggtcataattaagatgatattgaagtgttgaactttctaaaaaaaaaaaaacctacctccaagtgatcctgttcctgctggattctatacctgcaaggggtcgtcctctttatttttcctatattcaccatcctaattcaaaggtggccaaacccatatttatcaaatttattatttcatttttcttattgtttttcttttcaagattatccctcagatcttagcctttaaaataaattgactcactacacttttgttaaagaaatatagccaaagcatttggttttcaggacctagttaaacttaacaaatgagtgtttactggtaaactcaattacaaataaccttcaagaggccaattgacacccagttagaaattttcgcctgctgctttccttctgataagagtttaaagatgaattcaagttattttagttcagccaaaccatatattcttttctaggggttacctagaaatcctgtagaaatgacagggtaatctgccgctctattttccattgctaattaaaccttccttagactatattcgtggaaataaaaagaacttaacaactcttctgataaaggcatggcaactccttcaccggtttcttgcgcagatgagaaatgatcttataattttctcttaaaactcaaaagtactaaactaagcacaagataagctatcagcctgctctgtaattttataaaaaattattctccaaagcatattgaaagaagaaaagttcag

SEQ ID NO: 17413 - DNA, 2576 bp, Cannabis sativa
atactgaaaaagtgagttgaaaacgacttggcagaatttaaacacccaatctggagttcttgaagtcttggcgcaggtttagggagccctcccaggtcaactgctatgactcgggactactaaactctaagatatttttttcttaattgccacgtgtcaagctttgatatccacatcaatgggatcaatttccaggttatttgtttcaaatattggtatttattccatataaattttaacatgtatatatgtcttgtaggaaaattttatctaccctggagctaatcccaagatcatggagcaacttatgttgaatattatgaagggagttcgtgatcataggcacaatataaaggtgtcttgagaagataatatcgttataatggggggaggggaaacgtgaacaaaacacttcacgagagatgtaataaagaagattggaatattttgattgcactagaaggaataagcacatttggtatgttttatatatttttaattattaatccacatttattcaagaatttatattaaaattctatttaatttgtgtaatacttttgaatgaaagttctcgaaaaaaatgtccaaaggagggacaaaatgtcgattcaaggaagatagggatctaagtccatcgttgcacacgttcatgaggaggtatattgtaataatacttcttttactaaatattatgtaaaatataataattaattgcaatatatgttgaataggccaataaaagtgttgtagacacttttgaaaagttgcacaagaaaaatagcaaatggcaaaatgaatatgttgcaaagaaacattgaagtactgttacgtcaattagagtttacatttaaattttgaattattatataaaatttctaattctatatgttatttgcttttactaggaggagatggtgtaactttgctaatctcagccaatgccacagactgatgcaggagaaacttttccagtgcatctcaacatcatgacacaggtaatgggataacgatctcgatatactagagtttttggacctatgggaatattggaggtgtttgggggacaacgagcaacgaggataatatctgttgctccatccacccaatataacaaagaaattacctaacttcatcgaaaagtggagttccagaacaactactttactacttttatatcagtagatgcaacatcttttgagtcttatacatggatttaatgtacccttgtggcctccacaatttgatcaagaacaagctccaagatgaggtggtggtggtggcgacaagacagatgatgatcaggcagatggccatgatggggtaccactcatctttagtttagtttatttttagattacttttattttgagctcttcctccttatagttttataatgtattttagtgtaaagtcaaacacattagctaagttaaaagtttaaatttataataaacaacttattatgtaacttttagttataaatatttatcttaattaacattgttattagtttttatttaaattttgataataaaatatttattaacaagttaaattttattcaaaaataaaaaaaatattttttcagccggcaaaatatttcaaaaaaagaaatattttgttggggcaaaatagcactgacaaaggtcagaatatatatttggaaatgttttgtcagtgcttctattgcaccaaaaaaatagaaaacttttactggcatttgaaatgcgctgacaaaacccaccaatatgccgacagatctcccttccaaaaatttttggcagcacattatgccggcattgctctatgtttgttggcattatttagcgccgacgaaagcccttttactggtgcaagcttaacagtgctgacaaaacctgcttcaccaatgcggtattgccagcaagctttgcctgtgccattatgtgctagcaaagatttcccagggcaaacagaagacttttgccaatgcaaaatgatgcctgaaaaagtgttagttcttgtagtgtcatgtaataaactcacatgagtgagatagatcccacaagaactctagttaaatacaaattaattgaatttttagttctatatggcaaacaaaatttggttgcttgaatataataaaacaacataaatagaaaataaacaagaataacaaataacaatgatttagaaaattaggaagattaatttcaattgcttctactttttacttcactaatgcaactaatcttcttctgcctattgtgataacaaattataaattaattattctacctattgtgataagagattataaattattcaattgcttattaagacataaagaagctaaattatatggcactatcctacatctctcaggtataacacacataaatataatcaacaatatataagtaataatccaaatgctacacaagctacacaaatacttttattttgtatcgaaacttatgactaataaattatagcataatcaatattcacttttcaaattttatattagaataacaaatcatacaaaagatggccaatcaattatatgtaataagcacaaataaaattagttc

SEQ ID NO: 17414 - DNA, 5202 bp, Cannabis sativa
ggaatttcacggttgctgttagatttctgaagaagccaattttggaagaagtttgtttgagaggctaactattcttgaccataagaaataccttctcaatgtccagcataggatgcatccctcaataagcttatttccgaatagggagttctacaataatcagattttggatggtcacaatgttaaacatggagcttacagtaggcgttttcttccaggagaaatgtatggaacttactccttcattaatgtgccacatggaaaagaagaatttgattacaagcacagtagaatgaacatggttgaggttgctgtggtctctgatataattggaagtatttataaaggtaaataaacaatctatctctggcaggaaaatcatagtttgtttcacttatcttatatccttataatttctaatgttattaagatcctacaggaaaacaaggccaatttctctgtaggattagattagctgaagatgttttctgcacttttttttttgaattattatttttgttgtgtttgttggcctaatatcatgctctccctattctacccctagctcaactaacttaaccaactgtctgttatgacagttggtgctcgcgtcctgcctatgtaagactcacattcaaaactagctaagggttaacacatcaagagaatcagatcaaaggagagaggattagaaggtgctgtttagagagaaaagagagggagagagagtagtgtgttcttgaggttgtgatggtatgatgtatcttgaatcatcatcaccactagtgtaactgtttgtaccagaagctaagcttctcgagctgtgttattgaacacttgtaatctcttcttgtccatcagcaaataaaagaatctctcagccctgttatggctgtttctggccggggatgtaggcaagttgaatcaccattaccttgttcgaacctcgttaaaatcatgtgttcattatgattgtttgaatctgttttgctattgttattgcttgctgtcattccttacacatctctaattggtttcattgagtaattcttgtctttgaatgttcttgctgaggtgttgtttcacaacaattttgaactttggatatatcaagagaataatggttgtcttattttttgttttaaaaagaatctagtcgcacaaagaagaaggttagagttggagttatatcaccatacaaggcacaagtacatgtaatgagtgaaaagattgggaaaaaatatagttcagatgctcaaagtgatttttctttaagcattcgttctgttgatggattccaaggtggagaagaagacataataataatctctacagttaggtgtaatgttaatggatcagttggttttctttccaatcgtcagagatcaaatgtggctctaactcgagcaaggtaacacttttgcatacactctcataagctcataatgcagttaatcattctttaccatttgagtttgcaacttattccccatgacatttctagctttaatttttaaaataatcaactacctttcaaaagtaaatgcacttaacagaataatgaagactaaacactaatggcagaaaatcatcctattatgtttctccttcattggatgttggtattgaaacaggtatatacaaatattatagctatatgttatggtgtaggtattgcctttggatagtggggagtggaacaactttggtaaagagtggctctgtttggaagaaactagtaattgatgctaaggagcgcaattgttttcacaatgccgaagaggacaaaaatttaacaaatgctattatagctaccttgcttgagcttaaccaacacgatgttttagctaatgctgattcacttctgtttagaaacgccaaatggaaggtattaccggtccctatttaatatatatgccctctttacaactcgaatatcaagtcttacatccacttcaatgtaggtttgcttcactaattccttctggacatcaatgagaagagctagaaacgacgagttgtttgagaaagtactaagcctgctggagaagctttcgagtggttggcgccaaccacaaggagagaaaaaccatgttgtgcatggtgaaagttcctccctatttgttgagcattacatggttaacaaaaattgtttcttaatctgggctgtagactttatcagggaaaggtctcatgacattcaggttttgaaggtttgggatgttttgccattacttgacttaccgaagctatcaaagaagcttgacactttctataaagactacacggtggacaagctaactcgctgcaagcacatatctaatgaagggtatgaattttttcaaacactagctttgatctttttgtatgttgagactcattttcaataagtgagctattgttgtttgaaatttctacaggaatttggtggttccaatgagattgccagtagaaccaagctcttataaagcaaattctgtgcagtacttgtccaattcactggatgcactgagcctaagggatgacacatcaagaactaataggtgagtgccactatgagacaatattgttatacattcttagagcgtctccatcaaataagtgatacaatgctaaaatataactcacgaaaaatatatttttaatggtgcgccaaaaggtaacgtaaatttggcccataacaaaaagtgaacaaatttagtacaatatttgctataacacaaaatttacatcaccataaaccactggttttatatttacttttatgcattttttattattttaatagtatacttagttatagtaattatgaactatttatatatttttttatttttaataataaatattaaattttgcatcaagttttacaattgtatattggagcacaatgctaaacattaataaacattgctattgggtacaagtggtgtctagcaccttctataggtggcgccgcatgattggttaacgatattctctgaaacttattttcttaagttatatgggacccaatacttaattaaatcaatagcggtatgataccgaggagggtgttagacaccaatagtacattttagtgattctcaaatcaatacaaatatatcacaattattttttttttggtcaaatatagtacaatttttacattttcggttggtgatggtgttacataaataaatattgtagcttttgctcctcattttaaataaaagaaagttatattatctagaaatggtaggggattcaaaactcttatgcaagaaaataagattgtttaaacatttttatgtattgatgctgatgcattcccaaatgaatcccagaagaacaggtcgaaaagaacatgacaacttctatggaaggagtgatttccattattggagaagagtttagcattacaattccattgatgaggtaacagtaatgaattttgaattacttttctgactatgacattatatttacatgagtaataataatagattcatttaaattgcacacacttataacaacgttagtcatttatatttttaagttaagaccatatcacttttcttatattgtatccatgcatgttgctcagaactaatttgcattatcttctaaaattattattattttttttttcctttaccaaattatgaaatgactctttcctttctctgcagcactagtgggacttgattggcatagtctttgtgattgggaagtcaattgtatgcatctaatgcaagcaagcatactatataaaagaaactccaaacttaaagctagaactagacatactgcctaagtacttaatcatcgttgtgagtgcgtattttttgagttggttggtaactaatcctgtgaaatagaccatgtttcaccattgttttgttactacaaaaaatagacttgaatctttcgtcatctatgattatccaattcatttgaagcttctgctctaaactagttcgataacttcttacaataatactctcagttcaatcttttcaatagttggaagttaataatcaaaacaaggatgtgaaataaaatagaaataccagtcaccattgaatatagataatagaaatacttaatttgcagaatagaatctacagaaacaaacgtttcaatgtatgaccttgaaagtgaataattgttaatagtcaatagaatacagtctcaacagtctgaaacgaaacatttggtaaaaataagaacaaacttattgaaattatcactatatccctatgaactgttacaaagaccaacacgatattttcttaatattattattctctctagttatttttcttttttttttcattcgctacttaatcaaagcttattttacgcacacagattcacatataaaagcagaagacttactcaaccatcatcacaataacagaaaagtgtatatatgtcttacatttttagctgagaatcaatttcgcatcagatagaaagcagaaaaggaagagagagtttagagagatcaaagtgaggaagaggagaggagcgccgcgtcgagtgggagtaaagaccgagtctgagatagaattagtggtagtggtagtggtggtggtggtgtggtatggtgtgggtgccgatgtttaggtcctgtttctgaatcttaacattccaatgttaacacgttctttgtctcactcacaaacccagatagagcttgccagttataaaagatgaaaaatctgtgtatatatgtggaaggatagtaatgagagagtacttacagccttcagagaccggaaggccattgaggaatgggagcttcaagttggaatccaaaagaagaagccagagacagaactgatttgatgattgcgtagttttcgacctcgtagatggagcaagtgctgtagactattctctccactgattataagctgccgagtgtgtgatatgtgttttcccaagggactcgaatcacatatctgtagaagcagctgcgttttttaagtaggaaactagaaaatagaaatagctctttctcaagagatttgtagtagctaaatggatacttacaggaaaatgcgtgctccacagcctttctttggaaagctgcaagcttcttcagtctaaaatcgtcgacatcattgctcgattgacctctgtgatgaattaaatcaaaagatatctgtgatttggcgaagttgcaatattggaagatgaagaagaagaagaaga

SEQ ID NO: 17415 - DNA, 4057 bp, Cannabis sativa
tagaaagagtgcagcagccaagagctatgcttttagtactgattaatatagaagtaccctcttggattgcattttattcaatgtgtactctcttatttatttattttttaaagttctaaatattactaacttacataatgtatatctccctagctctgtaacaaaaacaatatttgctgaacttgttatgtgaactagtttaattgtataataaataaaacttgaaagtttgtttattgtccctctttgtttccaatgctaggtgccttgaggagtttgttttcatggagataaatatcattaaatctacacccgagaatgcaaaagaatatccttgtaatgattcgagatcaacataaacacccttgcatatttgacattttttcagttggtcttactttgattattctctttgggctcttggtttctctattaaattaaccttttcttccaatgcagtttctgacaaggggtgctatctgttacagtgttgaagttaaacctttacctttttgaacctttgttattaagtgttcagcatttggagaatactttaaataatgtgacagtgctgcttgctacttgtttttgggaaacatggctgatcattctctagttccaaacgatcattctctagttccaaacgatcattctctagtttccaacgatcattctttagttctcaatgaccattccttagttcccaatgatcatttagttcatgatacttctgttcttgtggtagatcatccattagccataggacaagaatttcctgatgttgaaacttgtcgaagagcattgaaggacattgctatagcaatgcattttgatcttcgaatagtgaaatcagatcgtagccggtttatagcaaagtgctccaaagaaggttgtccatggcgtgtgcatgtagcaaaatgttctggagttccaacattcactgttagaaccctgcatggagaacatacctgtgaaggagttcggaaccttcatcatcagcaagcatcagttggttgggttgctagatctgttgaagctcgtattcgagataatccacaatacaaaccaaaggaaatcctagaagatatccgcgaagaacatggagtcaaggtatcttacatgcaagcctggcgtggaaaggagcgtagtatggctgcccttcatggaacttttgaagagggatatcggcttcttccagcatactgtgagcaaataaggaagaccaatcctggaagcattgcttcagtttttgcaactggtcaagagaattgcttccaacgtctctttatttcttatcgtgcatctatttatgggtttataaatgcttgcaggccgcttctagagctggataaagcaaaccttaaggggaaatatttgggtacaatactttgtgcttcagccgttgattcggatgatgctctgtttccattggctatagctattgtagatggagaaagtgatgaaaattggatgtggttcatgtcagaattgcggaagcttcttggagtgaacacggaaaacatgcctagactaacgatactatctgaaagacaaaggggaattgtagaggcagtagaaacacattttccaagtgcttttcatggattttgtctgcgatatgtgagtgaaaattttcgggatacattcaagaacacgaagttggtgaatatcttttggaatgctgtttatgccttgacaacagttgagtttgaaagcaagattaatgaaatggtagagatctcacaagatgtgataccttggtttgatcactttcctccccaactttgggctgtagcatattttgagggagtacggtatggtcacttcactctgggagtcacagagttattgtataattgggcccaggagtgccatgagcttccaattgttcaaatgatggagcatgttcgccaacaattgacatcttggtttgatgagcgtcgagatatgggcttgcggatgacctctattcttgttccctcagctgagaaacggattgcagaggctattgcagatgcccgttgctatcaagtacttcgagcgaacgaagttgaatttgagattgtgtcaaccgaaaggacaaatattgtggacataagaactcgaacgtgttcttgtcgccgctggcagatatatggtttaccttgtgcccacgctgctgctgcccttatttcttgcaggcacaatgtacatctatttgcagaggcatgtttcacggtagggagttatcgagaggtgtactctcaggcaataaatcctattccagataagagcctgtggcatgaacaaggtgagggaacagatggtggaaacgcgaaggttgagatcatgatacggccgcctaaaactcgtaggcctcctggtagacccaagaagaaggtcctacgggtagaaaacttcaagcgtccaaagagagttgttcaatgtgggaggtgtcgtatgttaggacattctcaaaagaaatgcacaatgccaagttaatctgagttagcatgttaaattataattttgtctcatttttctaatatgccatagaatcatcttcattcatgtcatgtaatgtaatcctgatgcattctaacataaaagtggcaaataaatttagctcctttttggcatagttacctctctatttgtcatgtgcgcattaagcagtttttaggagccataaaataaataacatattatctattcatgtaaaatatatattaattatatattacccaaacaaaaaacatttgtaagcgcaaaggccttttcgagcctactttattcggcatcttattttgagctcattcttttattactaaaagaaaattaatgatgccaattggaacctacaactctttttttagtcgctaagttagttataatttttatttttatttttttaaaaattatagttgcaactttttatataaatatatatatatatatatttttcaacaatttttttaataacattaagatattttatacacatttatatattattgggtaaatctacatatgggtgttcatcaaatcgctcaaaccacccgcactgcactgaaaaaaaatacggtttaatattctttgcagtgcggtcgcagtttgaattttttctaaaccgcgtggtgcggtgcagtttgcagttttaaattattaatatgcggttcaaactgcaccgcaccgcacattataaaaatatcaatttttatatttatttaggtccaatatgtgaatgtccaatccaaaatccactaattattgtattattgaaacttaattttttttcatatttattttcaagtcttatagtatttttgataagtgttgctcaagttttattgtatttgtgatagtttatttattggtgatagtccgaaccgcaaaaatcgtaacgctacattttttgcggtgcggtttctgcaattttttagtttcgcggtgcgggtgcggtttggaaaatttgaaaaactgcatgtgcgggttggtttgaaaaaatggtcaaaaactgcaccacccgcaccgcgaacacccctaattctacaatgtagctccttaaaaggggcacaatgatgcacccttacttatttcagtatctagatgaaatttttagtctattttttttttatatccatttacgttatagttatttaagatatcctacaaaattttaagaaattcgaaataatttacaatatagaaagtcgtgttcaaaccatctattttacacgcgtacaaaataaaatagtcacgcgtgcaacacactttttaaactttattttcaacatgttaaatttttccaaatttcttaaaattttgcaagatgtcttaaatagctataacgtacatgaccaagagaaaaaagttgactaaaaaattatttcggatgctaaaactgataagggtgcatcaatatatccattttaagagggtacattgtagaattttcctatattatttataatcatttaagatttttatccatgtatatctttatattaagataaacttttaacaaattcaattacattaataatgacatgatactcttttaagtaacgttagacaa

SEQ ID NO: 17416 - DNA, 5240 bp, Cannabis sativa
atatgatatataatccaattcaataggacctaatatgacgttccaaacgagccctgtgtgtcttcgaaactattgtcatttttgttatgatctatgatgagttgattggaaaaaagcaaattgcaattgttaatttcagttttgtagttttttgtgagttatgatgacaatctaataatatatcctaggaatgaatattgtcttttcagacctgacgctggctcagcaatctttgaaaacatgttcacaaaaatatgaattcaggactataagaatttctttgatttttcattatggtatttatttgtttgtattcatttttttttctcttcatgattgtagagttgctatagatcttagagcttggtcacagtagctatatttttagcgacaatagggtagccatattgtgagttccgaattagctatattatatgcaacaataggggaaaagtcccttccatgttggaagaaatgtgctttaaaatcgtgttattcttgtacttattgtttcttaagttgaagcacacatgggagtcaaagttacactagggggcaactctgaggcccatacctatgctgagaagagttttcatttagcatctagtcattggctttctactttttatttaataatagtgatttattttacagtttttttttttttttttttgcggagaagttcttcaagttgtttaatcaaggtatgtgcaattatgcgtaaagttttactgacacttaactctcgtgcagggaatcagaaaactttgctgtgaactcctggacttgaaagatgctgtggaaaacttatgtgggaatatgcaaacaaagtatttggcgtttttgaggtattagttctaaatcatgagaaatttttaagatgacatagtttggtgttacttgcttctatttctgtccttgtcaatcttatgtttatgaaataaatatcattcgttcaaatgagaatagtacttagtagcgctggcttcgcaaacaattgatgaaatattctatttatatgatttttttcttccctaatttagtttagcattttcttgattatcaatacaattgattacaggaaataaaaagttgctggcaaggcttctttatttagtattttatttctttcgatgtaaaatatattttttcttatcagtctcaaagattttatctcatggtgttttgattacatatcagtaacatgtccgccgagtccattatcaagaagggtatccacagcttcttgtaccaatttcctcattttttttttctgattgtgctttctgtattgtttttcagcttcatctgacatagaggtttgattattgatgagtgcagaatatctgaagaggctagagaaatgcagcatgaatcgattgaactgcgaaagcacatttcagcgcaaggaattcttgttcaagatttgatgactggagtctctcgtgaattggaagagtggaacaaatctggtggtgaaccctatgaagctaagcaagattccaagagtgatgagcttaaagatcttatacctaacgaagttgatgctaacagtatttttttggagaatattgatgtgctcttggctgaacataaagtagaagaagcattggatgccttagattccgaggagaaaaactctttggagctaaaaaactcagacttgttgtctgctgatgagtcctcatataaagctgcttttttaagaagaaaggtaattcttgaagatcagctagttgagattgctgaacaaccttctattagtgttgtagagctgaagaaaacgttatgtgctttaattaaacttgggaaaggtcctttggcacatcagttacttttgaaattttatggttcccgtattcagaagaacattgaagtttttattccgtcttgttctttctgtccaaggacatatccagcaacattatctaagattgtattttcaataatctcgcatacaagaaaggaatcgggtttgatatttggtgatgatcctgtttatacaaacagaattgttcaatgggcagagtgggaaattgaggcttttgtgcggatgataaaagagaatgcacccatttccgagacagtttctgcattacgagctgccagcgtatgtgttcaggctagtctcaactactgtttggctctagaatctcaaggcttgaaactgtcaaaattagttttggttcttttacaccctttcattgaagaagttttagaactgaactttagaagggctaggaaggttgtccttggctcggtggaaccagaagaaatcattcctttttcacctcgcttcgcatctctattatctacaattacaccatcgcctgatagtgtgctcgttaatagtggaatcagattcatgtccattgttgaagtaagttgaggatccatttgttgatctggctacactatagcttagaatatttaaagctttgtatacatggttgcagactatatgaccattaagttaatatatgcacacttaggataacttggctaattctttgatgtcaacttccttaatatgactacggacccctattgttagtagaaaaggaaatagttttaaaatattaattatggtgaaacaggaaattccttgagggaagttatgctaccttaagatgatccaacaaggtactgatccatattaaacatgtttttttttcttttgtttcctgggatctattgaataacattaacatttcagaagtggtcgtctgtggatttgtggttctcatagttgtgtatttgtgttccttatgctcactgcaactcatatatgtgtagactatacattcctagacatctgataggtccacattttgtcagtgaagtataacacagccattttgggctcttaggtacaaagatttccatgcggttacaggctgctctgccatcaactctacttgttactttagtgtttgtacatgtgtgtatgcgcatagtgcattggttcatgctttgtatgaagtattttttttctcagtatcagtttcctttaatcttgcatttcttcataatgattttcttcttgatgctttatgtgttcatttttatttaactccatagttcaaaatttgtttgcaggatatattggaacagcttaccccattgactgttttgcactttggaggcaacatattgagtagaattggacatttatttgataaatacatggactccttaatcaaagccctaccaggcccctcagatgatgacaatattacagagctcaaagatgttgtaccatttagagcagagacagattcagaacagctttcgattcttggaatagcattcacaattatggatgaactgttaccaaatgctgttgtaactgtttggaagcaactaaatggttgtcaggattcaaacgatggaactggtgaaaatatgaaatcttctcctagcaccaatgccctgaaggaatggaaacgccaaattcagcattcatatgataagcttagagatcatttttgtcggcaatatgttttggctttcatatactccagagaaggaaaaactcgattaaatgcacaaatatacttcaatggaaatggagatatcttacaccactgggactctgatcctttgccttcacttccatttcaggtcattcttttttcttttatcttattactttatcgtttgatggagacattcaatggaagatctgtcgcaatgcatttcctataaattctactgtttctacttgtagagctatagattgtctgatagcttggcataatctttttaagatgatgcacctaagctaacactgcagcttctatttctggtaactgatatgctgctatctttgtaggctttattttcaaagttacagcaattagcaacggtggctggagatgtattacttggaaaagaaaaaatacagaaaaatttgctagctagactaacagagactgttttaatgtggttatctgatgaacaagagttttgggatgtgtttgaagatgattcaggtcctcttgagccacttgggttgcagcaggtatattctttaaattgtcctcttcgttctcccttttagctatcttctcttgacttgaatgggccatttacgagaggctgcttttatttcttcttcttctttcttaattgatcattgaccttaaggcatgaaagtctgtagaacggatatatgtcgtcgtggtggatactctaaagaaacagccaagttattcactcaatctgactagctttatttttgagtaacttattaaggaaagttgtaacatgtggtgtagttgttgcgtgtcagtgcaacaactaggactggagggaaagcatttctatgatccatacttcttgtgtagttgtgtttatgcagtgcccaaaaattattgagtaatcattaaatgtgcttcaattcaactaatattgtgctgcacgcaactgctcacttcacacaagtaaatatttaactagaatcctggctcttagtagcctggtctcataaagcctcctgcccccacttaatcaagtcagttttactactctcaaatttgttttttttagcttgagatcagtgaattctttgtcatcattggtgtttttgataagacctgtgattttaagccaaaatgatagaaaaagtcccatctggtgaacttgtgtcaaaagccactttgacctctatggcatatgaaatgtaaacatgtcatcatattgttattctgtccatgttcttacgtatattgttgctagtatttaaaaaaaaaaaaaagagacttgcacattcgtgcctattatgcttgcgataatgcagatggaatataagctcaactaactcacattcttgttttcaaactgcactgcataactaatctgacagccaactcgtatgctcctaatttatcaagctcataattggtctttctctcagctaattcttgatatgcacttcactgtggaaattgcacggtttgcgggttacccatcacgacatgtgcaccagattgcatcagctataattgctcgtgctatcagggcattctcttctgaaggcatggtttcaaacaagtaagttatgtttgtgtgcaactcaagtttgtttaccagtttctgtatctttgttcttctgttttccaaactaaaatcgagcactgtatttgttgtagtgccctccccgaggatgaatggtttgtcgatgctgcaaaattagctataaacaagctgctcttaggagcagaaggatctgaggcatc

SEQ ID NO: 17417 - DNA, 5673 bp, Cannabis sativa
  modified_base (110)..(121): a, c, t, g, unknown or other
acatattgattactacaattcccattcttataaaccaaacatacccaaaataggcaatctgaatgcattcattgattctctacccaacttctttatttatttatttattnnnnnnnnnnnntattattattattattttgaaagtgttctctacctacccaacttcaaaagtcttaaaagatatgatcgttgggatgaattagtattttcattttaatttccaaatagttcacactgaactggtaatatagtacaacactcaccggagagaaaagaattattagtaatatgcccgcacaagagaaaaaaattagttaagtgaatgtcagttttaatttgaaagcagcacataacatattgcctgcagctccttcatgctctcccattcttacggcaaactcctccttttaactacagattagacaaacctaaatgtaaactcataataagaaatcaattcacaaataaaaatgggagaaaaaggattgctgctgtacctattctatgatcagatcagtgaggagctggttgagattcatgaaaacaaaataatgcattcccttataccacaaaaggaataacatctcctttctcttctttacctgctaccatgtgtcagatccttatatctgtgcaataagtagttcgttccatgcatctggaatcccaggtaggcaccaatgcaagcaatcgttgatgccagttgtgcctctaatgctgtagcgggaaatatgaccctcatcccttagttcagagagagcagtgatatctaaaagctttacatttgtaccctttacagcatcttcaactattggatcctttgatccatcattaacaacttcacttccaccagacaatggacttgtattatcacaactaccccccgtgttccaatcaccattagagaaatgcctaggtgagatagttctaaagaaagctttgaggttgggatgagagggaagctgggaatcaacccacctggcaatactatgaactgtgaaattcttggcattcccaatttctgcacgttttctgtctgcattaggctttccatcaacatacatcacccaccggtttgcattcagctttcccctgttccaatgatgcccagtattcagaactaatacgtgaaaacggtgaaggtactttcttaagaaagctggtggacggtctagatgcatggctacatcagaggctcggtctttggcatcaagtggaactaaatcagacagacttgctgaccagtaatagagaatggtcgtattggtttttggaaatcgataagcccaaccatcaggacgaatggctccacgagcttttacaagaccatactgctttcctacattttcaacttccgggctatataacccaccagaggccatgcacattaaagactggaactgctgtcggcccaatgaatctccgatgaaagcaattgttttgtcctgcattctgaaacattcaggcacatttagtacatttgcatttaaagcactgagttttgcatcattcaaaaacaaattccaaagtttatacgtaatggatacatataaataaatcggagtaaagtgaagctatcaataactgtttccaatcacatgccattttgatttgttggtgaaaaaatggagagaatcatgcatctcctttgcctcaaccattaaactttaggcaattttggcaggaatggaagagtaacaatataataaaccagcatattcagatgaaagctttctagtgaagcagcaggataatgtatttgaaatgaatgacaacgctgacaaatagtttttccaaagtagctcaaaccaaagataacaaccttctcaagaatgaagatctctcaaatttcgatgtttcgcaattttctggttgccatcgatatttctcataagagaaatcagttcgttgagtcaatctacatgcccacatttctgatagccactgcttacaatcaaacccagaatatagtggccgctcattatctttctcccatctacctttggcgaagttgcaaactggaaagggaacaaactcagtgatagatagtaaactgacattatggaatatgagatgaagtaaacctgataaatgggagattattgacccaaaataataatataatagacaggaaaccaataatagtcaaaattgataatgacaacattgttagacataaaatttatacagtttacaagcatccacttctaaactttttaacaatattttttgtagccacctcatacgaaaagaaacatactaagctgcgaaacacctcaccaaaattgtaaacagtaagcctgatctaagtcagaaggaaagcaggtaaagaattaagcaaggatacaactgataaaatttagaacaggtgatggtactcataatgacatgcacctcaattcgacgacaaggtaaatttcagtagctctttttatgtatatttgcatgagttcaatggagctatttatatttgcatgactttagtggaactctacctttctttgtcgataacgatggcacatctccttcagttttttgcatttcggagataaattcaggtggagaaacaactggtccaacatctgacttttcttcttccccagtaacttcgcttttctgcatttcagacgaaatttcaggtggagaacccactggtccagcaactgatttttctttgtcctcatttatgtcttctagtatagaaatctggatatctttttcttcaatattttcatttgcctttgtaacactcaaggaagtgttagggcttacttcaacaaaccctacatgaaactatattcattagatcaccaacatactttgcacaccaaaaaatatgaccaacacaattcttttgtctagagacagttaggaagagacaaaatagagcagttagaaacataataaagaattattatcacatacttacatgtccctgatctaaaagaaaagaaaaattaaaggttcttagcttgtcaaaataagctacatctcaatttgcaattctaaaaacgttatattggttaccaacaaacatagatgtcttgcaacaccccaacttttatataaacacttaacgtagatatttaaaagacccatataagctatatataactgtatgccctgcaaagttaaaatgagatgaatcaaggaatcatcgccagaaattttaaaagttggcaagctgacacctgtgagtcaattaagaacaattacatccaaattagtacttacagggccagctaacaatcgagtttatcaagaatcaagttggtattaagtttgacaagtttcaagacttccatgctcatgcaagtgcaacacgatgaaatgttcggccccaagttccatacattaaaattcttctcttcagttatgaattatgatctagataagactagtctttagatgattattgtgcagctaatacttttccacttaagttttctctgcaagtatttctgtgcatctactaaataattaattaaacatttgtcatggtttcaatacagaacagcagaaaacaatatcaatttatatacctgtggaggcacacatcaaaaacatatttaagctttagcaatttgaaaacatacctatagcggggatggaaaattgatttggggtcgacaataaagtagtgctgaaaggattcttttcacataaccaaagtaataaagttgtcgcaagtaggcaagccaaaatgaaagaaaatggtcttccccgcaagaaagagttagttcccactttcatcttggctaggccctagtgttgtcttgaactcttcttgatgttgaaaagatcagcaaaataagctcatattcttcaaatcctatcagtcatattcctggaggcttctgctgtgttgtagaaacatcaaatgaatcgtaaacataagaaaaagatatcctatgcaagtatctcctcacatatatgcatcaaacatcaacacagagaaaattctattgtttggatatgttctatatttatttttcaatggcacactcttaacgacggtaaaaggaactgtccttttgacttaatcacttaaagaaagagcggaaccacaaatatcaaaactcttctatcctagtatgttgaataatcagataagtcaatttatttgacaaactattcataaacatgcttacaaattaatattaataagataccaataattttaagaccaaatatacaaaagctcagatatattacttcaacaaaattttgccgacaaaattaaaataacaaaaggaacaaaaaaaaaaaagtaatgatcttttgttcaattgtgaccttggtgctatgaaaaactatattctactactctgatgactcacggtcccaaatcataccacggcaacaaattcatgcttttaggcatgaaaaatgcatgaaacaaattttagcttcatgttttcatcgaagtcattcttaaaacaattccgactctttgctagattcgctggattctgattcaactaaattcacattcattccgcattacgctgacgtattcaattcacattacgtgaatacacacacaggtaattcaattgcacccatttccacaattccactaagaccaggaatttcttgccatttacttacaagcaagccgcctcaacagcaattcaaccaaaaaaaaaaaacatggatcaaattttgaccgtaaactttttgcaattgattaaaatcgcaaatctcaaatctcaaactaaaagaaaccggacaataaactaaaaattacacaggaaacaaaaaccaacagagaaagaaatctataaacaggagagtttccacaatgcttctaaaaataattacattcaaaaaatgcaatcgaatgactgaaaactatgatataaaatataaatcaatgaaaaaatacgtacaaaaaaaaatcgcatctccatattccccaatggaaagcttcgaatagaaaacaaaaaaagaaagatagagataagaaaaagcatacctccactactatggcggcgttgttgttctatgttgattgactatagcttaaaaaaagcctgaaatcggtatctcacaatctcagatccatacacagagacagaaaaatggcaaatatccaactcttgtctccttggccattcgctctttaatattttttaaaattttaattagttaattaattagtagttattaattctattttctttttcttaattgctttttaggtaaatatggagttttccggtggtagcagttaagtaggcagatttgaatttgttgagaaacaactcaactcctccttgcttaatggaatcacaccacgtagtaaatattgtacaacatcgtaatttcaaatacaaaagacaaggataatattgtcttttcaagttgctctagtgacgaggaagtaaccaaattaccctcgtttattgtacgtggcgccgttacttcactaccaaataaatataataattcgtgtgtttttttattgtacattgattttgtgtacacgtggcacgtagagtgttatcagtgtgagagacagatatatagaaagaaagaaagaaaagaagagaatggcataatgtaagtttggaatgtgcgctaattatgggaaaaaaggttttaactattcaactaataataaaagctcttcattgcctgtttgaccgagtagaaccttgacaagccctt

SEQ ID NO: 17418 - DNA, 5660 bp, Cannabis sativa
  modified_base (26)..(29): a, c, t, g, unknown or other
  modified_base (5616)..(5620): a, c, t, g, unknown or other
acaatctcaatagttcagggggaatnnnnaacggcaaaaaaagttcagggggcataatttggtatatgtcaaagttcatggggaaaaattactatttaagccttttatttttatagtttttaaagtataagtttgtaataatatgatattttttttttaaaaaaaaaagttattttatgagaaatttttttaaaaaagttaaaaaaatatagaaaaaaataagatatctagttaccattagttactcctctggctactatctcatttttctatatatttcaactttttttttttaattttctcaaaaattaatatttttcgtataaaaaaaatgatatttttacaaaaaaaatataaaaatccataagatttgtaattttcccttattcttctgtaaggagctgagctcaatattattgagatttgataacactatgaagttgaaataaattaaaagtaacaatagtatagtcaaccgatgtaagtatatatgtatggattaaggaatgttccaataattaatttatagaaatatactacaatagtactagaatgtttttctttggaccaatgcttgtctttgttttctaactttttctgtaacaattcatttgatttaatgagatatggtactttcattaaaaaaaaaaaaagaaatatactacaatattttttttcccttcatttttatcatcacattttatcttatttatttaatttattgtttgtagtgttggaatcttatataagcattttcgtcttaaccattttgtcatgaacacaagatcatttttatgagaagacgctgcaattacatgaaattaataaaagcaaaagtatacattaatcagttctagtcaattattagtacaattttttcatcatctattactatatatacaaatgacacatttgacttgaataataattattaggtcaccatgtggttgatggtttattgattggtaatctctctattatctaagcacttttgtcatgtttaatgattagttatttataaatagatttcaaataactgtcaattaatcaactactttgtatatactatgtatataaataaatatgcatatatacaggaatatccatttgcattcttttccagaccacaaactacaaagatgcttgtatatgggtatacgtatagttaagaactagtctagatggcttttagcttggccttttattgtaacataaaataatataaagtttatcgtaaaacgaaatagactacactaattctctactaccaaacacatattatactaatattattatagctgccgtcctaagtggattattaatatatagtaattgatcaaaattaaaacaacagcaaaaatccaaagttgtataataactataaaaggtggctgaccaatcctaacccctacgtacgtaagcatactatgtaataaataatataaagttctcaataatagtagcattaggcaccatctcaagaaattatatttcaaaaacaaaattttaattaaccttcttttttcttcatctttttttatgaacacaaaatgatattttagaatatgttgattatattaaagtaaacaaacacaatgaaatgttgataataaatatataggagtgggtatctacgcgttttgttaggggaaatagaatagaatagcatggaaatgaattgccatgatccattatttttgtttgattgtattttgaagtgttggtgtgaatgactattttatttaaaaataaaagaaaatactattctaacataagatgtataaaagaatttaatattttttttttttgaaaaggtaataattttttttttcaattatgtatattaatatttattcaagtttatttctattcctaatctaattttaaaaggaaatttatgacaaaaatccaaaaaaataatttattttgatgtagataattagttccaaatttcgaaaaaatagcggcaatagtcttctaggtcatgtttgttgtaagtctgtcgataaccaattcaacaactctgttaagtgctggcaagaataccatgttgaaacattatttgtccaaattataatttgaattaaaaaataattttaaataaaataagagagaagatgatgagcatagagatggaaaaaaaataagtgactgattgaggagattgggatgggtaatgagcagcttgttcttgggcctctcaataattaatttttgggttttccatggctatggatgggttgtgttaacttggaaacttttttggtgacgtgaacatcaatatttgatatgtggcatgaaggatgacatcacagtgttgagtagaaccgagtcatagcagtcaaccttggaggggaccctagccctgcgctcaagttgactctgggatcttcgggatggaagtttggacttcaataacttgaatctaactcactatctttcagcattttataccatgaagacatggaaaaacctaataaatggttcaggagctaaaattacatgaacaagcaactcggaagccagcatgggcacttagggtttctacctagtgcccaagttggcatcctcaactagggttttagtttttgggaccgttttagtgcaaagttgccaaaacttgcattgggacatcgacttgacatactacagacatatttgaggcatcaaaatcatgttcgaagcaagttgatttttgagcacccaggaccccggggccccaagcacctagcgcccaggttgacaatttgttaatctaggtgccttcaagcatccgatcgaagatccaacttttgctttgaattttttttcatcaaaaatgaggtaataggtccttttggaggaaaagtaacaagttctgggcacaaataacaaggccaagtgcctaggttgacacacctgggattggccctacgcctaagtaacaattcgtcaacctgggccacaaaaaatggagttttcccagattattttgagcattatctccatcttcaaaaaatattgagaatcaactatttttggggaccaaacaaaactttcgaaggggcaggagggacccactgcccaggttgagacttgggactcggccctgtgcccatgttgacattttgtcaaattagcatgtttccaatttagttcagcaaaaagtgcttcgagcatcttcactttcataaaaaataatgaagattcaagtaaactcagagagaaaaccacaaacctgagtccttggaaatagggcccaagttgaaaattaacctgggatgctacgtttgattgctcgaatgccaaatttgatgcaaccattgaatctggcaaggttaaaaattgggggagaggccccttcaagtttagaagccttggaagtaaaaatagaatctcgggagctcggtgtaaaggccctagtgcccatgtcaatatttggcttggttcgttgggttttgcttatacgaatttgatgtcgcttcgaccatttgtcaagtttttcactagtgagatgattcatgaagtcaaatcaaccaaattcacaacttcaattttggctcatccggaagccaaaagtttcgagtcttttgttttcgcagaacaacaacatctctgagaatgagtgactagcttcaccaaaacatataaaaggactaaggggtgtcaaaccatcacttaggcatctcaaaggacttcccttggatatttctacacttttacagcgtccaggttgacgtcagatgtcaacctaggcgatggatgttaacttggccgctaaaacctgtaatgcctttagtaaaacgactataactcactctatttttttatctgaatgttgtgattcaacatgcgttttgaagctatttaatccctctatcaagtcatgtctcacacacaagtcgaaattctaaggctattgtcgccaaaatttatccccaagggagttacaaaaataagctttgggtaactcgcagtgggacctgccagacataaaaaattggctatcattaccagaagctaattttaaccgttagatcatcatcaatggtgaaaaataatttatttgtattttatctcctatattggtggtcctccttcacctataataggagagctcccttagttcattttcacattcagaaaactacccacaaggtcaaagcttctctctttagagtttgaagtttctgataattaaataattgttgtaattaccatttcgttaaaaataaaaactcgaagtagacatagccccattactatcgcgacataggggtgaactactataaattattgtgtctttcttattaattactttctactttcattctcactaatctagcgagtgggtgtggcttagaagtctactctagattttttagtcaacattttggtactttcatggagcgccacagatcaagaaagtcactgattgagatggttgcgacacattctacaagtgtcgacagaaagactccaacaactgggggcatgccagttgatggagctgctcttgggactactcttgcaccccgtgcaccaaaaacaggcctcggaactagctcctcaactcgtcttccaaggccaccactagtagcttccaagattggcaccaacgactagatcccacctggggagccacgtgaggagatagaagatcctgaggaggtcgatccttaagtagctcaacttagccaaactgtggttgacttgcaacaacagttgcgaaactctcttgataagtaacgcaaacagtttcaacactggtttgtggaaaattggaagaacattgaaagccattgcgtttcgtaggaaaaaaaaaagagctaacctgtctcaacagattagagaggcttatcgctttaattgtggaactacttcctgaaaaggtatttttgagttggtgagagagacaccctgtcgaccagctggtcaagtgggaactagtgtccaaagcaaaactctgaatgcttggaatgccaccattacacctagtaactgagcaggaactaggcaaacactaggcatggagagctcccaaagggaaaatacctttaatcaagagcctgaaaggactcaagctcgagggcccaaccaatgggtcctccaccttatgttgaacgacctcacaataacgagagaacaatgaggactcttacactaagtcctcttaaatattctcaagagatcaggcctcgagaccctgcaagggaaaagggacctactactcaacttgaaggaagtagtaggagacactacttcgaaactggaggctacaaaatccaacgagtaaggaccaatgagccgcttcatactcgaaagtacttttgagatgaaagagggaagttgtgctgttactttgcccgtggccctgatgaccaacaatgcaaatatttctctcgggtacacggagagaatatgaacctgagtgaccaattcaattctcttcatacttgtaatcgtgttgaagattactttgaaggaagtagctattacaatgctctaaatgaacactctcacagcgcgtcatcccgagatgatcctaagttcattctagaggccttaccaaagttgccttctgttacgaattttatgtttattacgcaagtgtacgcaatcaagtagtatctcacnnnnntgaggtcgaaccacagggaattagattaagtactactaaa

SEQ ID NO: 17419 - DNA, 6152 bp, Cannabis sativa
gaccttctcgatggccttcacaattctcatttctcactaactagatggatctccacttaactggatcagcaatcagttttgtcggcctgttaaacttgatttctaagttggaggatgtagaatagattatgtcaaaatcttaaatgcttttcatgatttaaagaagaaaaaccctctcggtttgcatttgacagactattttctgtgaaattctggcaatttttaagacggtttttacaacaatgtatcaatgacaatcatctgttatacaagagaatggtaaaaacaaattcttattctggactttccgtatttttgcccaaattttagtcttgaagtcttgaactgcctcttagatacactagtcacaagttctctctgtcaccagtttaccttgcagaaataacttgtccacataacttgtttgcttgtttcttatctatctatatttttagttatgaaaaaatacttcctatttacgtacagttctcttccagggcaatgctgccttcaagggaaagcaatggaataaggctgtgaattactattctgaagctatcaaattaaatgctacaaatgcaacttactattgtaatcgggcagctgcatacttagagttaggctggtacgatatcacgaagaaacatagattattattattattaatatttatttatttattagtttgctgagacttatttttttatattaattatatgcagcttccaggaagcagaggaagactgcagcaacgcaatggaaattgacaagaaggcgaggaatcaagctttgatcttattttctttatgcataatattcttttaccatatataaaatattttttcttttagtttttatcatatactttcattgtgtgaattgacatcacaagtcctatgtttctacatataactaaatggataactaacattgaattaaatggataactaacattgaaatgagaactagtccagcttttgaagtactaaatgtaaattgcttgaaagaagttggtctctttacaaatgccaaagaacaaacttctttaagagtttagattttcccctttacttttcctcattgctgttataacggttattctctgaacttttcagaacgtgaaggcatatttgagacgtggaacggctagagaatcacttattcgctataaagaagctatgcaaggtgataatctcaaaagttcactctattctttctttgtatgaatgagataaccatttttcatttattctggtatattggtgtctattatctcttcagactttccttagtacttaagcttgccttctcacccaatccttcttctatagctattgcaactggattatctgatataagttcggaagaaactcatttattcatatatttatttctcatgcttgtattcactctgcctttcgtcactcttgaacttaaatatattttcagattttaagcatgctcgtgttcttgaaccgcacaataaggctgctaaatttgctgagaaaagactgatgaagctaatgaattaagggtttgatcccgttccacaaatggcaacctcagtctcacgcaagttaaaattctgccaatgactttttgttagcatgaaacatttaatattctcatctggttggagcatgaagtctgacaaagaagaggtgaggattgtttcgttattgcggcaatttgattttattcgttctgtgtatactgttttattgtaattatccgtacactcatggttacttgcatgcattaaccagttttgtcaacatggtttctagcacaaactgtttgttccatagggagagagaacaacagaaagaaaaggaaatgagtcattaaagtccatgtctttttatatcaaattaaaggggtcattgttatacacaaactagccaatttttggttgcttgtttcatctgtctccaacctcaaagaaaatagtgtaattttttttttttctgtactgtgttatatattatatgtggaacccttttaccattaattattaaggcttgttcatttaaaaaagaaaagaaaagaattatgcttgttggaatatttgtaattagttcatgcacttaaaattaggagatgctcttgctacttttctttttcaggacatcactttctttcttttgggtgcgtatgactatatgagcatctccatgggcagcccactagagtggtctaatgtggtcaagttcctacaccaatttcatcgtagtgttgctcaaataagatcacgtccatgtggcatttctctcttttttattttctttaaaaagaaattaccatttgaaaaaaaatgattaatttaatgtttatatatatatatatgtatatacttttttggtaactatagatgtgcccattggagatggtgtaatactaataataataatctgtacctataaaattgcttgcgtatctaactcttctcatttttaatagacaatactttcttattgaaagtcaatattttcttaaaattataatgtttccttatcgaaagatatatatgcaaaaggtcggtggacaaacactagtacttacaactcttattgtggttggctcatcacctctaatacttgaatttaaaacctaatcttttgtattattacttagtttacctaactcttttttgtctcttctccaagaagtgttaaaaatgttaatgacgttctacaaagagaatttagcttcctttcagctcttttattggtgcatatgaatatgattagagagaaatactaagggcacttttcctgggagtatggccactcacggagccacattatctgtagccctcccaaaacctttttattgcatgtattttatatacattaattatgtaaaaataaaataaaattatatagatattttaatttgtccccctaaattatttcctttacatcccccctccccccaaacttcattttatccctctgtcaatgagtatgatatgacttacttcagtgtcgtagcgccttggtactcaaacattggctcgagatattttctcttcccattcttaccctgaaaaaatagaaacaccttccgtccttgaactagagaaatgttaaggggcatttttcctgggagtatgacatgggttacttcaacgtcgtagcgtcttggtatttcaaacattagcttgagacatacaggagcaccttgcgtacttgaattggtaaccatttttccgctaatctagcctcctttgacccttaggaccaacaaggggtagtgtaggaatattcatctattttccatcggctacgcctttggccttgactcaccctctgtggacatgcagaggaactcttaggttttcaaggcatttgattcttatatgaattttatttatccaacttatttttatgtcattttttttgaaaattttattttggatttaaagtaaagacaattttttttttttttttaatttatccacgataggctccatttaaataaggatcatatattttcagtaatttttttatttgtattttcattatataatttaaggtgtcaagcatcacaagaagttacatactattattagtgtaatttcatattaagtttcacatattttaatttaataaataatataaaaaacatctaaccacacacaacacacaatgagccacaagtgcctaaaagcaatgttgatatgactgcataatggctagtatatcaactttaaggaaaaacattttaggataagtctattgtgcaccactctaaaaggatatttcggtatactaaatcgtgtatgttatagttatgtaggactacttgtaaattttttaaaatttttgaataatttaaaatgacaaaaataaaatttacatattttgttgcacacgcgactatttttcttatatgcgtggtaagtaactttttacaccttattttcgatactgtaaactattcaaatttataagtggccttaaataactatagcctatgcaatcatgaaaaaaatagactaaaaaattctcctaaatgccgaaacagataaaagatctaccaaaacgatcttttaaggggttcgactacataaatttctaacattttattttgattatcatttatcatattagtgccatttatttaggggattattttataaatatacaaaacttgacaaaattcttatatttttaagaatttgctatttttttttttatatatttttatggattttattttatctttttataaaattatagagcattgtttttctgttgttttcgaaaaaatattaattttggcatggttgctatggaaatgtaatgtaattctttatacaactatatagagtattgtttttctattgtttcaaaacaataaaaataacgttaaagtaatatttttcattgaaaaaacaagtaaaaacctgtaaaatgtaaattaaaaaaaaatgtataaatatatatataaagagaattattgaaaaacattattggtacctagcacacttctcagtgttatactgatattagtgtaattaagtatcaagtctaaaataacattaaaaaaatattattaaccaattataaaatactacctataaacaatattttgtaactagtatcaattacaatgcttatattaaaaaaaaggacattataaagtgtaatgtgtaaattacccgttatttagctctattgccttttccatttggattttgtgatccctatttggaaatttaaccaaccagtctttcattagtcaacagcagcaagcataataataataataataataatagattagttttcggtgaaaatatatgtttttaaatattattgtaagttaataatttttttaaaacttattattattattattattttaaaataattttccatccattccattccatcttacaattttataaagaattattatataaaatttattcacaaaaaaaaaaaaaaaattatctaaaattactatgcacacatggaaaaagaaaactataaatacttaataaatattgaaattcaaattcaaaccttctctacataggattagtctctctctctacgttggatcatatagagcacaaaccacaaaggtgtggctatgccttgaagcttcaaccaataacccacacacaccttcaaaaccatacatttcttcatataaatatgaaatgcttcaatttcacagcctccagggactggttataccgccactccttcaccgccgccggaatgcgctccctcaccaccgatctcggcaacggcaccgtcatgcattgctgggccccaaaacaaccaacaacacgcaatcccaccgccctttcttcccggccagctctcgtcctcctccacggcttcggcgccaacgccatgtggcaatatggcgatcacctccgtcatctcacggcccgattcgacgtttacgtgccggacctcctcttcttcggcggatctcatacggaggctgcggataggagcgaggctttccaggctcggtgcgtgaagagattgttggaagaggggcacggggtgaggaggatgaggttggttgggatcagctacggtggattcgtggcgtacagtatggcggcgcagttccctgagatggttgagggattggtgttgtgctgcactggggtttgccttgaggaatcggacatggcggatgggatgtttagggttccggatttggaagaggcggcgtcgattttgttgccccaaacgcccaataagcttagggagttgatgcggttgtcctttgttaagcctgctagggttgttccctcttgttttctctccgacttcatcgacgtaagtcactttattttgtttatttatttttatgctaattattatttttaacatgtaattaaaaataacctatgaactattaagattattagattttactgttttttatatactaaactatgtttccgagactttgatatataccaaatcatgctcctccaattgaatgaaattacattgtgtaattactaagggtgcgtttggaaagccataatgtaattggatttgtgtgtaattggaggtaattacacaatttagcatgtttgcctgaccatgtaataattacactgttactgtgtaattagaagtaattgaggggttccaattacactctccaat

SEQ ID NO: 17420 - DNA, 3444 bp, Cannabis sativa
  modified_base (3333)..(3334): a, c, t, g, unknown or other
aagaaaagactaggtgtaaaaaaaaaaaaaaaaaaaaaaaaaaaaaaacacaaaaaaatttaaaaaaacaaaaaaaaaaaaaaaaacaatgtagaatcattgaaaagaatatctataaacccccaagacaatgaaattacaaccttgaaatgaaagaaagaaacttggatataaacaatcaatcaatagaagaaacacaaattcagaatatctatatcacatgaaaaggtgggatgagctttcttctatatgtaatatgttagaacatactccacctttgagtccattagaggagaaacaacaacaatacacatacaaaaatctttttgacagaagcctacttaaagaagaaaacttaaaaaacttcagccaccttgctagcaagaacacggtcccttctctcgacatatccaaacgggaaccaacccgcccttcctttgcattctccttcagcccaaccattgtttgtcacctgtcaatttatgttagaacaaatagtctttcaccattcagaatttttggaagacagaatgaatcatcagatcagataattaaagttatgactaagaaatcttaaatgcagaaaagcatctaaagcaatgttcaagtttctatctatcaacaaaccttgcgaactacgacgtagtcgccaattgacaaattaagctccacatcagattcagcttcatatgaatgcagaacctgaaacaacaaagcaacaaatttataaaatattaaacagcgttccgaattaagtacagcattgtcaaatttataaataataataacttctgacctcgcctaaaaagtaatccatgctgtttgcttgtccattaggtgtatctgatgcatatacgccattaacttcttcatatggtggaggtgggggcatagtgttgtccacagcaggggtaggagctgcttcaatccgttgcctttcagatagcatctgtcaaaaagcaatataaacattgcacaaatccataaaccgataacaaagaactattggggtacactgtaagatcagtatccacagaagcaacaactaaatggtaagacaataaaacagcatacctcgccttcaagctgatcaagtatttgaaggatcctttgatggtaggaacgctctgcttcaaccttaagccatgacatattacacagaaaaagcttcagatataatcaccgaaccaacatgttatagaaacataagtactttgacaaaagttaagtttgaaaggaaaattcttgtaccattgtaatgagtcgttggagagtcaatctctgctgttgaaattctacagcagccattgctgatgcagcttccttgcccaatattgccatgtttgacttaaggtcttccagctttgcttctgctgcttccaatttcataacactctcagaattacctggtgtttcccttgctctggtttggcgtttcaaaacttcaatagcctgtctaggtttaagaaaatggttaattacaagcaggtaagagataattgaattaatgttttcaaattgactaaacttactatgttacaaattattttttgaaaaatgaaatatcaacgttattaaatattagcatacaaaagaactctaagttcagctgaaacattatgctcaagaaccctacgaccagagtaatatcgagaattcctaactacataatgagctactcgatttgatgatcgtctaataaaatataaactaacattattcaaagaaaataataaaacttgacaatcatgagtaatcaaaccaaaaagagagtgcattgattgatcgctacgaatgattccaaaatggtccaataataatgtacattacaaaagatttctttttaagacttttgtgacatcataattttaaaatgtgggaaagacactcagaactattctttaagagctaataagttcccaactaagacatgaataagtaatggaaaggaaagtactgaatatatactaaaccaaagagatagctttgtcctagaatacctgagcttcagcttcttgtcgcagtctatcgtaccgttgagcaagatgtcgagcatcctccaatggagctcccattaccatcgctcttaaaggctcagccacctaataagaagcatataagactagattaagcacaatattgacagccttaaaaaagcatagatcaaaacatccttaccccattcccccaactaaacaaacaatagtatcagttatatagcatagattagaaaacttatcacctgtgtgccaagagctttaatcaaatttcctcgttccttctccatttgagcacgagcacgtccgtaatttagagcagctcttgataatgttgcaccacttgtacaagtgttttcagcaccatatttcctgctatcttcggacaactttgttcctgttaaacagaagtgtcaaaaaaaaaacagaatcgaaagggcaatatcctgtctcaacctctggggcaaaattgagatacaaaagagcaatgaaccactacaccatctcaccaatttcaacttgtttggacccggtaacaatatatccttccacgccacgaacaatatctctttgataatgctgttactcaaatgacaaactattaattagcaagtaaaactaaacaatcaacaacaaaacatacaagtgagatgagacagaacaacttagaaaccttgccagcacgtgtagatatgtagagcttctcgagcttctgatgttgagtaagttcagcctcatctgtaactaaattatcagaacccccatatcctccacctccaaactgtttgaaaacagcctgtagcaacattcaatttgatcattaaacagagcaaaattatgtgattccaattctacaaacaaaatccaatatacaaacacagcttcatcatccaaaaacctcttctttccattcaattcaacaatatatttcatactggcaatccaatatcgaatgccatcatattgaatcagtcttacaaaattcaaaaacctacacaaaccaccaccattaccaagatcgtcttcaaatccttacatccccattattacttttcaaaaagaaatcacattttggtaataaaaaaaacagatgcctcaggtcggatcaaacatcatcaaatgaaaataattgaaattgcaatactttgaggaaacgaattagggtttgaaaagagaaagagcacctgttgttgcctggcgacctgatcgcgaagtctactggcttgctttctgattgcgtccattgacgagccagaggagccgaaaacgaaaacttctcacagttgtacgattcttacaacaaaaccaagacagcgatatatatatatatatatanntatatatatatatgtgtgtatatagctatatatatttatagcgagagaaagagagagagggtttgaggaaagttgtgtttttttcccttttgggtgtggtattggcccca

SEQ ID NO: 17421 - DNA, 2848 bp, Cannabis sativa
ctctctctctctctcaaaataaaagtcaaatcccactcaaaaagtcaacgcatcactgaaaatccagacatggatcaagattctttcttacattttcaccatctcaaggttatatcctttttctctttctctctcccctcttccattttcatttgcattgtacctcatttgattttcttcttttgtaatgaagggttcttatattgaatactgaagcaaaaaaatggtgaagtttctgcttattattattattatctgtgttctaatatgttgtggaagtggaagcctagtgagatctgatactgaaaatcacagctataaagctggagatcctgttcctttatatgttaataaagttggtccctatcaaaatcccaggtaatctctaaaatcattcattcttgtgtatgggatttttcagtttggattgggtgatttttccttttcttattaatttctgcttctctgtcagtgaatcatacagctattttgatctaccattctgtcaaccaggttcttttttcttttcactcctcaactttttattttcctcttagggaaaaatggttgcataaataccctaatgtatgtattttgttgcaattctatactcaaaaaacttgattttttatggctttaatgctcaatgttcataaaacagttgttttattaagagtattgctattgggtactaattgtgttggtaagttattaaattaaaatgtgtggaattcgagatataattacaccaataatctttaacatttctcttttattgatgctctattaaatgcccgactcgtgtgacacttgtcaactccttattggtctaaattgattggttagagcaatgaggagcatgccttagttaatatttaacagaactaattgagcattagtaaagaagtcactatttatcaacatttggttatttgtgcttaagaaaatagagagagtttaacaaatattgaatattcatgccacttataatcctttctcttaatatatttttgcattttttatttggaacttttattacgttttttggtatattataatggcagataatttcaagaagaaaaatcgaactttgagtgagttgttgagtggagataatctcatcaaggctccatatgaacttgagtttttagttgaaaaaaggcttgaaattgcttgttccaaaaccttaacaaaggaagaagtttctcagtttagagaagcaatcaaaagaaattactacttccaaatgtactatgatgacttgccaatcttggaatctataggagagagttacaacagaggcattattactgatatggataactacacatttatacttcacacatacattcaatttgaaattcttttcaacaaggaccgagtaatcgaaatcaagattcaattcatccccggattaggaaaagacataactgaggacaaggaaaagtgtgtagactttgtttacaatgtatattggaaggaagttgacactgcatttgacaagagaatggagaagtacttagttgctccatcacggtgcaatcacatcgagttcaattggtttgcaattataaatacatgcgaatcactaatcgtcgcgattggtatccttctgaaactttactttcatgctcttaagaaggatttttctgagtaagcattgttaatccttagctatatattaatcttatgatctgtttcttgtttttgttttttcctttatgtatttttgtttttcataaatgatgactacaataggaggttgcattataaagaattgaataacaattaccaacatgaaagaagatggaagtgtattctagatgatgtatttacattaccagctcacaagtcattgcttgctgcagcacttggttctggtactcaattgtttacactgtaagtacctaaagattcttctagtctattgagctatcaacttaaacttttgaataaataggatttgttctcctcaaactatgacaattgtagaattttgcctcttgaaattttgtttattgtgaaaattgttgtaaatatctctttttgttacattctgctcatttttttaaataaatttttaatgtagtactaacatagcgttaatctagcccaatttaagagtccagacatacagtaaatgcataaatagcaatataatgatagattatgagaatatatacatacattattagagctaatgtttttatgtttaatgcaaataaattgaatttcgagtaacttaaagttgttaaatagactcttgtattgcaactatacatgtgactcatagccacgtaggaaaattgttttaaaaaaaatgagcgaaatgtaactgaagggtagtatttgcaatgatttatagtttgggggaatttttgcaatagaaaaaagttcagagagcaatactctctagtctctacaaatgtcatagttgggccatttttttttatgaaaagtactaactttttactaacaggattttttctctttgggtaagctaatatgactctgtttcaatgttcttggcaatgcatttcaagtaccatggtcattctcatacttggggtaattggtatgttttatccgtacaaccgagtacccttattgactgcattgataattacatacacaataacttctagtgttgctggatacactgcaacttcagtttactgttattttggaggaacaaactgggtatgtgatgtgatgtgtgttgttcttgatctacacaatggtgatttttacgagtatgattctgtgtactgattccttttccaatatttttgatttgttattatgacagttgaggaatttactcctaacaggatgcctttttactgga

SEQ ID NO: 17422 - DNA, 2620 bp, Cannabis sativa
  modified_base (1757)..(1757): a, c, t, g, unknown or other
agttatgtaaaaaaatatatttttaataaatattaaaaagtaattagtttaaaataactgatccaatctgcacttttatggattagattggatttgagttaatatatgaattggattgaatccaaaatattaaatccgcacttagtgcagatcaaatgtattatgagcaaaatagtacatattagattggatgaacacctctaaataaaatattatatttctgcagttggttgaaagacggtagaaagtatttggtattgcttcatgacaaaaatgtgaggatagatttgattttatataagattatattatttaaataatcatttggtatgcctttgtttattaatactgctaattattttttaagatatataattaagtatttaaatttaaatgtaaaattcattattgtggtttggttatattcataaaattaatattaattaaaattaaatttgagtccagacaattacaagatatatcaaattattatgatacataattttttaggaaagatgtatccattaaagaacaaaaaccaatcttcaggaaacaaaataaagatggaaattattgcttttccacaaagcttcttgatttaagcctaaagctttcttagctagatgatgagctgctttattagcccctctaagaatttagctataattaattttagggagacaagatagtaaactttgaatctccaagataaatttattcagatagagattgtgagaatcattgctacacatatagttaacaagtattttacaatctgattcaatgcaatccgattgaataaaatgatgtcgacaccaagtgagagcatggtgcaaggcgtgtacttgcattatcaaaggcaaatggatgccgctccaaggcattgtcaaagtcaagaatacttccctgttattgttgtgaatagccatgccaaaacccattttgttgtttgttgtatcttgggtagcgttcacatgagcctgagtttgtatgttggtggttgtgattcactatgtgttggctacagtgaggatgtaggaagaatagttgaaagggaactgttatggtgctggtattggtccaagtaatcttcaactcactgtagtacattcatgggcactagaaccaaaccgtggtgcaaaagttcattcctgcaattctataattgttaaatcaaacaaacaaaaaactgaaagttgctagctgtgaaggtgctagcagctaggtaagtaaattcatacaattgagaaatgcatgtttttcaataaaaacaaaaaagttatttaattctcatagctgttggacaattgaacacctgaaaagagcatgaataggatctcatcgtggtagtggcagcagaaacaacttggtgaagataaagtccttcacttatatagattgtgactggttggaagaatatcatggtaagcttgccaaaaaaaaaatatttaattttgggaggagttaaattgcttccaccatgcttggtaagattgccaatttggtaagattttgactgcttgagttcacatctgcttccgccatccttgagtagacatggtattccattatatttacttattgtaagtgaatatgtgttgggaatacttattgcaattagccacactattttttctctttgtatgtcaaaaatgggaaacttatcaaataccacaatatgcaatatcaaagatcaaccaaagcaccacaagcaatataaaatacacaaatcaagaataaaagtgagacaccaaganttttacgtggaaacccaatgcggaaaaaaaccacgtgaccgtagtccgctcaaatcatccactatcaccaaagtttaataatgggattacaaagttcttctctagcaaaactagaggttcacaacaacatcaagattaaacaatcttggatcaccaatacaagcatcaccatcattatctcaaaagatggatacacaaaagaaaagtttgggtctcaccaagtgggtattgtagaagagcaccttggagaggacaatcgccaaatcggaatcggtagatttgaagcaccttgcaaggattcaccacccagaatttgagctaaaatggatgagaatccaccacttgatcttcaaagcaaaatggcaaaacgcctttctctctctagctttctttctctcctttccttctctttttctttctttttctttttggctaccttgctgctcacgaagcacactcccatgcttgctgccatttctttttcttcttttaattgaatcaaacaaatgggccttaagcccttattggtccaagcccaacaaaaggggcggacccaaaaaatctcccccttcgcctcagttggtgggctctactaagcccgctcttctcctacaagctttaagcttctctttaggcaaagtctttgtcaacatattagaaccattctcactggtatgcaccttttctaagtgcaattctttcatctcaagtacatcacgaatccaatgatatctaacatcaatatgcttggatcttgaatgaaaagttgaattcttagagaggtgaatggcactctgactgtcacagtagacaatgtatctttcttgttgcaagcccaactcttgtaggaactttttcatcca

SEQ ID NO: 17423 - DNA, 1924 bp, Cannabis sativa
ttaatgatttattttactttttttaagtataagtattgattttctctattcacttatgtacatagttatatgtctaaaccggtcgttttgcaactgacaccgttctttgtttatgtcgttttttgaaaaccttgtcgattagtacatgctgtcattatttatttatgtcgtttcataataaccttgtcgttttgtataatgcttttggtattgtcgtttgatagaagccttgtcgtttcgtctatgttggtaggccaccagctaagtatattcagtaatatatatgcaatttgttgtaccacttaatcctcttccaacttttaatttcgctatgaaccaaaaacaatcctcattatttaaaaaaagaaagaaaaaaagaaacaatcctcatcaacttcaatcccaaaatttttacagagttaattagatttgatagaaaataacgtgagatgttttttagccatttatatatatgtacatatacccatataataaaaagtaagagtattggggaacaagcttaatcaagacgaaacagttactgtttggaaaaatgaatcgaacaaatttaaaataatattataaaacaaaaaagtgatcacataaatatatccatagttaaataaggttttcttgagcgtaatgaagattcatatctatcccaaacgatgcgaattataccctttatagacatctaagctttaaatataattctaaactaaacaaattgcaaattgagattaagttttgattttttattgggatttatttgaggtcggaaaaaggtcgctaataattatacttgtatatacggtatcaaaacactccgtacatgactatatatgacttgaagggaataattaatactcttcaatcttcatgcgcctaccaaacactattgaaaagagcccatatatatttattataatttttatgatataaatcctcttagctagcccccacaagcttattcacatctgaactaataattttgttctataattgttttgtttgttctataaaaaaaataaaagaaaaggaaaacactactttttttgtaacacaatatatgtgtttgaaattgccacctcaagcctcatttggtgggtaaagaaactaaaactcattattctattcatagtagaggtgagcactagattttgagcaccacataatttatggctttaataagtcttgtaactccttctaagtggcctaaaaagcatgaaactccaaagcccctttgccactttacctttaatatgcactataatgctgaaaaaaaataaagagacaatatgcagtactactatgacttttccagttttatacgtatcaatcaatattatatattacatatatataaaaaaacaaaaaattaacttgaaatgtgtacatagatgcatagaacttctcctcccctctctcttttttttttgtgggtataaaatgtgaaagttatttaccgttcttgtcagccgccgaatatcgtgtttatgtggaaaaaaaattgtaatgaagagttagttacctaccttcatacaaagaaagaagcataggcgccagtggtgaaaagcacattttacttttatagatatttttacattttcagactgtataataaataattatatttatcacatatgggaaaaagagtatgtgcatgcatggcacatatatgtctgagtctgactcttatggagtaattgtttgtatggagttaatgccaagtgtcacaagtgaattggtctcatgactgatatatggtttgttgtacttttaattaatgatgagtaccaaaaatatcaagagagaaattaattttatgtgttgtgttctgacttctggggcctatgtgggagagagagagagatgattattgttaagtgagaaaagctacaataattgagcactactattcgtc

SEQ ID NO: 17424 - DNA, 8279 bp, Cannabis sativa
tatattcccattaattatcattaattaaaaataatgcataacaattatgtaacaaaattaaaacttaaccaaaaaatttcaacttccgttgtagtctagttggtcaggatattcggctctcacccgaaagacccgggttcaagtcccggcaacggaatttttaagttctatattttttgcaaaacatttcaggggcccaccatagacgatggaccgtaattttggtgtatcgaaaagcaaagatccgcaaaatcacttcaccgaggcgggaattggaaggctctcactaagaagactcagtttcacactcactctctctctcgctctcgctctcctggaaaatggctgccatggcggaagacacgacaaggcagaaggaagaattagatggattaccagtggaagaggaagacgacgagcacggttccaaggagagggtggtacagaagtactttctcttagaatgggagctcgttaaatccctcttaaacgggattgtttccgaaggacgtgtctctgatccctccattcctcataagatccgatccattgtactctctctctctctctctctctctctctctctctagattgttctgtttgcattgtcattgtcagtgtcggacctaaatttacttactttgaactgaaatggcttcggtattggtgttattggtttagcatcagtaacgggatagagttctaaaatttgtgcttagatccattcacataatgtttttgttcaaagtaaaattcagaatttatttatatgggtaaacggtgtagaaaaattaatctaaacgcttttagatagtcagtttctgttcatatcgtttatcaatggaaacaagtaaacaatttcaatctcaatcatgaagtaaatgctcaaactttgcatttcagaatgaagactactattagtctgataacatgaaactaaaaatttgattactttaagcctgaagattatgcaacgtgttgaaaagtttgattttttaaatgcagatggacaagtatcaagaacaggggcagctactggagccttacttggaaaccatagtttcccctctgatgtttattgtccgttctaaaacgattgagctaggtgtagcttctgacgaaatttttgaagttattaagccaatatgcatcattctttattctctggtcactgtctgtggatacaaggctgtaatcaggttctttccccatcaagtttcggacttggagctagctgtctctctcttggagaagtgtcattatacaaaatctgtgtcgtctctccggcaggaaagtacaggagaaatggaagctaaatgtgtaatgcttttgtggctctcaatactggtcttggttccatttgatatctccagtgttgatacgagtataacaagtaacactaatcttggtgaacatgagccagctcctttggttttgaagattataggattttccaaggattatttggcaaatgcaggccctatgcgctctatatctgctcttgtactctctaaacttctaacacgtccagatatgccaaaggccttttccaggtttcataaattgttctcattttcatgcttacttaatggctgataaattgataatattgattgcccctttaattttattttgaatcattgtcacaattatttataggtttctttaaacaggtgtcactttattcttagaataattcttttctcccctcaaaatctagtgaagtgacacatttcacatgttgatgtcagtttaatagctagtttctatgaaataatgcggtctctttaatgtctaaatctatgattacatgcttgcttgtgttacaactatttttcatactgcttcgacttacttttcctatttgataatttcttcttcagttttgttgattggacacatgaagtcctatcttctgtcgtagatgatgccatggatcacttccggttacttggagttgtagaagcacttactgccatttttaaggtatgagttttggatggagtatcattttattattaaatatttccttgttgtttccagtagaagcacttatggatacatctttctttaaataaacatatcgttaatagtcttttctaccccatttgaatttcaacaaaattttcttatcatagtgctgtttggtaactgccttaataccttagcttctgtatatcttatgtatgatctgtaatagacagagtggtggacggaacctcttgcttgatgtagttgctaaagtttgggatgacacagcattattgatcaagtcaagttatgcagcacggagtcctttgcttcgcaaatatttgatgaagttaactcagcggattgggtttatttgtctccctcatcgtataccttcatggcgttatgtggttagagatgttaaatctttgtttgctttctatacttcatatttcccaaagaattattctgtttccatcccaaattttaatatgtttgaattgaaacgcagagcaaaaccacctcattaggagaaaatgtatctctctctgcatccagggaaagtgatcaacacagttatggcacgaacgttgttgattgcggctctgataaaacttccagctgcctgcaggatgaagatatagatgttccagaaattgttgaagaaatcattgagatgttacttactggtttaagagacacagtatgtctattgggctaggccttgttaagagcttggttacttccttataaggctaaaataagtatttatgttctgtcacaaattcaataggacatttttcttctgacgctttattatattttttaaattttagttgtgttgctggttgtctctgagaagtgcttatctatgatataaaattaacgttaaactccacatgaactatatatatgagtttgctgttgttggttatgtgatgcaggatactgtagtgcgttggtctgctgcaaaaggtataggccgtattacttcacgtcttacatctgccctctcagaggaggtgctctcatctgtcttggagctattttcacctggcgaggtacccttatgcatttgtactataaataatttgttatatgattctacctagtttttctgtaaaatggcttaagttgccaacttcataccatgaatttgtcctctcatgtcaaattccagggtgatggttcttggcatggaggttgcttagctttggctgaattggctcgtagaggattgctgttgccagttagtcttccgaatgtcgtacctgttgttgcgaaggttacattgaaaagtttttcatctctatacatctgtagaagttagtgtactgtactatgtttataaccttatttggaaccatgttgaaataagtttgtattttttttttgagattgtataacttatcttcaaaacaatgtatctactcataattctttaatttcattaggcttgagtatttggatgttgcttgatagatataagcactgatgatggataaatctttaaaacaggcactgcattatgatatacgaaggggtccacatagtgttggttctcatgtacgcgatgctgctgcttatgtttgttgggcttttggtcgtgcatattatcactcagatatgaggaacatattggaccaacttgctccgcatcttttgacggtggcttgctatgaccgtgaggtgcaattttatttatttatttaagtatggatttagatgctacttaaatatcacctgtgtgaagtttctgagctatgatgtcaggttaactgtcgaagagcagcagcagcagcttttcaggagaatgttggaagacaagggaattacccacatggcattgacattgtgaacacagcagattatttttcactttcttctcgagtacactcctacactcatgttgctgtgtttattgctcaatttgagggttatctttatccgtttgcagaggagcttctatataacaagatctgtcactgggtaagctcctactttgttttattattattattgttgttattttaactaaagatatatttctgcctagttttctttttttattattatttgtttttggaaattttaagaacagttgccctaatttcatcaggataaaggtttgagagaacttgcagcagaggctctttctgctcttgtcaagtatgacccagtgtattttgcggactctgttttggaaacactaattccttgtactctttcatctgacttgtgcatgcgccatggggcaacattggccgttggggaacttgttttggcactacatcaatgtgattacgcgctttcttctggtgagtgatcttgccttctttgaactgtttaagaatatgcttggaagtaactgtgcaatactaccctagtaatattttaaaattcaatgtgtttggatgtcaagtagtaattgcatatgaattcttattttcatatttggcaaatgagttggtagttataatattaattagccaaaaaatggtaatattttgtaattacaccccattctcatgggtgaccatgagaatttgagtgtaactgagacccctcaaattcaattacctccaattacatgggtacagtataattatctagctgaacaaacacaccaaaccttgtagttacttcgacttacactcaattccaattacatagtgtctttccaaatgcgccctaaatgtttagacgaacttggagaatttataattggtatcacagttacaatttgggtctttgaagtttcagtttgtgagttaaggtgaggtattcttccattatgtgtgttaggaagttagaattcaaagcgctaaaaccgtgttagaataccagttcttgtcatgactagaatacattgtattcttgaaatttgtcaaattttaaagtcactagaaatgtatcgtcttgtatcgtttgaccttgttccccttgtgatgcacaaaccaaaagttctaaattgtgattttactcaacttgtcttgttcagaaaaacaaaaacgtgttgctgctgttgttcctgctattgagaaagcacgcttatatcgtggaaagggtggagagataatgcgtttagctgtttcacgattcattgaatgtatatctttagttcgtttgtcattaacagaaaagataaaacggagtttgcttgagactctaaacgaaaatttgaggcatcctaattctcagattcaggtgctttttcttatccccaagttgttcattaatgtcataaacaagtttgctaatctggttttttcacatataatatacattgtataggatgctgctgttaaagctctgaaagagtttgttctagcatacttagttgctcatgacgtcggaggtactagtgatataacgtctaagtatcttctattgttggctgatcaaaatgttgctgtgagaagaggatcagctttggcaataggtgttttgccatatgaactattggccaagaggtggagggatgtccttacaaagctctgtagctgttgtgcaattgaggtgtgttgaagtttaatcatcttaaaagttttctcctttccatgcgcaaattgttgattatcataattggatcatttttgcaggataatcctgatgatagagatgctgaagcacgagtaaatgctgtgaaaggacttgtatcagtttgtgaaaaattaactcaagatcaaaatagtgatggtagtagacctctagaggaggattatatggatttgatactgctgataaaaaatgaagtgatgacgagtctattgaaagctcttgatgattattctgttgataacagaggtgatgtgggctcttgggttcgtgaggctgccatggatggccttgagagatgtacttacatactttgtaatagagcttcagttggtttaactgaaatttcaggtgaagttgagccttcatcagagcttcataacagtgatctggtcgagaataatcagtcaacttcaattttcgatgctaaccttgcaactactgttgttgggggaatatgcaagcaagctgttgaaaaaatggacaaactaagagaagtggctgctatggttcttcagaggattttgtattgtaagatagtttatatcccacatataccttacagggaaaagctggaaggaattgttcctgagaaaaccgacttgaaatggactgtgagtgaatatgctatttatcagtattttggaatgtaattgacttctttaagttagcaaaaacaaaacatttatacttgattgattcattgtttgtaggtaccctctttttcatatccacgcttcgtacaattgcttcagttcagctgttatagcaggttagtactgtctggtctagtaatctctattggtggcttgcaagaatctttgaggaagtcatctctgtcagcattgttggactatcttcaagctgttgaaattggaaacgaggatgagagaaagtctagagaatatatgctatcaaccgacatgctttgggtactccagaattacaggaagtgtgacagggtcattatacctacattaaaggtatattcatataaactccgcttaaatataaaactatacttcttgtgaaatgttctgattttgacaatattctgttctgtattgcagaccattgaaattctcttcagtaataagatatttctgaatatggaggttggttgttctttttatttattttccttctcctaagtcctaactatactattacatatgtgccggtatttatttctattcttttattgcctggatattaatttcaatccacaggctcacaccacggtctttcttgctggtgtgttggattctctggaagctgaattaaagggatcaagagacttctccaagttatatgcaggaatcgcaatacttggatatgtagcttctactttggaaagccccggaaatgttcaggctttctctcatcttctcagcttcttaggtcaccggtaccctaaggtcagtaatactcccaatatacgactacggctaataagatgaattactttctgcccctgtatgagaatcggtattaacatgtcaccccgattaagttacctccattcttgctctcaactctttgccattgatactggcaaaaatggtctttactttttcactttccatccctgtattgcaatgtagtggcttacgctattattttatttgcgtttacattctgattattattttttggtatcaatctagataaggaaagctgctgctgaacaagtataccttgtgctcctgcaaaatggggatcttgtgaatgagaacaagatcgagaaggctcttgaaataatatcagaaacgtgttgggatggtgacttagaagcatcaaggcttgaaaggttacaattgtatgatatggccggtcttgatgctgagctgcttcgaaaattgagtggagtacctaaaaagaacagggagaggaagcccacagcgtctgatgaaaatgcatcatattcttcgttagtagggtcttctgggttttaatttccccatttttggcgtgatcgtttgttccctttgattatttcaccttaaatttatgcataccacttgaggaggaaatctgaattattggtaacttagtagtgctatcttatgcttttgaagcataatagttgtgagaaagatgaaaaaacagaaaattagggaatgatgataggaatgtccgagtcaaaatttggagtccaacttcgattattttaatataatgaaacatgtgtccttgagttcaggagtacgaggacatttgaattttgaaaatgtgcataaaccaccattccaatttaattttctaagtgctaaatgtgttgaacagttttctttaaagtaaaatttatttttctcgttactttcctaaatgtgtggaatgtgttgcatcatcattcgtctgtttttgttttttcacatcctcaatatgcagaataatattattattttaaataattaatgttatttctttgtacgattactaatctagtgaaacatgaaaataagaattagattactactctaataattatacttacttccaaagacacttttgtcatctcatttcttttctattttaaatatgagtaatgatatatgcacatataaattatacacaaaaatatatataaatagggtgattggttaaaattacttgtcacataagatcatctctaatgaaagatgtaaagtttagctccaatgaaagatgtaaagtttattctaaatttgactcaaaaaataaagggataattacataaggcactaattttttttgtaaaaaaattatat

SEQ ID NO: 17425 - DNA, 2450 bp, Cannabis sativa
ttttttttttttttttttgatgcacataatccaggtgtatgacttttactttctgcaggactatatacgattcattaattatctgttgatgtaaaatagatactgtatgcataataataataataataatggtgatgattcacacttccatattaactacaaagagccataagatgatggccttcacaactattctgaacaaagttaataagcaattaattgagtgatgtttaccgcaaaaaataaaaaataacgagttcagcaaaattgattataaaggagaaccactttcaaagataatgttgctagcatcagtatcacgaaagaaatgcgatcgtattttaaaatccacaagttccaaccatagaaatgatacaatctatctcattataataatatccaatttaaatcaaaggaacaattagccataaatattttgttgtttcactccatattcctcctccttcctttgaggacatgaagatagaacaaaatcaaaccaaaccaatcaacaatcagtaagtacgcttgggatgatgttgaacgccagcatgaaatccttctgtataggcagcgttcttgaatgtcgtctgcagtcatcaaattacagcataaattatatgataaattattcaaatattatatttgtatagaaaaatcaatttccctacaggcgagagtgggaaaacagcaaataaaattgagcttgcattatgtgtacaaaatattttgattaacttaacaaaatgtgatatgcaaaacaacagtttaatacaacaattaacaaaaatatatggtacacatctacaggcgagagtgggaaacggcaaataaaattgagcttggattggatgtaaatattttgataacttaacaaaatgtgatatgcaaaacaacagtttaatacaacaatttacaaaaatatatggtacacatttaaataagttggagcaatttggtaattcctggagtgatttgggcaagtcaaggtcaaaaactaggaggatctgctttgcgcaggcaacgcgttgcaggccttaaaacaaccttttaaaaagatctgctttgtgttgcgtgcaacgcatcacaggtcttacgacaaccttttagaacagtgataggctatgtaatgccacttcatctgacatcgaacaacacatcgcatgtcttaaagtgaacgcatcggtagttacatactgttgactccaaaagattatgttttttcaaataaaaacgcgtcttccctaaagagggttctaacaatatgtaactagcgatgcgttggcaacaatatgtaactagtgatatgttagaataatttggcaatttttgaggtgatttagacaagtcaaggaggtcaaaaacaaggggacctgcattgcccaaaggggaggcattgcagaccttcaaatgatttttctaaacagtgtggcaacacacgacaccactaaaagtagtgacgcagaggaagtcctatatttttggttccaaaaattgcattttttgaattaaacatgagacttgcttaagggactactaaaattatttaaaggcttagctacatagattaggcatacagttattccaaccattttagatcttcaagatcaactagtttcgccaagaaattaaaaaaaaattgttcttaaaaaaatttaaagacttgtctcatcccaattcttatttcctagtgaggatccgcaagtattctctttggtaatttttcaacttggtcaagcctctctagttttctttcatatttttgtgaatattgttcatttccttagttttgagtattcatctcctctgattcaatcctcaaccccagcacaacagtaattaagccccaacaacaaaataaaagtttatatcgtaagaaggtaagaagagaagagctttccattcattgtgacaaatttatataattaaaaaattcatgaatatactcacggttgtgctgttcaactctgaaataagtctgcttttaacattattggatactactgttcccagctgttctccgtgttgcttaatactctcctccgaaatctgtatgatatgaactcatgagcccaatggtacagctaaattaggaaaaaaaaattactattcagctacctcggtgagcaatagcgcagatgttttatccaatatctcttcaacaaatctgttgacattagctatatagcaaggggggtttactcctttgactggcttattttttgcattttgcggattgactgatggctttgacaccttatctgcattttcaagaaaaaaaaaatgagaaaaaaagctttatcagttcatacagtagaaacttcatgatataattgtgcctgaaagtacaaacttaatcacttggcaaggcaagaagctatgacccataaagcatcaacctctgtaccacctaaatatgagttttctcttatctattttttttttttttt

SEQ ID NO: 17426 - DNA, 4440 bp, Cannabis sativa
aaaaaaaaaaaaaagtaaaaactgcaccgtacacaactaacttttgaggtgcggtttctgcgattttttaattttacggtgcgggtgcggttcgagaaattgaaaaaatcacatgggttaatttaaaaaaatagtacccgaatcccaaaaacccaacccatccaaatccaaatccgtgcgtgccgacggtgagatgggactccaagccaaaactcagatgcgacaacatcgtgccaacggtaagatattgttttgggtgggtttctcactcttttcaccaaccatcttctgtcagtaactcatcagcgcctaacctcgttcacttactgatcggagacgaggatagacaattacttcactcaaaggtatgccctttcatctatgtttctctttgcttctatggttgtgtgttttgttctgaaaaatagtttacaaagaagaagataagttagtggtttataaatatactgatttgaatccaaattgagttctcttgttgaaacatagaaagaaacgattgaaactatatctggttgtttgatttttctaagccattctctctattctactttggcattctagctctttttacagggatatgattttttttttcccttctttctaagatttttatcccgtttagctactaagagatagtgttcaaatttaaaatgcaagatcaaatcgttttctcttttgctaaatcaacaagtaatgacctctaattaatctttttcatacttatcctaatgcttgtttcaaaataagtgaacttttacaatcttttattagtaaattataaaacttttatcaatcaattctctgctatatgtactataattctctgctattttagtttgtccttctaagcacgagtgggaaggaaatattttctaattctgcttgtctacattccatcttttcagttaactgaattatatcagttgtaatttagattaattaaatcatattgagaaaattattattgacaaacacactcaacacttaattgtttggtaaacatttaggggtttttgttttgttttggttcccaatctcttttgctcctttggggaaagtaagttttggtgtttttgttagaaatggataaatcactatctaacaacttcaactatgcatttttaatgtgaattaatgcagatgtagatagagatttgatctgtgtatggaggaggtctagtagaatatcaatttcagcatcacttgattagtgtccccttctgacgtcaacatgttcaagcaactcctacccggtaaacttggattaaacggtctcataaagcattttaaaggtaacttcaaacccaatttaccacgttcatagaatggaccgtgtttcaattatatggtaactgttcacttattgccctttaaaaagaaaaaagagagaatatgatgcataattccttgactgattgcattgagattgataaattagcagctttcttttgaggggtgtccaacttgaatctttatagattctatgaacattggagtcactttaattgtttgagattagaagagtggatttgttcaatgtcttcagtaaacattagattgattagatggacgttattgccttagccagtttcctgatagttttctttctttgaatcttcatgcagtgtcccattttgctttcctgcattcttctgcaaatgtaaaagtggaagttcattctcaggagcaagaagttgtgatcgctttaggtagcaatgtgggtgacaggctgcataattttgacgaagccttgcgcttaatgagaatatcgggcatagatgctgtaagacatggttgtttatatgaaactgcaccagcctatgtgactgatcaaccacactttctcaattctgctattagagcttttactaaacttggacctcatgagctattgggagcacttaagaaaattgaaagggacatgggtcgtactgatggtataaggtatggaccaaggccaattgatttagacatattgttctatggaaagcttaggttcaactctgatattcttaccatcccacatgaaagaatttgggaaaggccatttgtaatagccccagtgttggatttgctgggatcagctgttgagaacgatacagttgcttgctggcactcttttgctactcatgctaatgatctttttgaaacttggaagaaactgggtggtgactctctaattgggaaagaaggtatgaagagggttttgcccattaataaagttttgtgggactggtcacaaaaaacctcagttatgggtatccttaatctaacaccagatagttttagtgatggaggaaagtttcaatctattggggaagcagtctctcaagtccgcttgatgatttccgaaggtgcagatatgattgacattggtgcacaatctacccgcccaatggctactctgatatcacccgaagaagaaatgtccagattaatccctgttttagaagccattctcgaaatgcctgaagtagaaggaaaacttgtctctgtggatacgttctactcagaagttgcttcagaagcagttggcaaaggggctcatattatcaatgatgtatcttctgggcagatagattctaacatgtttaaggttgttgcagatcttaaggtaccttatattgcaatgcacatgagaggggacccatcaactatgcagagtagtgaaaacttgcagtatgataatgtttgcaaccaggttgcctctgaattgtacttaaggctaagagatgctgaagtatctggtatcccagcttggaggataatcattgaccccggcattggattctcaaagaatactgaacaaaatttggatattcttattgaactctcgaacattcgaacagaaattgcaaagaaaagtttagccttgtctcatgcacctatacttataggaccttctaggaagaagtttttaggtgaaatatgttctcgctctgctgcagttgatcgtgatcctgccactgttgcttctgtcactgctggagttttggctggtgctaacattgtgagagtacataatgtgaaagataatctagatgctgtgaagttatgtgatgcaattttgagacggaagaaatcaattgtgtaagattaggagataaacttgtgcaatctttttctaatgcaaaaaacatgcttatttttggagaggattttgcactggactgagatttttttgggtcaaagttggcatttgatgatcagaatgtattattttgtgtactgtattttttgcaatttactgagaaaaagtcgaaatttcttcacatttacactatgtttggtaggagggaaaagtggagagatggagaggagaggaaagaggtgtgaggagatgataaatccctttgtttgttaagagagattgaaagaaaggagaggtgggaggattgaaaatccattcaaacctctaaattacaatccttccattaatagaagaattggagctctctcttcaaatattatcaagttataaaaagttattaatatattaaaacaatacaaaaataaattataaaatataaaagactattttttattgaaagagaatttgaaatactattaaaataatatattaaatttcgtcgagatataattcgttttcttcctatttaatatagggagttttatatgtactttaaaaattgataaagatatttattttaataattttttatctcagataaaatataatatatttttttaaaaaattcttgcttttcacattcatgaaaaatgtactcataaaatattattttattttaattaatataataaaaaaatatatgaaattttattaaaaaaataaaagtaaaattaaaataagtactgaaaataatacaaaatattgtgaaaaataaaatatttaaaatattaagagtaattttttaaaattattttaagtttatttttttaatattaaagtgcacttgtaattttgtgaggtgcaaataaaatacatcatttaatattcgaaagcaaaaataactttcatccctacccatttctcatttaaggaaaccccgcctcaatatgggcgtgtccccataaatctccatgtacaaaagagtagaagtggttgttcttcccggtcaattttcaacctaaactcatatactattcccaatggactctttcattagtatgagaagggaagaaagagagagtgaagaagaaagaatcttgtttatattatttttaaagtaatttctggtaacaatacttaagttatcttttagaaatttccgtaaatacttgactgttaagtgtcaagtcattatccacgtaccattttcttataaattataacttacgtattattaccgttaaaaattaaacttagatatttatttgcaattgggagttaaatttagaagtttttgcaccagggaacctaattttgcacttatttac

SEQ ID NO: 17427 - DNA, 3213 bp, Cannabis sativa
  modified_base (37)..(44): a, c, t, g, unknown or other
ctaaattagctagtgacaacttgtgtctaaatgctannnnnnnntcacaaataattttttgttgtgattaaaaatcatatttagtcacaaaaaatttatgttgtgactaaaaagttgtaatagcagttttttgtagtggacgtttagagagagggaaagaaactaagaaagattatgtaattaatttattattaaaagaaattaattacattgtggtttcatatacaatcatctactgaaattagctaagataagttgaactaaaaataattagctagctcaacaagcttaacaactaactaaccgaaatgtacaacttatcatgactaactaattaactctctgtactactcatagtcttaggtgttggaactacgcgaatcaggctagatttctattctgaaagatgaatggcaataaagtcaatatatagggagtttcaatttctccatatctcattatataaaataattagatcaacaatgtatatgtttaactatttaattagaatactttttaaatttaacaataaatattacatttataagaaactagccccaaaagatgagatgttcataaagagaaatatacaatattttttaattgtcattctgatttcgatttgtgtttcaaaaacagaagacagactcaaactcatattaattagtgggactcaattattataccacaagcaatatatatcctatttataaataattaatgtacatgtatatctatattattatacatattttgagagctagtatctctctctctctctctagtgtgaatggaacataattcacaattcatgcatgtgcttttgccttattatttattgcaaccagataggtttctattattactaaatatcaatcgatcttggttgattcaactgttccatgttagcttaatgattacataactaggttagagtaataataatgtactaatcatttgaaacattcaattatttatacatataatgtatatattaaatatatgtgtgtcacgatctgtacataatttataattaatagatattaattataacgattaaatttctactctcttctaattcttttttttttttggggagagaatagagaataaatttctagttgatctagagggattggttatatagaactacactttataaaatatcttatattatttacacagttatgatttgttcttatatgtgaaataatttatatatgtaaaattatatatacgggcatgtgaatcttttattcataagtatatatattatacttgagaaagccacacccgttaaacgaaattccatctctaatgcaaaaagtagctaagacattaattaataaagtgattttaattaatgaattatatagtcttaacttgtttgtcattctttttgtaaattagtgaatatccctaaatagtcggcatatgtattagtggtgaaaccgcggaggagaacaactaataattaatgttaattattaattaattgtaattgtaatatatataatataaatgcactcactaataaaatcgatcgatcgaagaatactggagagagagagagagaagatggagtgcattagtagtaatggaaattataatgtggtggagggttttgttgattaatcaatgtgataattgaggttagacacaatagattattaattatatatatatttcctgaccgtggcatgtgtgtgcactaataacaaaatagtaacctgccgacctttgtacttttaattaaaaatatatagtacatatttatattttcttaattgtgatctctactgtagtgataattaaataattaattaggtccgaaggaagcttaacgaagctaaaaagagagagaatataatatgtaattacatattgaaaaactctttttaaaaaaaaaattaattaatataatataatgcgcactgatatatatatttatatatagagatgtagtactagctataacgatctagggatttctacagaagttagttgttttattaatttagagtgcaattattttttatatatatatatatatatcgtttggctgtaaatgtatgaccagttttagtcatcgtgactaggttataaacaaaagtattaattagttaattaattctatgatcagaaatcactcacatacaaatattaatatgtattcattcataagattggaaagtatgtgatcatcatctacatcactagataaatgaacacgtagatgggtttattagaatgtttgattgatgagattaatcatgacaattgtccaataaagagatcgtgctctatcaaaatcatgcatagaatatgtacataaatacacacacatatatatatatattaaatatgtatatattccctcaaataaaatattcattactttagctaggtttgagggttttggggtcatccatgacatgagcttataatgagagtaatcccactaataaaataaggtatttatatatatggcaaaacatgaaagggggaggagaggatatggtggttagccccatgattgggaagttagaaagtttgttaaatactaaatgtatttttatatatatatatatgaatattattaatgcaagctgatgatgattatatttatacagactggtgaaagaaggaatctttacctacatattacataaattacaatcatatataagagggttaattaaaccaaataattgctgtgtactcaaccgtttaattaattaattatattgattaacaaatataaacttataaattcatttgggtcgtatgaagaaaatcttttatcaaagattttttcacaattaaataatcacaaaattattacagatcagatcgacatgcctttaaacggggcacctaactgtcaattgtctccaaatgaaggagtaaattattaagtattgttattagaaaaagcttcagttaaactgggtttatataattaatatatataattaagtatagtactcgacaaaacttaccatacgtttcttaaaacatatatatatatatatatttaatagtggtgtatcgtatgatgatttggcagtcaaaattaataaagcattgttaattaattaattaatctatcttttgatttggcatttctctaaatttcattaattttaaagagtataattcttgtttcattctatttttaaccacatctccgagtttttgttttgccctaat

SEQ ID NO: 17428 - DNA, 1984 bp, Cannabis sativa
tacaagtgatgaaatctacaatgctctcaaaacaataaatctagataaaagtccgggtagtgacggtatgtcagcaatgtactaccataaatattggtccattgttggagatgtggtcacctaagttgttttgggagttttgaatgatggttgtagtatggagtccattaatcacgcactcatcacacttatcctaaagatcaaggctcctcgtggtatgggtgattttcgaccgattagcctatgcattgtcatttacaaaatcatctcaaagactcttgctgtcagatttaaggctattcttccagctgtaatatctaaaactcaaagtgcttttctcttgaatcgactcatcactgacaatatccttgtggcttttgaattgatacatcacttgaaacataaaacaagggggaatagaagctactcagcgctcaaattggatatgagcaaagcatttgacagagtggagtggttctacattcaagaggttatgcgtaaaatgggattccataacaaatggatttcattgatcatgagttgtctaagttccacaagcttctcattcatgcttaatggcgaagaagtgggttatgtccaacctaccaggggtcttcggcaaggtgaccctttgtcaccatatttatttttgatttgctctgaaggcttatcgagactattacagagtgaagaatcgattcagaaccttaaaggcttacgtttgacacgtcatgccccattgatttcacatctactcttcgtggatgacagtctccttttttgtgaagctacaaacagttcggtcattgctattaaaaaggtacttgatatctatcacaaggcatcaggtcaattgttggattcaatgaagtcagttatgtccttctcacccaacaccacacaagaagcccaggattttttccatcaaacattaggcatgcctatcagtgaatgtcatgaacgttaccttggacttcttgctttttctgagtgtgataaaaagaaaatgttcagtgacgtgaaagaacgaatatggcaaaaactacatgcatggaatgagaaactcttatcagtaggtggaaaagaggtacttttgaaagcagtagttcaatcaattcctacatatgccatgagttgcttccgattgccatctactttctgtaaccaactagaattcatgatggccagtttttggtggggttctaacaaagatggttcaaagattcattggagaagttggaaattgctatgtaagtcaaaatttgaaggtggaatgggtttccgctcctttgtgcattttaacaaggcccttctagaaaagcaagcttggcgaatttttgaaatgcctaattctctgctaagtcgattgcttaaacatagatacttttcaaataaaaactttatggaagcacgatttggtcactcaccttcactcacttggcaaggaatccattggggacgtgaattactagttgaaggactacgttataagattggcaatggtttcaatgttttggctggttttgacaaatggataccgggccataatgacttcaaagcaattagctacaatggtccagataatttaaccgtggccaacttcattactgatcatagagaatggaacataccactcctaaatcaatacttccagtctattgatgtggacagaattgtcacaatacctcttagcttctttccatccaatgattgtctcatttggctactacgggctgctacacagttagtttaggctttcacttagctgagaatttggctgaggaacgtgagtctagtggttcaaactctcataggaattggtggaaaactttctggagtttaaacttaccatcaaaggttaaatttttgcatggagggtaatgcaaaatgctctacctgtagctactggtctgtgccaaaggaaagtgatagattctgcaactttctcgttgtgtaataatacgtgggaatcgatcggtcatgc

SEQ ID NO: 17429 - DNA, 5470 bp, Cannabis sativa
atagaacatatttttaaaaaatattttcacttttctaattttaaaaacaaaaaaactgattaaaaaagagttaccaaacgccaccataattttttgatcttaagtatattcttggatagagattctaagatttatagcatctgaaagccatataaaagttaaacaaagttgtattttttaaacaatttaaatgtaattacataataaaattaagtgataactatatcttgtgttattatgggatttatatgtatctatgattattcagcaaaaaataatgtatctatgattgtccgaaataacaattttgatattttctttttaattgaaagtgaaatataccccattattggccttttttttttggttactcataattaaccaaccaaataatgcaaatagaccaaaatgtagacagttatgtagccaatccaattcgaatcgaatgccaacaaacttctgttcaaatttgaccaaaaactccccccaaagcatcaaatgacatatctgacccataggcccagcccaaataggcccacaacggccgataggtccgaaccacaaataatatgagtggtttatcaggtacggatccgtaaaaccaccacagccaacgccaaaatttgggcctcatactcgaattgggcccctcatttaagtgacacccttgggggcccgaatacattattcatctaattataaaattattgggttaatcatttgatgagatcaaactgttaatttgataagacatggtttgtgtggtttaaaaatacgttctaataattgtgagtggacctatattaatctatactccatagaatgtgtattagagttggcgtggcctttatcaagcttcacacgtattgcaatctcaggctaattccaatcattttatttttccttgccaagtggccactgaccaccatcttatctagtatctactacgccttcaaaaaaggtacagtgtctagtactctcctatgtgttaatatcgttattggtacaactaagtatcgagtcccatataatttaatatattagtttttaaggaatattactagtcaatcgcaatgcgacatatcgagaaagtactaagtaccactggtacctaatagcaatgctcccttcaaaccatctcctaaaaatcatgttataattgatatagaaagcactatttatatatagaaatatttgtggcataaatagtataagtttttagttttatacatttaattattatatatatattttttcaataaattaattaccttaagttacattttcattactttagttactatttttctattaaattttatcaaacataatatatttacgacataaatacttaatattataaatttcatatacttatataccacatcatattttttcttctgtttatgttatttttattattacaagtccgttaaatctaaattaaaatgtattaagatgacacgtatcaacatttagttgtttactcatatttttaataaaattaattattaaattaaaaaataactaaataataataaaattaaaaaaataataataattaccttctatgagaagaagaaataaggaaagagatatatttataaatagtattttttatatatatttttatgaattaaataatattatttaattattttttaactttataattatttaataaatttttttattgaaaaatacctagcaaaaaaaaaaatacatttgattatgttttaataaaatttaatgaactgataatgacaaaagtaatgtaaacgtaattttaggtatttaatccactaaaataaacatgtgatatataaatgtataaaatttaaaacatatttatgccgcaaataccatatgtttgaataggatttaatagaaaagtattgatggaagtaatggaaatataacttaagatatttaatcagtcgaaaaaaataagtggaatttaagtgtataaaatcgaaaacttatgatatttatgccgaaaatatccctatgtataatatatataggatacttctacaatgcacccctaaaagaggttcatcgatgcacctcctttttatttcaacatctcagagaattttttagtccaattttttttatggtcgtctacgttgtaattatttaagatatcctgcaaaatttaagagattcagaaaaatttaacatgccgaaaatagggttcaaacagtctgttgcacgcaagactcttttattttatacgcgtgtgaaatagaatattttagccctattttcgacgtgttaaatttgtttgaatttctaaaaattttgtagaatgtcctaaataactacaacgtagacgaccatgaaaaaaattgaactaatttttttttccttaatgctgaaatagataggggtgcatcggtggaccccttttaaagggtgaattgtagaatttttcatatatatatacatatatatgtaaaaaatgaaatagaaactttattaaaatttagcatttagagtatagaagcgcttgaaaatcaatcggagcattgtgctcaagaatgctacgatcagagaaaaccaagaatgtctagctacatagtgagctactcgatttcttgatcgtctaataaaatgtaacatgacattttgtagagatgaaagtaaaagtttacaatcataaataaccaaaccataaacagaactcatagcttcaacaatctcagctgcatacaaaccttcatgatactcgacttttaagttttaaaagcattcttgaactatctcttgtcacaattctaaagccatacaacttttctttttgaaataaggctgcatcaatattgatcttgatgttgtttgtacccaattttgcccattgctcagatttaccattaatgtttccaagagataaagatgataaacaaaatttatcgtgagaacctcattatattgatcttgatttttatttagcaaactataataaatcgataaatagtatcatcatcgtagatagaaaaaacccgttgagctagctaccaagaaaaatcacaaaaaccatgttaataaatgatacatttagccaaattttgtatttgtgctctttattatttacaaggatgtaaaaatccttttcaaaaaaaaaaaaaaaaattgacgtaaaaaaaaatttaatagtaattaaatatttattgaaaatatatataaaaaaatattttcatttatcatttttctacattttatatagatacttatgataacaataaaataattaaaatgacacaataatcaatttttttttttttttgaagatacacaataatcaattaaaaagtatttaattaatagtgattcaaatatacatcataatatattttgttaattaagatgtatgagttttattttgtttgttttttattcttgttagagattttgattctgaatactatcattttcaaatatacttgtatttttttaattgacaattgtatttttttaaaaaaaaatattaaactaaaaattaattaataattaaaaaattaataaaactaatatttttttttcttttttcaaatgacatggaagcgatgattaactaaataatcaagttagcattcagttgggctcgtgtgacaaaatttaatataatgactactttataacgttgctaataattgaaaaactatttttagcgtataatagtacataagttatagtttgagggaacaaaattacttaacaaccatataaatataacaatgtttttttttaaaaaaaaaaaaaatgatttttatgtaaaagggcaatggttccaaacaaaataataaactaaactaattaatattatatctgaagttttgtcttaaaatttcatttataaaagttgtttatgtgagaggttgtggtctattttgtgtggtgatgtttatttacttggtcatgttgcttcttatttatcagctatcattgttgccttgaggaactctagttaggttaacactgggcaaaataaatatcaaaatactttaggttgtgtgatgtgttgcatcttaattgtacattgagattagtgtttatatgcacttttgatgattgatatataattcttgattagtaaaattattctctgtaaaggaaattttagagagttttcaccaaaaatatcactgacacggttgcagtgtcttctatactaaataatatcttatgtaataatcgcaagaggttactttttattttattggttttaatctgtaaatgcttattgttcccaaaaaaaagaaaaaattctagagttgcaatcactaaaaatataatatattattgtaagtgccaaaatagtaaggtatcaataatgcaaatggatcgaaactacataattatgtaggtatttaatcagatgtactatatgtttttaattttcacataataatgtatgtgtcactacattcatacacatataacactccctacttaagccatatggcttcaaaccaagatataaatgggcctcataatttaaattgacccctcgtacaacccattctatttcttgcccaaatcaagtacttaacatataatgataatgtacatgaaattaagtgacaagtgcaagtgccttgttagatgagatcaaaccgttgcatatgataaaactgccataattcatgtggttgaaacatgtattcatataattgtaagtggaccaatattggtctatatattggtcaatttttacatgatttagaagatgatgggctatactcatcaaccgtttcgggggtttaagccatgttatgttatatggtcatggtgtggctacgaatactcatccaatgagtgatacaaaaattgaggaccccattcatttgtttaattattaatatttttattgaatgttttactcaatatttaaaacgatgtatttcattacttacccctaccacctcatccacatatcatataaaaacataaaacatactcaccaatgtgggcatttttgagcctcacatactatgaatttataaaatttacatggcatactgacttttgttattttttttttcaaaaatactgccagacgatattttttatttttttactatatatttttataagtttcatacttcagtatactgtgtttatcttttaggtttttttggtttgttatagtgttgttttacggttattttccataatttatttttttaacgtcgatttcactgttcttgctccatcttgctggaattaatgattgttttctgagtgttcttatggtgttgtggtgattctatccatgggtgtggaagatggagactataaaatacatttatttttccttctctatggttattttatggctatttttttttttggttctcttaaaaatacatttgacgatctcactaaaaaaaagttttgaggtgtgtagttcttttatgtttttctaagtggttatatcagtttattgttttatatttgtttttgt

SEQ ID NO: 17430 - DNA, 6525 bp, Cannabis sativa
  modified_base (44)..(68): a, c, t, g, unknown or other
tcaggattgagatcatttgttctaggatcaactaggtgatattnnnnnnnnnnnnnnnnnnnnnnnnnttatcatatctagttcaagttcaatatcagtcccttttcaatacatactccatgccccattgtgacgcacaagattagaatttttcaacagcaatatagttcgaataactgatttgttattactttaatgaagtactttaaaaatctaaaaatacttagacaattaaaacatctcaaagtattaatatacattaatttacatatatattttcgttgtaaattttctaaaattaaatatctaatatatacatgaaaaattcattccttctctaatttaaaaaaaaaattataatcatccaaaaaattatgttgctagacaataacatagttttaataaagccgttttttcttaaaaaaaattggaaatatagctccacttcatttttttaaaaaaaaaaaaatattaaatctcaaagatttagaataataatattttaggcttttaaattttttaaaaaataattaaatattgactccatccttttatggtagctagaaagctacttctttagctgtaatattttaggttttctattaatatatatgtatgtattagagtttaaaacatttgattatatatacaattgaatgatcattatcattgtaataagtatattttttgtgatattctttttctaaaaaaaaaatattgaaaattggaaagtataatactaccttagaaagttgcacagctgaaatttcatgatccacgcctacaaataaattattaataataacaataattaaagcatggaaagccacaaaacttttcctctcatttttataattctcaaccacattttcttttcctttcacaccttcttccccattgcatagggtgtctatctcatatcactaatatagtcccttttagatgttgatatttagattcagttttattggtgttatcgtgttatgttcatatcaatatgtttatagtaaatataaatatgaataattaactaattattattcgtttcaaaatcttatgtagtactacataattttttaacaaggatataatataatacgataaaatctatttatttagtacgtcttttttaaatgtgtcgtatcgtgttataattaccaatcctaaattattgcatcctactatagtatcaatatacattagagattatgggttaaaaagttttattatattgttaatatgtagaaagttttactaattttattgttacaaataatttaaaaaaaaaaaattatacactggcttatttttttttcttataatttcatttaatgtaattaactttatttcaatgtgaatatatatgacacttattaattagcaatatcccatatataatgtcacaccacacacaatattgaagaagtcatataaggttgaccaaacttcaaagaaggaacaaaggtcaaaattttcaagagcaaattcattaatttatttaatatatcgacatcttgtggtagttattatttcgatactatcaacattaaattaattaatatatattttttcttttttgttaaaccaaatctaagttatttatatcaatgacaaaatgaattggaataaaccctggccttgaattaaattagcaatatctctaaaccaacaaatatacattgcatgggttgtacttattattattttggaaatatcttcaattttttttaatttctttttgaaagagtcaattatttatgttacaacatataattattcattgaaaaaaaaaatcatattacttttataattgaaacttctaatcgtaatgaaacatatgaagtttgaccctaacaatggccgcatgatatggagatatgtataattgacaatatttatattagtattattattaggaattattggtttttattattatttttcttaatagaatatttattattgttggtaattttatattataataatcaaattaaaatatataatttttttaagggtaaatgaaaataaattagtcctagaaatattaaattatattaataacaatatatccctataaatattatgtttagtgtgaatatatatacatatcactttgctttaaaaaacaaaaaaaataaaacaatatatatcacttcattagatataaatagtatattttagaatttttttatatttactgaaaaaaattattaaaatatttatggaaggtaccttactatcatataagtacaaaatagttcataatttttcataaattattagattaaagagtattgttattaaacgttagtggtgctcaacacttttttaagtgacgctccacgattaattagtgatattctttaaaagctattttcttaagttatataagatctgatacttaattacaataataataatatgacaccaaaaaatatactaaataccaatgatatttttttaacaattctcaaaattaaaatatgtagaatctactacttagttattaataattataattaatataataaaagtgacataaggtgaccaacatgatagtgaaagtcaatgcaaattgtttaatttttacaaaaactatgcttaatctattactttacttattaaaaaaaaaaaagaaaagaagaaaaattctcatcattattatttcttaaattccttttttttaattaataaaaataatcatacacatataaactttttttttggggacggttccaaactaaagcatgtttttatttttattttaattaaccaatgagcttggtggcctaacaatttgagggagtgtggccaagtgtatagacctaaaccaatatttaatttgaggtattttcctataaattttttggggatatttaaatatatgtttactatgtccttttcattagcatagctaatattatcaattatggtttagaactttattatttatgtgggtgcaacataaaaaaatcatctatttaattaatctttatcaactcaactaatgatataatttaaaagataatatatattatttgtagatttttcaagaaaatagtccttatatagttatgcatgcaaaatatgtatcaatgatttaggaccacatatattgtagtgcctggtttctaagcctttttttttttcttctttttcaaaaaatgattttcattaaagaaacaaatcagtcattacatgaacactcaaaaatctaaagcaagtatttgtccaaatttaaactcctacaaaaccaatatcaaactttactagtatacgtgctacactatttacaaataatacaacaagtactaccaccaacagcaactaacaaaataaaatctcatcaacaacaaatttaaagacaatattactttgggggaaattaatctaattacacacaataaaagaatcaagttcaactttaaaaaacttaaaacccaaatgaatagcccctaacaaccccactcgtagagccaacaactctgctactgcaacctccaaatcccggccccaacaaaaccgacaacccaggccgcccaaacaacaccctcaccatcttgtataacctcgccaaaaccagcaaaagcctttgcccttaaccaccaacacatctatgcaaagggaaaagcttcccatcgccgagggtaaccagcgagaaggacgggaggagctctgtccagctattagagcacacccaataacactcatccccccctaaattcttccagcaccgcaagtgccagctcgttaaccacttccaaccttgaaattttcttaccaaagaggatagagttcctatcataccaaagccaccaccacaccatcgccaccttggaggatatttcaatcttaaactcttcaaataatacgccagaattttcaggaagggaccagaacgacgaggagagagcttcgcccaaacacccaatcaaaataataaattggtgaacgaggagctcaaggcatgttcaaggctcttctcttcatcaccacatcttgggcaccatctcgacacatgtatatttcttttccctaattgagttgcaactggaaaagctttgtaatatagtctccacaaaaatattttcaccttcttggtattttcaaactccacatccattccaccaatgagccaaattcatagaagagttatttcctcctcctccatcaattctaaagctagtacataaccccttctaataaaataacacacattcctattgtagtgccaacaccaacggtcaagactttggccacttgctaaaggaattcccaaaatcactttaatgttcatatccaagaagaattattgtaatttaagagcattccaacaattattagctccaataaactcaccaccaatcgaccatcatcaagtctagtagtagtaggttgaaaatatataggccttagaacctaaggatcacacaaattcacaacatcgctaccatccccaatcgaaaatctcaatcctttccccaaaagctccaatccccattctagacttgtccatatatgagacaagccattcctctccctagccgccaaaagttaatgttgtaggaaaatatttatatttcgaaacacgagaccacaatgagtcagggtcttgcattaatctccacacttgtttcacgaccaaagcttgattaaacaattttaaatcccgaaaactcaaaccacccttagccttatgtttacatacaacatcccacttgacccaaggaatcttcttcctatcaccatttgtaccccaccaaaattggagtataatcgaccttagtttattagaagtcgcaatagggagcttggaaatgctcatcaagtaagtcgaaatagcctgcaaaattgatttgaccagaatttctccctcacatgctgagaaaaaactttgttttcaccccatacacacttacagacattctcatagatagccctaaaaattcgctttttgattttcccaaacatggtaggaagatcccaagtatttatcatgagaaaccaccaaacttagtcccaaaatatcacttatatcaatctgcgtaacattaggactaaatgtaattgtcgactattccatattaacacattgccccgatgctagctcatatgttcttaagactcgcctaatagtagctgtatcatttcaattagccttcccaaaaatgaaattatctcccacgaaaaacaagtgagaaactctaggcccagactgagagcaccaaaagctgactagcttcagcctattgtaatatataataacaaaagagccttacataaaacataaataaataagttgatagcgaacactcttgtctcaagccccgattaggcaccacccaacctctaggccttccatttaccaaaaaagcgtactttggagtagttacaccgtccacaatcaactcaatctagaggggtgcaaagccaaaattccccataatctcacgcataaaactccattcaaccctctcacaggctttgctcatgtcaagtttcaacatcataaaccccttttttccattatttttcttgaacaacgaatgcaactgttcaaaaccaacaatcccattatcatgaataacacgtccaggcacaaaagaacattgaaaagatgaaatgagcgaacgcaaagtacttttcatcctcatatatagtcaaagccttagcaataattttgtacatgacattgcacaaactaataggacgatagtatttttaacaaacttaggctttgttaccttaagaatgagagccacattcaacttattaaatttcttgaccgaatttacctcattcagaatcgctatgaaaatagccaccacaagaggaccaaccacgtctcagtattcatgaaaacaatctgaacccggtgccttagtagcactaatggctttgaccacttaataaatatcctctttagtaaacggagagaccagtcacatattatcttccccattaatccttctttcaatcacgtgaatgccgacctaaatatgccccgaggacaggttattagactaaaaaatacgattaaaatagctctcaatttctacgacgatatcctcatcaatactcagttgttgtccattcttagtcataatctcaattatggcattcttcttcttcctagaagaggcttcgttttgaaaatactttgtaattctatcacccaatggtaagcacttagatcttgatctttgcttccagtagtattcttctcgtgacaccaaatcttctagcttaatctcaaggcattttatttcatccatctgaaccaaaagggcatccatactttacatagtatcaagttttttttgggtttcagcaacaagttttggaagtgaaccaaacttattcttactccattccattagttgagacacacattattgaaaatttgtacgtatattgtcttcactttgtgattccacactcgacagctgccatgaattaagcataatttggtggcattcctcatctttcaaccaatgtggctcaaaacaaaaccatctttga

SEQ ID NO: 17431 - DNA, 8044 bp, Cannabis sativa
ataaaacatatttttgaaaaatatgttcacttctttaaaaaaaaaaaattgatttaaaaattgttactaaatgccaccataattaattggaatgatatgcacaataaatggttttcagcttcaatatgaaatcaattaaacaaaaattcattatctcaaagttgaggaaattaagaaaatctaattacataattgtgttgtttatgaataattttgtttttttttttgggaaaaggtaatcaaactttattaaagattaacctctggtaccaaacaagctagaaaattgattaggatatttcccaaactaaaactgcgatcaagatataaactagaggttcttgcaaaggaacaagctactgagtttgttgaacgcttaacaaaataaataacaatattttccaaatttacaagcaaattttcacattcttcaatgattgaaccaaacaaagataacattgcaactgaacttcgtaatgcttgtaccaccactaaacagtcggtttcaagaaacacttcctgccattgattcctctttatccaacttaatgcttcgagaacccctattgcttctacaatttctggccttaccaccctttgaaataattgagtacacccttctagcaggaagccatggctgtcatgggccaccataccaaccccaaaactatgagactctccaaatatcgctgcatccacgttgactttgataatatcaccaaacggtacacaccactgctcagctccatcatcggctaccaaaccaatctgagatgattcaacatccataatttgagcagctttccattgatcaaagaaactaacagtagaaaaatacatattcaaagtgtttgtagatttatgattccaaactttgccatttcttgctccccatatagcccaacatagaaagccaccaaacatctcttctcgtcatctatattcttgaaagttgcagcacacaaattcaagaaggacataccatctgcaatcatatttccaattctgactctctccaagcaacttgcaagtgcctggcatgttactaaacaatgtaaaatcgtttcattttcaaagccacaaatcggacataaaagacacacaactactcttttagagtaaagcattgtcatagtatgaaaataatgagagccccctccccacattaggttcttaaccttagtggaacattaaggctccataagcacttccaaaaagcagatgcctccactttgaaccagttattttttatcttttaaatcaaattgtatgcacttttaactgtaaattgctagacaattcaaaaaaccaaaaaaattgatcaggggaagattgtcgtggaagaattcttttaataaggtccacatctctatcttcaaacaagtcacctagtaattccaagtcctagttattgccattttccaccattaaattagcaacaatagcactagatattgcaagatgatccgagatcacataggaattttcatcaacgggtaaccaaggctctccaattacaacaatgcttttcccatctccaacacaccatctaatacattgtcgaactagctcttaggtttctagaatacttttccaaacaaaacttggattattacccaattgagtcatgagaaaagtaacccctgaaaaatatcaagctttgaaaacttcggtcactgagcaattaggccgagtcgaaaacctccaactttgttttcctaaaagagcaaggttataatcccttagattcctaaaactcattcccctaacaattttatgactacacaaacagtcccaagacttccaatgaatgcttttatctttagaattgagagtcttccactgaaatttcaccatatgttgttccatatccatagtgatctccaaagaaagaagaaacacactcatggcatagcaagggagggcttgagccactgttttaataagaacctcctttccagccttcgaaagaaatttagaatcctgcaccctctttttgaccctttctttaagataccccaaaattgcagtcttgtttctttccattgtacttggaagacccaaataccgattgttttcatcctccatcatcatctgaagcaaaatacaaattgattccttaaattagtgtccatattagcactaaaaaagattgaagacttccccaaattaacttttggcaccaaagcttattcaaacattcttagtaattcttgaattcacaaatcttccattattgttgccttgcaatacagataactatcaatcgcgaacagcatatgcgatactcgcaaagccccttttgccactttacaccaatgaatccaacctttcctttcatattttttgatttaagctgacaaaccttccacacacagaataaaaatattaagagaaagtgagtcttcttgtctgattccccttctagggactactggacccatctcacggcctccatgaacaatagaataagtggttgaggtcacacatttgagaattaaactcacccaacttgttgcaagttccatttttaacaagattgcttctaaaaaaatctcaccctattctatcataggccttgctcatatccaatttaaatgccatgtagccatctttttcttgtctctttctctttaaataatgaaaaatctcaaaagataccataacattgtcagtgattaatttcctgaaataaaggcacttcgggtatcagcaatgaacctatctataaatgcttcattctattagccataatcttggtaattactttgtataaaatgttacacaaagcaatcaacctaagatctgtcatacttctaggatttttcttttatggtgtcaaaaccacattagcctcatggcagttatcacggaacatgccatctaaaaagaatcgctgaaccatcttgactacatcaccaccaacaatggaccaacacttttgatggaaagtaggggtcatgccatcatgacccaaacttttatcgaggtgcatctgaaacaaaacttttttaacctcttcttcacacactagctgattcaacatcttattcatttcatcagtaaccgaggtacccacacaatcgatcgcctctctaaatcttgaacccgagctagcaaagagagcattaaaataattaacctctaaacatgtctcccaatccacccactgcccatacttattcttcaatttctaaattaaattattacttctaggagtattagcagcaacatgaaaaaacttattgttatggtcaccatcttttagttaaaattatttcgatctttgcttccaaaaaatctccctctaatttagattctcaaacaacctttttttttacctctttctattaatgaacagaagcattgtcgtgcttattcttcaacatattgagcttatttttacaatcttttaaacactgcttaagtttccaataatcgactttacccattctggaagtttaaccgcacaagaattaactttttcaccaatttcgatacctacaaaatcatcccaacaatctcgaacaatttgatagcacatcggttcctttagccaagcgttttcaaatctaaatcgtcgattgccgaaaaaattaaaaggaataaatggttcaagaaaaatagggctatggtctgagggagaatgttgaagattatgaagtttggcattaggaaaagttgtgaccaaaaagagttaaccaaggctctatcaagtctaacttcaatccaatcatctcttctccagtttttctcccaggtgaaaggataacccagcaagtctaagtccaccaaatcacactcatggagaacctgttggaaaccatcaatcgatgatcttggataagtgttaccccctctcttatcttcagcacttacaacattattcagatcccctatcacacaccagggaccatcatctctatcccgaagttctctgaaaagattccatgaattgtgacaaaggtgtctttgtggttcaccattcatcccagtcaaatgccaatttcttgaatccttcatggtaacattcaggtcaatatggttctgtaaatagctcatgacaataaccctccaacctccacagtaaagcaagtccacttccctttccctaagcctctacacaaaacatgccttcaaagctcaaattacagtccacccaactaactctattcttcatacatttagtttcacaaagaaaaataaaatcgagtttcttttgaaatacaatctcctttaggaattgaaatgtccataggttcacaagcacacgacaattccaatttagaacattcatgatgtttggcgggtctgagagacaaaacccgcctcattcaagttttttgttaattctctaggaatgaacttaacaaccacatcaacttcagataccccttcattttgctccccacccatttccacatctagataagtaggcccattagtgttggctaaatccactctcttttttgggtcaacaaaccgaagcccattttccaaaatacaagcatccacatcatcatccactcataataatgattttcctatttcagaatttatttacacagctggcataataactatcttttggcctaaagaatgatcctccaatctctatccaatatttttgaaaatttagagcctaaaatcccttgattgttggcaatctatcaagacgttagcattaacttcagtgggttgccgaacctccgttcccaattgtctcttcgatgtagaaaggccattttttgtagctattctaagcctaaaccacttcgctccaatggtgtgattccttctccttagtggtgctttcatctccatcccatatggtttgactaatagatgttgttgtgtatcaaagacattttcacaaaaccgctctgaatggccaagtataccacaaacaaagcaaaagattgttagatcttcatatttaaattagcccagcacatcaaaccattagtcatctctaagttcattcttctctttaggggtaagtcgactcaaaccgaaacttgcacacgtaaataatctctccaaaccctagtgaaattattgggatcagtttcgacaaactccccaatatagttggtaatgtctcgcaccaccttggctaatttaaaactaaaaaccatgttatataactgaacccagaaatcaagcttattcaaagagagcactcgtggatcatcaccaaccttcattctttgaaacactaatgaaatcctatcgaatgtccaggaacttccttccattactctttcgatatccatatcgtgataaaactaaaaaaaaaatggattcgattctaattccttaacaaataaaccacgaaccagtctccataaagaagccattttgtgctgcattacttgaaaatcgattgttctatctgtgagaaaactactcactaaacaccatcaatcatcaatatctgataggtccttcaatcctccatcatacatcagatatccctcttcatccccacccaaattgattgttgcatattgatcttccatttagacaaaactcacaataaaaggtattaaaataagaatacacagtcacaactttagagagaaaacacccaaccatatcataagacaaaacgtatgaataactttgttacttacagagaatcacattcaatagacataattcttgacagattgtgaagatgaaattgcacaaaaaaaaaaaaaaaaaaaaaaacaaaaaaaaagctaatgtatgtataaaatagttgttgatatcatcggtctgtacctgctaagttttgtttagcctcactttagcttctgttagtctgtgacaagaaaacatgaaagccaagaacagcttaatcacaagccgagtttgtttttgtctcgaagtcgttctctatgcctccatcaaagaaatattccatgttattgagattgtattatcacgcttggtgttgttgagatttgtctgtaagacagttacttcctctgcttataatttcaaggaccatataattttctcaacgttttccatcttgatggcccaacaaactcaactggtttaatccatctttctgaatgtgcaaggaaatttcaacttttatatcagaggtggtgccaacgcatttccaagatgacttgtattgttggttcgcgacacccctgggaatcttgaaggcaaacatttgtcactgcacaactcacaaacaattgagtcagaacttggaagctctctgcagagtttgaaactttgatttaaatcatcaactctatgttccagagtttaatgtgactgttagtgttcagtatcgaaaacactgaggaatcagatagacatgaaagcaaagaaggaagcatatgccatatactggaaaggcataccaaacgtgtaaatatccaaagttctgcatttttattgctgctacttaacaaagcaatcctcataatagagcaaatgagaatgaaatgtatcctcctcaggcattttagggtcatagcccgtctccatgtgatctgacaaactgtctagaactgaaagaacatcaaccattcgggtgtttgatctatcttctactctaaacttgtaaacgacattgttaatttcaatccaactataacctggacttgttttcagccctttatctttcattagttttcgaatcctagctgcgtgatcccagcatcccacgctagcatagaggtttgccaattgcaggtaggttgcagcacaacttggttccagtgatagcttactctctgcagcctcaatcccaaaccatacactcctatgaagccggctggatgatagcaaagatccccaaataacagcatttggaggaaaaggcatccctgcaatgaaatttttagcctcttctaataacccagctcgaccaagaagatcaacaacacatgaatagtgatctagttctggctctacaccgtgttcaaccatcatattaaaatacaaccgaccttctttaacaagacccacatgtcgacatgcagagagaacaccgagaaaggtgatagcatcaactttcacattttgcttcttcatttcttcaaatagaccaatagcctgtgaagcatgcccatgttgggcgtaccctactatcatagagttccacgatacagtatctttagtatgtaaagtactaaatatgtaaaaaccatcctcaatagttccacatttgcaatacagtgagatgagagagttagaaatgtgaatgtgggaatcaaaccccatttgaattgcttgacaatggagactcttcccttgtccaagggccccactacccgagcaagcactcagaagacttgcgaaagtgaaatcattaggtctcaagtttgatatcctcattgagtggaatagctccaagcaaacaccaatctgccactcttgtgcaaagccattgataatagctgtccatgaaactacatttctcacaggcatttttagaaaaattctatgagcattgtctaactcattgcatttgctatacaaactgactagagaacttccaacatacacattttcaacaaacccaagttttatagctacacaatgatattgaacaccaacacaatgattgcgtttgaacgcacatgaactcaacacagatgacaatacggttgcatcaatccttaaactctcatggcaaggttgatgaaaaacagaagtagattcaagtaccttatcaaacacatcaattattttgtctgatgaacttgaactaggcaaaccaaaatcattgctcagatgttggggcctaatttgttctgaagttggattcaaaatgtccttgattaggcgaagatggccttcacgatgacatacaatactggttttggggctaatcatgtcgagcactctgagtgccttatctaaactttttctcctctcaaatttatgagtagaagtatgggaagagaacgacctcaagcatggagattttatttgcagcatgacataagaaagtttcttccaaaaacacaagtgaatagcagtgttacatgtaaaagccatgaattgaaagctatgcaacccattctgaatt

SEQ ID NO: 17432 - DNA, 2010 bp, Cannabis sativa
tctctctctctctctctccagtttaattttattattaacttcatggtctaatttttgttttggtgaatttgtatgtacagtttgcttcattggaaaaggtgaaggaagtagaggagttctttgcaacccgatcgaagccggccattgctagaacattgaagcagagcattgagcgggtgaagatcaatgcaaaatgggttgagagtatccatgctgagaaaaatcttgctgatgctgtgactgagttggcttatagaaagtactgaaaaatcacccaccaaacaaaccaataagcttcttttctttgatgtaacttgatttgagtttagttgtgtgttttgtatgtaacctagtgtttttttaaactactactatttcatgaatagaatttaaataaatgactaattgagtattggctttattacgatatatatgtcatataaatgacaaccagtattggatttggctccacttcactcactaattggcaagagttagaaataggaaaaagaatattgctattgactcaaaaaaatgacttaatgttatatttttctcaaaatacaattagggataaatcgaaatcacttcatgaatcctttgagaaatttccttttaactataatgggataggcatcaaaatattctcatgaaatttcttattcctaaccttccaattccaaatagactcacaaacagtggcagcgaaagagagttaaccaatcaactaagtcacacacagaactaatcgaaatcaaacaagtctaaaatgctccatttgcttgcaaaccaaaaagcttttgttgtggtgcacttctagacaatatttgtaaatctttcagagaacataccaattttgtcaccagtgggaaagcagttagctgcaattttccaaaggaattattagctgccatttttcaaaggaattaccttagtcttttgggtaaagggacacaccaaatatttctctataaagtagtagtggatgtgaatctatgtttatttttacaatagtaaaaattgatgtaaaaatgtaacaaaactatcttttatactagctataattcaacttttatattttctattgaagatgatcttactacgtatatagaccaaataatataagcgaaatttctaattatgactttctacggatttgaacaaataacttttacaaaaactaaaaaaattgttctaatatataaaaaaaattaagagtaagtttatagtacgctccttaataaagggacgttttagtagactctcttatctgatttaacattcataagaattttttattttttattttttattttcatgatcatacacgttgtagttatttaagatcactcgtaaatttttagaaaattttaaataatttacagtataaaaaataatattcaaaaagttgcttaacgcgtatgagaaaaaacagccacatatgcaataaaatatttgaatcttatttttggacacgataaactatttaaaattttctaaaaatttacagatgatcttatttcttaaataactacaaagtacacggttttgaaaaaaaaaaaataaacaaaaaaactttcataaatgtcaaaacaactacaataaaatctaccagaatagaaacactcgggtttttttcaaaacttaaaatacattacattttttgagagaaaaatgaaattttttattaataggcaacacacaattgcccataatatatcatccaaaggatagaatcagctagatatgcaaactatgttgtttacaaaaatttgaatgaaaatcctaataacacattcaactaaaataccaatgaatcaccaacattaaaacatataaaaaaaacgtaaagagtattgaatctcatctcaacataaatggggctatcaaaggttcagttgttccacagagggattttaggcaaggtgaccctttatcaccttacttattcttgatttgctcggaaggtctttcatctttgttgaagaatgaggaaagattgggtcatct

SEQ ID NO: 17433 - DNA, 3595 bp, Cannabis sativa
acggtttgttgttattaattggttgttagctttctgtatcttgttttgtatataatctctgctattgcagataatcaataataacagaaaatctttcttctctttcctttctttaacttctacaacaattatattgggtggcaatttattagcaatggtgagtggtgacaccaagaaaatataagtatttctcgtccaacttgaacggaactaggtaccaagacatgatagacttctcgaagtaagtctatatatggctaataatatatatatatatatatatatatatatatttctagagttatataagtatatattctagcgatatacataaatatatatagggacataagaatattattagtgattgtattttcacggaatgtatttcgtgatgtacgacagtcattatatgataaagttatttgatctcaggactaagattgatctaggaataattagagttaaaaaataataacgtaaacacctactgtgacaaaatcgtatcctattaaaaaagttggttggttggttcccaataacagaaattattaaaccctaatagtactatatataattaatggagttgatagatcaccacattcacattaccctacctcttctggcctctccagagtggccatgtcaccataccattatttatatatattgtatatttatacatatatatatatacctattaaacatcaaaattattaatcttcgatatttctcaaccaatgctttatataactcgtgacttacgtgatcaaacacaatttataagatgatgagttttgattgagcatttgttattataatataaaattggtatctaacatcatcatcaatcttcttgattgtacatttgactaataatgaatatcgtatattttattttaaattaaaacatatagaatccaataataatttttacatttgtaaactcatcattctccaaattatatatattattattaatttaaccactaactaattaatattaaggggttggatcttatttgatagctgtattctttttacattattttcttatatatttcaatataaaaattataggatagtacacttttaaaaaattatttcggtaaattctgtatctattttggtatatgagagagtcttttagtcaattttatttttatgatcacgtacgtggtaaataaatatttaaacataattttcgacacggtaaattattcaaaaatttttaaaaatttgcaaatgatactaaattgttacaacgtacacgatcataaaaaaatagacttaatagttattttgtatgcaaaaacaggtaagaaatctaccagaatgactttttaggatctactccaaaaatttctaaaactatatatatatatcctcactaattctattaattattacagaaaaacttatgtagtagaccatctatctattttggcattcaaaaaaattttctagtttattgtttttcataataacgtatgttgtaactatttattaagactgcttataaatttttaaaaaaatttgaatatgttatgttgcttaagtttttttcctaaatacgtggtacttcaagaataagccatgtagcaataggatcctcgatacaaaatgtattatattaaattgtcactggagcttggtagttggcaggagcttcagaaaattagtcaccttcagaaggacccactaggaggatagtagttttgtctcttcttctccgcaagtgaaactcaacccgaaaaggagatagagggatgtacggagcatgacgcaccgcttgaggctaagttactatacacgcatttaaaacgacatttaagttactccttatgctgaaaagacgtgctcaatgggtttaaacccatgattccccgatttcacgacgccttatgcatcatttatgcattaattgacgatttcattatgagctatcaagtcatcggcaagaggcaagtctagtctcaccaaacacctacattaagcccaagtacatcatgaagaataggcaatcataccctataatcaagtatgtgaaattatgcaaaatatggttcatacaagcacgacaatagtgatctttttaccactattatgaacctataagtacttcaataatgtatggaagatgggacttttttttgggactctctgtaagaatactcagaaataaaagtgattcgtataaggttcattaatgttctaactacgtaaaaattctcttctttaattcacattagttgttccacgcgttctaaattaattgatgccgaaaattttggtcaacagtttataatgccgaaaataaaatttaaataattacttaccatgtgtataaaaaatttgtctcgcgtacaataaaatatgtaaatcttattttcagtattgtaaactattcgaatttttctgaaaaatttacagatgatcctaaataactatagcatatacgattataaaaaaaattagattaaaaaattctcataagtgctaccataatagataaaaaatctaccaaaatatttgtttaaaatgtgtaatgtaaacttacctactgtgtaattattattgctatatatgctcgtacttatgtatacactacaagaaatgttacttttgtcagcatatttttgcgctggcaaaagtttggtgtgttggcaaaaggagttggcatatcaacgttgatattaaaacttttatcagcgcaaaatgaaaagtgctagtaaaaatgactttttttagtacgtaaatgcgatagtaaaagttcaatttttgccactgcaaatgtacactggtaaaactttaatctttttgccaaagcagtttgcgagatgcgctgataaagttacttttatcagcacaattgtaaactgggtggacaaaagtgatattcttgtagtgatatagttgctataaaaattatattttaaaattagtaaaggaaaaaagtgagatttggccaaaataatatattattaacttgataaaagtacaactatatgtatatttcttttttagcagaagtacaactatatttttgtttaacttttatataaaaacactaaaaaggtgcatatatgagtaatgattatcacatacttaaaattatctataactaaaattaaatacacattattattgtaaataaaaagtgtgcttatgtaataatttgagtgtgtttaccaaataatgatggacacacttttaatttgcagaatacacacacaaaaataagtacattctaaaatatataattaaatatgggaccactttatatataattgtatggtaatattaactagagttatatcattgtgtacaatttgttatctttactctttatgatttgactatatatatagaagaagataataaagtaaagtagtagtagtagtttaaaagccaacataacatgatagggttcctatcattactagtaattaataagtagggttaacttaatttaatgagtttttttttctaaaccttctcaaatattattctatttgtacttattaactctctaaacttaaattttagtggtaaaattttctaaactagtgaactgttagcaaatttaaagtat

SEQ ID NO: 17434 - DNA, 8345 bp, Cannabis sativa
atatggctgtggttttcactcaatccttaatctattatttatttttcttccagtgtgtataaacatggctgtggtttccatatgctacaaaatgcctcacagaaaccaaactcaacacattcaaaatctaatgagacacaacgagagaggcatgatgataacatgtgatagtgtgaaacttttctctgtatacatctacaagaagtggagctcttcctccaacataaaaggaccgattcttttgcagacaaggagtgatttccaacacaatctaagatcgatttcggaaaccaaatctcatgtgggaatcttttgtgctaatcagaaacaactgagatcattgtcttcttactttggaaaactccaagatgctaataaactcaagttactcaaccctgcagagtcttccaacaaaccacttagtgaaacacaattgtgctcaaacaaaaagttggatattctaggtgcttatcttgacaagcttgataaaggtaaacacactatacttttctagaaaaaaacatcgtattttaggtgtgaaaatacgaggttatttagtattaaattttacacattatttatgtttccaaacacaaccataatgacagatgaaagctctgctgacaaggattgttcaacagctgctgagccaacactgtcttctttcgaatgtcagcatacaatcaaagaagactatgaaaggaaagaagatatgaaaatgaggacttacatgaacaaaggaactagaattggttcccatggtccaaaggagtctcaaaggctacaacaagatgatgatgatgatgatgaagatgaaccctctgatctgtacttaatgtaaaacaactcagctttttacctaagtgaatttttattttttagattaatttgttgtgattatctcctctgatgataaaatattggatatgcagaagtacattggcttccataaacattgcagttgttctgtttgaaattgcaagtccaattaggagctctgacatggaactgtcttctctgccattactatatggagctaaagtgaatcatttaatccttgttggagaatggtggaggcttattaccccaatgtttctggtacaagattgattgggttcgtgtttattccattctgtatatagtcacattttatagatatattgtttcacatctccaaaaaataaaaataaactaattttcaaaactaatggataggttagaagtagtagtttgtaataatgttatgacttcttttgcttaaaatttccttgaattatgagatacatgataattggtatatattgcagaactgtggtgtttttgacattggtcttggttgttgggcactttttacatttgggcctaaagtctgcagaggttatgggtcgtttacatttctcttgatttacatccttggtggaatctctggcaatttgattagctttcttcatacaccaaaaccaactattggtggcacagtaagcaacttacataaatcttaacattcttaaagagcattgctactatatcccacttaaaacgtaagtaggatttagttctaaattaaattatataggacctgaagacacctagtgtatacttactcaagttttctcattttattatgatgcttacacaggcaccaatatatgccataattggagcttggatggtttatcagatccaaaacaaagatgtcatttccaaacaagtttcagaaaacttgttccaaaaggcaatcatcatcacaggtctgggcttcatattaagccattttgttccaattgatgaatggtaagcttaaagtacttatgtagtgcaaaacaaattggatgaaaaagctatgaagaaaataaacaagtaaagttctatttgtgtttgcagggcacattttggagcagcgtttagtggtgtagcgtatggatttgttgcatgtccaacacttgaactagatgatattacagcttctgcttcaagtagtagtggacaagaaaaaggaatagctcttgtgaaacgacaatctgatccttggaaatccctcttgtggtttagtctcttcattgtcgttttaacctctttactcttcttggtccaacctcctctcaacgatatggttttggacaactacttcatatagataacaggtgtaggtgagatgtgagagcttacgtacgtaatgccctattgtaaaataaatattaattaatatatataaaggtcttttggttcgtttttgacaatataatttctttctttctttttgtataaatagtaatagacattaattcacaactaatgattcgtaagagtttggttaaaatcataacgactaatgtcgaatctaaacttagcgtaaagcaaaacccaagaaactatttgggaatatgataacgattaaatatacctgtaacacactcctctcgaaagagaaattaataccaaaataatttaacatatataatacgtggaccccatgcatggattccgcatgtcaagaaaagtgcacctctgtactgctgtaaagaaacactttcaataatccaatttctcataaacacttagtaactacaagaaaaaacgacaataggaaagtgtattaaaattctcatgtttttggcctattttgttcacttaaaaagtgacttgaaataatctttcaggggacgcgaaagatatgccacacctatttagtcgagtttccaacaagactccacgtaatcaaaaactaaagcaaaagcttttcttctacttctttctttttctttgaataactctttttgagagcatcaaccaacctcagaaactatccatatatagcctatatatacatagatccatttatttgtgctgctcattctatgttgggttgagcttattgtgggttgtaattggttattatgactacgagtgggagaggtgttagagacttattaggtcctcttattgttgctaacttggtagttcatctaattgtgcttggactcgctggatggtctcttgacaaatacatcgatggagaggaaaaccatccccgtacactcactctcttctctctctaaatttatgtgtatatatttggttatatttgagaaacgggtgttttattttatatcttttgtgttgataatggcagatttaggtgggaatccatcaactagattcatgttggtgtttgctctggtaggtggggtagtgggtgcttgctctctcatttcagggctcatccatctgcgtacttggcgtagtgacagtttggctgctgcttcttccttagctctcatcgcttgggctctaacagctcttgcttttgggtactcgtatatatatacatacatacattacatgcatacattagttcatgagaagttacagccaaataaattctcttgttgcagacttgtgtgtaaggaaatgatactaggaggacgcagaggaaagcgcttggtaaagatgtaacagtattttttgaaccaaattctgagtggaaaaaaggatcttggttcttaattcttcttcttcttctttgcagcaaacattggaggctttcatagtgatatcactgctgagtcagatactttatgtggtgcttctccacggtggggtgtacagtagtacttatggtccagggtatcgcaatgacccccagaaacctgccacatcagctgatatttgatgtttttttcgttgtatgtttttatatatgttgttagaagaaaactatatactgttatatcgcatacatatacattttgcttagtacgagtatatggcagaggaacaaaccaactgtacaagttttgcatgcttaaaaatagtcccaagaatattattatgattgcatcctcttttccatactgaagtgttcactagagttatagtatattcttctaaaacccatttgaccaacatttactgcggttattagtagttaaattgaacaaattctccactaaagaaaagggtttgatttgatttgatcactggtttgattcatcatgaatctgccattggacaatggccagagtatggcgacctccacaagcaacaagcttagctatccaacgttcctcaccttcttcatcatcagttgtagtattctctgtaggaggagataggtctatgggaacctccatcggttgtccggtcgtcaccttcctcccatatccaagccgtccatggtctccccgaccaaactgccatagataagaagttgaatgaacggttgagatcttaagtaaacaaggttagaaggagacaacgcaagtgaccaagatgaaggaattttatacacaaaagataaaaaaaagcatatatgatgagattattaccgaaaatatgcgaccatcacgggttaatgcaaccgagtgagtgcctccgcaggatacctattcgaaaaaagagcatacctttttatctttagacagtttgaaagaggtagagaccaaccgtagtggtcagaatatttgattgaattcaaatatgaatactacccttctactagaaaatcacttcgagttacaaagacagtttgccaaagcaaaatcatggcaggctgacttgctggctaatgcaatttaagtagtgaaataatgattcaagatggttgaactcgaaccacttttagtccccagtttaaaaatgctttgggatatcaagaggcccatcctatgatccttgcatacttttttaagaaaaaaataagaacgattatgacaagagtaaattttttaaccaaggtagcttaattttctcacactttctggtatcatacaaatcactctgataaatggatcatctatcaactgaagaagaccgatcaaaatgttcatccaggtttgatgagaccatgtcatatcttccagcaaagcaagttagtggtaaagtttaaaggaatagttcattaatggtacctgaacaatatcttccccagccaaaagattcactttctggggcaccattttactgcttttgtcattatctccaaatccaagtcttccatgttcccctcgtccccaaccatatacctgaatatagataacacaataaaggaaccttcgttttaaagtgttttgctcaaattagcatcctgcagagtagaatactcacctctccttcatctgtaagtgcggtagaatgccaaccaccagcagcaatatcaacctggatgagaaagaaggacaatcttatcaaagcaagctactacaaaagacataacaataacaaacaagaattcagaaaatttagacaaaagaaagaaagaataatgatgatgaaaattcgaaatgagctaaacaaggatctgtccaatgattagcgtaactacttaattttggggggcttcatttgtacaagtgaacaaatactataattatagaaagaaccaacaaaaaattagttaaacatatagctagagagaaatccagtaagcaaccgtgatatgagaaagaataaagtccaatgattcttagaacaaagaagagcttttcctggaagaaagaaaaaaacataggacagacagaatattttagataaaataacactaaccagagtaagaccagaaagcccttgaacaggaattggttgggatctgggttgggtatctccagttcccagttgcccatattcattattaccccatgcccataaagtaccgtcctcttggagagccaaattatggaatgccccaacagcaatcactctgacagcttcaaggccttgcactcggacaggaatagaaatctgttttctgtaagaatttacaaagaataaacaaagttttcataaatttattttatgcaaaatatacatgactgtaaaacggcaaaagtgtgaattcaaattaagacaccatacatatcaccaggaggccatggctgaccccatgtccatacttgcccttcccgagtaagtaccacagaatgagtacccccagcagcaacctgtaatgtgaaaaatataatcatatatgaaatacacaattcatatggtttaaaagtatagtatatcctttcaaaacaagcaaaattgaacaatctaaggcaacgtatgttacttgattatgaagacgaaagtgcaatagaaattgaggaagagcgcaaatattttattccaggtcaatatcaccaggcagctataaatgaaaggtgtgataagtaacattaccgtggatttgtgatctattaaactgggcatgtgaagggggggaaatggtaacaaacgtatactaaaaacaagagcacaaaatacctatttcaaacttcacaagttcacatccatacgaggctttaataattgtttagtttcacagaaaggatatccctaagaactattgtacagcattcctagtgacattctttttcatgacctcttagttaaaaagggttggaaaaatgatgccatactgaatactgatcatacttcaccggaatctcttgacagtatctatattatttagtaaacaggctattatctcatactaaacattcaaatgtttcaagtttttttacttgtaaatgaattttgtaacattaatacgaagataacaaatctaatattccatgcctccttcgtgaaataaacagccgtaagctaaattcaatatagaaaacggaaaacattcaatctaacacggttcagtatatgtcacaccatctacctgtgtcttagtagcatacctggcggactacaagcttcggcgcacaccgctgaggaatcactatatcccttcttagaggtctaccagtgtcatcctttctctcaggttcttcaccacactggccatactcatttccacctgaaaatatcaaaatgcatccttagtcaatcaaaaactaaattcccattcaacttcatcacacattatgagaatcccacaatccttattcagacgtttataacagttttgcaaaaaaaaaaaaaatagtcagccatgtggttggctcccacaaggcctgaggtacgtgtcccatctggttacttgtataatttcctggtcaggaggtacttacataacaattgttattgtttattgcttggtccccaaatattgtagagttaggtgggttatagtttaatggagacaaaatccattacccatcatattcaagtagtaatattagtcaaacaagattctaaaattgtagcacagaagaagaaaaaaaatactaaaatccaatatcatattcataccccaagcataagcccggccttgatcatcaacagccaaacaatgccaaccaccaatagcagcctgcacattgaaagtaaaagaaaaaagagatgagttcaaacttgaggagaaaaagaaaacctccaatcgttgatttttctcttaaacacgaaagcttgtttcaaagcaaaaaggaggattacctcgacaatcttgacattagccagagccttaacctggcttggaatattttcagttttagtttcaggagggtgtccaagtgttcctctttgattccatccccatgtaaacaactttatgcatatacagcataataaaaatacagtgagtaacgagaagaaaaaagggtagcagaaaaatattagattacgatgctgaaaggagaaaaggaaaaaccttgccatcctcgcaaatggcgagggaatttcggctaccggcaactacagaacgaacgttttgagactcaagagctttaacaacggaaacccattctttatcttcattactccccaatcctaattgcccatcttctcctgagcccctgttttatgacataatccattaagcaagtcaaaatcaaaaacataacttttttgcccaattattgacggaacagataaaacgtgaaaaagagcgagcagagaccaggctataatggcagaatccgaagccatgagaggttgaaagagagaggtgtgaaggagagagtaagaaaaagagcagcccaacccaagcacaagcacaagtaaaagagtagtgagtatggtattcaaactcggacacagcgaacccgatgcggcaatgcgtcagccatttagtgggcatgggtacaaaacccaattttatttattgtttattaaatgataaaatcttttaaatttttaaaacgttttttgagtttttatgagacagctgccctcttttaaccattaatgagatgccactttcctcgtttttaattaggttaagtttttatggattagtgggggatagaatcaaggctaatgatttttgccctctaaactaatattattaagattgttaaattattatgctctctgaactttcatgatttgatacatgtcaaatttcggaaataaagatcttaattaatctaaaataaaagatgggatatcagtgtgagttgtaattgtga

SEQ ID NO: 17435 - DNA, 5470 bp, Cannabis sativa
gcaaattactcttttaaaaataaagaatagttttttagttatgatgtcaaacatgtactaaaagtaaacaattttgccttgcatgtaatacattatttttacattttggccattaaaagtaagtgtgacgatcgtatctcatttgttgtggctaataaattaaagtgtgacaatcgtatctcatttgttgtggctaataaattaataagttaattattcctaaaattaaaaaatatatatgcaacataagtacaaattttcttaaaatattttaaaagttcattacttcatatctctatcatcaaataaaacgaaataagtgtcaaaaatcatacttattaagttattatggtatcaataaaaaaaactgtaagttttgtcttttgacatggtatcctatgcttgatcttagtctctaaagttttgttttgtcctttatttgttctggttcatttgtttgtggcgtctacgtgttgtttcattgtggaggatgacgtgagaaggaattacgctaatttttcactagacgatgatgaggatgaaggtttattgtttgataatggtgatcaaaattttcctgagtttgatgcccgttggtgcatcgttggacgattcttaacaaatagatctttagactttttggcaatgcaacataaaatgatgtctctttggatacctggcaggggagtaagcgtgaaagaactcgactctaacctatatctattttaattctaccacgaaattgatgttgagagagtgattgaaggaagcccttggacttttgacagagttcctctgatctttgttcagctcaaggagggtgacaacccaaggacagtggtgttaaacaagttggatttctggatttaggttcatggtttaacaactggttttaagtctgaaaatgtgttgagacagttgggaaactatattggttcctttattgaatttgataaaaataattaaatgggattatggagggaccattgatggtaagagtcataattcagatgaatcttccactgaaacgtagaaagaagttgtagttgaaagatggaccagagtgttatgcacagttcaaatgtgaggatctttctaccttttgctttatttgtggggtcttggggcactcgaagaagttttgcgatgtaaacattacaaccccgcaacacttgatcactaagaatggtggtctcaagatgaagaccgacccacgacatcgtcatcaactcaccattggagctgagtggctctgtgaaggtttgtcgtcaggcataggcaactcaggaaggaggaagttcgaggagacaggacattaatggggggggggagaaattagtggaggaagatctgggattgattaggcatttaagaggaaagaatttggaatcctatgggaggtttcaatgtcaatccgtcaggtacacatatggtaaataatagggataatataatagatatatctccaagagatttgctcggtcaaaaaaattaaatgaggaggacgagttagttattttaaaaagtaaaagaaggaaaacttgtccaaagggaggaagtggtgcaatagctaatcaaaacttgggccaaattgtcttagagggtccaaaaaaaactcatttggtgcgagctctggtgtctaagcccaccaagaattatgaatgtactaagttgaaattattgggggcttgggaaccaacgggctattcaattcctaaaagagctaatttcttaaaagaaacccaattttatgttcttatgtgagactaaatgtgataaaaatcgtgcaaacattgtgggccggttattgggctttgaaggtgtgtttgcagtggaggcccaaggtttaagtggtgggttagttttattttggaagaatactaaagagggccatgtgcttggttactcgcaacatcatatcgattttgaggttactgtcgatgagcgactacagtggaggctcaccgaactctatggcgaaccaaatagaagccaccgctgcaatacttaaaacccactttgatccttagtgaataattctcctaactcgtggtgtgttattggtgatatgaaccacatcttgcatctcaacgatcaaagaggtggacgtggctatctgcattggctcttggaaggttttcaacatgtgattcagagctacaacttagtggattttgagcttcaaggtcacctgtacacttgggagagagggaggggaactcagaactaggaggaaagtcgtttagacagagcattggtttcgtccaactggtatttctttttccctcagacacatttggttaatttggatacttcaacctctaacaattgccctattttccttgagttggactgccattctaattctattcccaataatagatttagatttgagaatgcttggcttaaggaacctttttgctatgaaataattaagagttgttgggaagatgtgggtatccaggatatttttgccaaaattaattcttgtgcatctattctaactacatggaggaaagaatttacaggcaatttcaagaagagaataaaaaaatgtaaaaatgaattcaagatgctgaagaataaggaatattctctgtcaatctaacgttatagtgaagtcaagaagcagttatttgtcgtccttgaccagaaggaggctttttagaagcaaagagaaaaacaattttggttaaaggagggtgatcataacagtaagtacttccacaaagctgcgagtaatagacgtagtcataaccgaattactaagctaaaaaatgataatggttgttgggttaaatgggagcacggtttggaggatgtagttgttgattatttttcgaacttgtttactgttgatggaagtgtttgtgatgaggttattgactgcattaaaaatcgtgttactgaccagatgaatgtggaattgactcaagaagtatctactgaggaagtgaagtgggttgtattttatatgcaccccgataagagtcctagcccagacgggatgaccctaacgttttttttaaaaatgtttgggaattgtttgcaacgatgttgtcagcctagtccaacattacttcaatacaggtgagttcccattaggttgttatgaagccaatgttgttcttatcccgaagaaaaaaaggcctggaagaatggttgatttacggcttattgcactctgtaacgtactatataaagtgatagccaagatcatggccaatagaatgaagcctttttatggacgagattgtggtggatacccaaattgcttttattccaggtcaccttatctcgaacaacattatggtcttctttaaggtcttgcactacttatagcaaaaaaagaaaggaaaagatagttacatggcacttaagttggatatgagcaaagcttgcgatcggatcgaattgagtttttaagatcgattcttactaagctcagatttggccaggtttgggtgaattttattcataactgtgtcacttcagcccgatacaaaattacaaatgggggctatgacttgggtccaattttaccgagtcgtgggattagacaaggagacccactttcaccatacatctttatcctttgtgcagaagatatgaagcaaatggatggctacatggttgtaaggtagctaatggcgctccaaggattttttatatgctctttgttgatgacaattatctctatagtaaagccatagaagcagaagcgttgaaaattcaagaactgctccataaatttgagattgcttcaagacagaaggtgaatttgaataagtcgtctatcttccatagtgtcaacactcactctattcaaaggcagcacattaaccaactcttacaaatgcgacatgcacatgataatagtctgtatctagggataccaagtacgttggggagaaataagtctactattttgggctacctcatggatcaagttaaggaaagactacaagggtgggaggccaagattctttctcgagctggcaaggagattcttataaagacaatggcacaatctttacgaaattatgcaatgagtgtcttcttgttaccaacagagattgctaaagacattgagagtcaaatggcaagtttttggtggaaatcatcctcatgtgacaagaggggcatccattagatgtcgtgggatcgtatgtgtcatcataaaacatttggtggcatgggcttttagaacttgtgtgaattcaaccttgctctttttggtaaacaatgatggtgtttgctttctaggccaaactctttggcaacaaaagtttataaagctcgatacttcccaaatgagagttttcttatagcacaactaggcaacaatccaagctttgtgtggaggagtatttgggaggcacaaaatgtagtttgaaagggcataaggtggcaggtgggagatggttgttcaatttttgtcttgggtgaaccgtggctgttagatgtggcgaacccgtttattgttttctctcattcgggtttggaaggtgctaaagtatatagtttgataagcatggatgagaaatgttgggatatggagattttgcaggacatgtttggggaacatgatagaagtttgattactaaaattcctttacaagtatcccaagagacagagtaattttttttggcatgtagagaattcatgactctacacagttaaagtgcgtacaagcttattcaacagggtaaaaggttggtctttaaagacaattactctaagttttggaagcatctgtgggctttgtgaattcctcctaaagtcaaaaatatgatttggcgcgcaggtataaattgccttcttactatgtgtcagttgttaactaagcgggtagctgttaatgctgtttgtcctgtgtgtgaattggaggaagagactattctccactgtttggttacttgtaatgtggtgcaatctttgttgggataaggtcgggataggtacttagcaacctaatgataatgattttttgtcctggattgcttctttatttgaaatgttggaggttgataaaagggggttgtagctactctttgttgggctatgtagaacgccaaaaaatgatgtttttttttaaattttttatttttaaaaaaaggtgagtgcttcgaatattgttgtgtctgctaaaaactatctttacgaatggagaaatgctcaaaaatctcagattgagatattatggtctggtttctaggcgggtgatggagctgagcaatggatatgtccacctattaacagtgttaagattaatgtaatgcagctttgtttgaggaagagactcggtcgagagtcagagtagtttttagggatgataagggactctttatagagggtttcacaaaagtctttaatgaagcctctgttgggattttatgccctaaataaaacccatttatatctaatctgatttgttatcaatataagattataagtcatttttgttta

SEQ ID NO: 17436 - DNA, 3902 bp, Cannabis sativa
aaaaaaaagtgaaagcaagctaacaaaccaagaataataacagcagctgatgtggtagcaccgagccaacgtgcttccttcgcagtcagaccatataagatagagtataccacaagtactacaagtgagccaaggtagagcagcccaagatgcgaagccctaagcatccaatacaaatttaggaaagaaaataagaaacaaagtttcaagaaaatcttagcctaataataaaaaatgaatactcaaaggtacaaagatttctacaaaaataaataagttcgatcaaaacttatcgacttgtcttggaattgatagtaccaatgtattatcgagactcataataaggaagtaagatgttacaaatcaagatcaacaaaaatacaacaattgatatgaacacacaatattatgggttggcttgcctgctagattgtcgagtatatagctcaatagggtctggtggttctggtgtacaagccacaggacccgcttctatacaatcagagtaagcaaatttatacgcctttcttacatactcatccacatctaagccatttcctgcataaatggacagagacttacttacaaaaaagagaataatcaaaccccaaaaatgaaaaattacagcaagtgctactgactattcaaacagtaaagattcaattgctccaacacgagaactgcacgtaccattaaacaccattctacatataaagagcatgttaattgctaaggcgattgctgatacgccaaagaagaaaccagaaggcgaataccgctgagattcctttgatccagctgtaacatacacagcacaaagttcgtatgtgcaaagaagagcaacagctagaagtagaagaacagcaacagctcctgtagaagtaaaatcaagagaaacatgagtaaccgaatttctggagtcaagtggaaaaacataacaaaataatatataatccatcgagagctcaacctcgtcatacaagttctagtaatgacctaggatgtcacagaactttaatataatttttcaccagaatggaccagacatagttagcacattccattgattaaccgtcataaaattttctacctcattattaagcaaattttctcaaactttaatagaactgcaaattatcactaaccttctttttatttttggaaattagaggatatttgtatcaatcaggaaagagaatacacaacctttaaatccaacctaaactaaaaacgaaaatataaccgatgaaatttgtctaaatataaccgttggattcttcttatactttccacttgccatttgaaaatttattgaagtttctgaacgggtctaaatataaccgttggattcttcttatacatactcgttctgaggttcaaaagttaggtaaaaaaattgttatcgtcatttctatgctaatattattatgtttcatttacacccctctgaatttagatgagcacaatgtcattcatgcttgcacaattgcgatacttatcattataataaaccgaaatttcaggcagcgttgttaagacgtaagaacaagtactataaacttacaacattgttagatacttaaatgtaacaaatgaaatacatacttgagctttgccattgtgttctccaccaaagcataattgaataaaaggctaacaatagagcagttccagccattatcaccgccagaccgattatatctcgacccaatattaaaatcaaccagcatccccatatgataagaacaacaaccggagaaataacaactgtccatgccgagagagacaggaaaccgcataatatattcaactgtggtccttgcaatatgtctggccattttctggcaaagatccaactgaaacatatgaaagcatagaactttgttaacacttgactaggaagaaacttgagccaaaaaaaacacctaaagggaatagatttagataagcttctaaacatcatcatggaaaaccaaaatgtatcatagtttaaaagaatccataaaagggtcattaaatttcttgctagtataatgtcaatgtccactaatgaactctttggtctaagaaaaagtagtaactacaaccaaggaagaagctttaagagcatagggaggaaagagagtatacaccattatgaaaaatcaaaatgtatcaattacataatttaaaaagaagggactttatgaagcaaagtgagttaataaaacactaaagcaaaataaattataatcaaatccaatccaattaactctttttcctaagcaaaaaatagaaactttactacggaagaagtgaattaagctaacctgtaaatcctccacggcctccaatttactgcccataatatagaaaacgaagctgaacccaaaaaagagaaaatggtcccagaaatcacacaagccaaaaacaggctatgctcatcaccttccattgcccaactctcttccctgctccattcaccacatgcatcaaaaatcaataacccaaacaaaaagacacaaactttggccaaatcacaaaataaaaaaaataaaaaaattgagcggttactcttcttcttcattttcctcaccttttatacctcaaaatccagaaacctcaacagcatgatgcgcaattcagcagaaatgggccattttgaaatggggcttttatagctcaaactagggttttcagctgaattttgagatgatgagtaagtgtgaataataaaatcaataaatgtaccaaaaaaaaaagtgaaattgaaccaaaggcaaaaaaaaaaaaaaaagctaagttcttgagtcaaaaaagagatgatgctgaagaagatgagggaaattagggtttgtttggctatggtgaaaagctttatctttctcagagtttcttctctcacagattttgtttcacagagaaacaaaagtgaaaaaatgagtaaagattaaaaaaccctactactacaacaactactgctctctctttttatctgtgaactgttaaaataaaatagtaaaaattcaatttttatttctcttaactaaaaaaagaacactttttttttcagaaaaacaggcctttttatataaaaatcctatttttatttttgggggacaaaaattcagggagtgggtaataaaataacagctaaaatctctgtggattttgtctttgcaaacggcgcgtgtgtcttacgcgctctgttgtctgaacataggggtattttggtaatttcatatagggtagttgagagagactggtttggaagggagagtgggaatggaagaaatttagaattttttttggaaaaaaaaaataaaaaaggaatgattttttaaggttttttaataggaaagttgttttttttatatatataaaaatatatttttttttatatgtgtgtatataagagtcaaagtagttgtaaaaaaagaatggatatattgaattattaggtgaggaattatgtctcattgtctgtcaataccaaattatttgtttaattaggttaaataaaaataaataaataaaaatactaaaaaaagaattcagatttagatgtgttttttagtcaattggaattgactttcatagactcaaaataataataataaaataaaatagtaagacaaatggtaatagtggaattgtattgtcattttttcaaccaatacattgcttaatatgaaaacactaattaatatgattttgattttaacatatgaatatgagtatagagttgaaaataatctcaataaaaagaataaattaaaaaaaaatgtgtaaattgctgttaatacttaagtttaacttttgattacaaataaatatttaagtttaactttttagagtaataatacttaagttatatttatagaacttctataagtaagtaagtgtcaagttattattcacgt

SEQ ID NO: 17437 - DNA, 4030 bp, Cannabis sativa
ctcttttagctttgaatccactatgttcaactttgatgtcaactctttcaaatctttgtttaggttcagtaatgaaccatcctttgctggttttggttcttccacatcctctttagtggttctggcctccatttcattgtctgctcttaactcactctgatctgaagttggttcaaattcttcaaaatctttaacaatcttccaaaaagaaaaagaacaatggaggatcagaatcaataccggcatggttagttaacaaaatggatttttagtaactgttcaagactacataataaactaccaaaaaaattatcttaccttgtgaggtggtggtacattttcaagtccactaggaactttatcttttaaaactaaagtttcataacattgatcttgctttgattctccatttttcggtagcaatactggggaaggtgcggggctgatgagcacgactcttagcttcctctcttcaacatatttccccccatcttttgaaaactgttcaaataagaacaatttggtatggaaaagtacatacataagatcaatatttccaaagcaaataatcacaacaaactcctaccagttcagatgtaatatcctcttctgtagtttcagccgaaacatccgtgcactgaatcagaaacttgtctttacactgcaaatcaggcggagctacacgctgagcttgcatagtcactgcaccaaccaaatgaagagtgaaactatgtccctctttttcttagcagatattaggcaattacacatatttatagcaaaacttattttggttgtataatatgattttgtgaatgtaaattgaaaaagattatgcagtgccataaagacctgtaaaatcacatgttgcattgggctttatgatgcctgtgttcggtcttacacaatatttcttgggagaagtagttttcacctgcaaatacattttgaagttcatataaacaccacaaccaaccatattttcctataatttcatgtgaattctagatggaaacatatcagtcattataaagaaaaacaatgctgaactttccaatatagaaaacattacaaatcattataccttaaaagcaagatattgattagacttgttgccaagaatgattgcacaagagctttgtttcttcaactcaactggcaaaagaaatggatgtcaagatcaatgacttaaaatgagaaattagtaaggaaaataatgacaaataattgaaagagagatcttttaactttcacttacatgtaaacttgagttcactaggttgtatatccaagagctctgtagtcatggctctaatcatcatatcaccaaaaccaatcaaattaaagtcaaagaatgataacaattattacaaaactttaattgcactaatggctataaccaccttaataccaaagccgatgaaattgcagtcaatactcaacaactcatatagcaaaactttagttatgatatgccacaaaataaagtgttttagaataaaagttgcacttttaaagattttaaagttcacactaaaatgagaatctcaatacagaccaagttaaaaggcaaaaacttgtagatcacatgttaaaacacaagcctgacactcaaaaataactaatcaaatcagccaaaaatataaaattcaagtgctaagtgattcaaaaccggtttaatcttcaagaaatctttattagtaatggcttgcattcttcaaaaagaatcaacctttacaatgtgtacggtcatatttcttaaaacaaataaataaataaaatcacacaagccaattggaaagaggctattcaactttatacaatatagacctataatgtacttcaattgtattcttgtaagacaaactcaagtactgcaatgaatattgtcaccaaattcccactgcagtggtaaatagtacaatgccaaaacatccatatttactcaaccaattcacaaatgccatattagagccttaaacaactaaacaaaccaaatctcacttagcattgaccaaatcacacaaaacccacatctttgaaccccaaattctgtacagcacgactacccaaaaaaaaaaaagtaaactttctttctcatcaagataacaaaagggctcaaacccagaaaccataacaggaaatcaaacacatattcaagtgcagggctttacttatttattaaattttaatttttttgaaaaaaaaaaaacacatttaaacaagagggtggtggagaaaaacctgaatagggagaacagagatcaaaaagtaagcaaaggttgtaaatcaaacttggaacaggaacacagagtgaagtccaaggaaaacagagggagaaagagagagagaaagagagagagtttggtgatctaaaaacactaaaatgtgtagatgataatgtgtttgtgaagcagagaagtgaaaacaaagcaagagagagagaaagtgtcgttggttgctttacgttgttgagttgggttggggtggggtgggtctgtgtctgtgaaccgtttcgttgtactacttccactctctctctctctctttcagtttcgccatcttttcttagaagtggccaacggctttctattttaatattcggctcggctctaatcccaacctagccatttttagaaaaatgacagcttttcattttatcaaatttcacaatattactattctcaaaaaaaaaattcacaagattacattattcaaaataataataataataataataataataagaagaagggtgtatatatatttggtaccttatattttatttaaatataattttagtactctgtatttttaataatacttatttggtaccttatattttaaaaatatatatatttagtactctaaactcaaaaatttttgataaaattttatcaatataattaaattgtcttcaattttataaattttagattcaaattaattatttaattacatataattaagaactatttgttcaaattaataaaattatattgattaaattttactttaaggtactaaatatgtattattttaaaatataaggtactaaataagtattattgaaaacacaaggcaccagatgtgttttacgagaaaagataaggtactaaatgagtatattcccgaaaataataataatatatgttttcaaactatttcttgatatcaaaaagaattggtatagcctttcaaaaaaaaaaaaaaaagaattggtatagtcacaacaataatgaatatatgtttacaagctatttcttgtgtaatgatttgattttagtattttgtatttgtgttttggtataagttgggaaactgtctgtttcttcttcgactgctacatggtcattttttaggttgtttgaaattaaatgttaatgcaacaataaataatcatacacaaaggattgaaataaaagctataataaggaatttaaatgattctattaagtatatatattcttatttttttacatttttacgtatataatttttatttttattgtttttattagcataagctaacaattatgttttgttaatttatcttgtactagttttttggaaattgatgttagttttgatgatttgcaggttttagctgtccaaacaaagtgttgtagcattagattggactcttcctgtgggtctttccttacattttgttgagtctgattatttagcagttgtaaatattctaaatgttcttctttcctcaatgaacttgattctttattagaggatttagttaatttaatgtctagttttcttaaagtatccataatccatgtatatcggacaaccaatgaaactgcacatagattggcttggcatgctcttcggatagatagagaactagtatggtagaatacttgaaatttgtatgatattttgattttttttttttagtaaacatattctttattacaaaaaaaaaatagcgaggtcagtatttttaagggaagttaataaaaaaattaggagaaaagtaagccaataaataggatttttatttttaaaatta

SEQ ID NO: 17438 - DNA, 5502 bp, Cannabis sativa
ttttttttctcagatatttgtactgtttttgtacattgtataaaaaatatatttgtgtggtgataaatgaaatttcgttaaaatgtcaaaaaagaaaagttagtgaggtcacactcatattcactatgcctgattgtactagataagttcaaacaatataaaataaaaataaacaattttaataatgatttttaaaaaatattttgattctcataatcaataatagaattttataataaatctcaaatcaacatctcaaatattaaaatacattcatgtagagtttctctctttacattgtattttttattgggaaaaataaattaaaaaaaaaattattattatcattattattattaaagcaagagctaaggctaatgcatgtgcttcatgaagtaagattgaaacaaaattgagaagagggccgtcctcttcttcatgtgctatattgtcataaaaattcgaaaaataataattataaaattaaattaaaaattgataaaataaaaataaaaataaaaatttcatctttatctatttgaggtgtaattgttttttgcttgaggagagttttattgaaggtcgagcctcatcacgaggccatttttatttcatagtacaattacaaataaacatttatagaaaaaaaaaattatttatttattaaaagaaagtcagaaagaaattatttttatttatttatttaattatttaatttatgtgtgagagagaaagatgatgtagtagtagtggtagtgaaaacccaagccccaaacctttctttcttcttcttcttcttcttcttcattttcaatatccccaaaatgctcagattcttaatctctccaacctattaaccttgaaactccatagatttgatctcaaaccgaaagaaaggaacaatctttacgaatttcagagaaaccccagaaaggaaaagccatgaaaagggaacatccgaatcagaacaatggttctgtagacccttcaatggatcctagctcaagtggtacaggagctggaaaagctgctaaaatatgggatgaagatgataactgttgtggtggacaaccagacggtggtatggatgaacttttagctgttttgggttataaagttaggtcatctgacatggctgaagttgctcaaaagcttgaacagcttgaagaagctatgtgtagtgttcaacaagataatctttcacaacttgcttctgatactgttcattataatccttctgatttatcaacatggttggaaagtatgcttacagagcttaatccttctcctcctaattttgattctgtaatggtaccaccaccaccaccaccaccacaatcacaacctcaaaggccttcgattattgaagaaacttcttacttagctccagctgaatcttcaaccataacttctattgatttcccagatcagagaaatcaaaactcgttagtgtttgaagattcatcttcttcagattacgatctcaaagctattccaggtaaagctatttacagtaatcaaacccattttgaaaccacttcttcttcaagagaatcaaaacgactcaaaccctcttcagaaacttacactaacgacgtcgtttcaaaccaaaacgataactcaactcgctctgttatccttgtcgactcacaagagaacggaatcagactcgttcatgctttaatggcttgcgccgaagccgtacagcaaaacaatttcaacatagccgatgctttagtgaaacagatcaattacttagctatgtctcaagccggcgcgatgaggaaagtagctacgttcttcgctcaagccttggctcgaagaatcttcagactttacccagaaaacccattagaccattccttatcggaatttcttcagatgcacttttacgagacatgtccgtacctcaaattcgctcatttcaccgcgaatcaagctattctcgaagcttttcaaggcaagaagagagttcacgtcatcgatttctccatgaatcaaggtatgcaatggccggctctgatgcaagctttggctctaagaccaggcggtccaccagctttccgtttaaccggaatcggacctccggcaccggataactcagatcatctacaagaagtgggttggaaattagcacaattagcagaaacgattcatgtcgaatttgaatatcgagggtttgtggctaacagtttagcagatctcgatgcttcgatgcttgaactcagaccgagtgaggtcgaatcggtggcggttaactcagtattcgagcttcacaagttgttagctcgtcctggagccatagataaggttttatctgtggtcaaacaaatgaagccggagatcgtcaccattgttgaacaagaagctaaccacaacggacctgtcttcgtcgaccgattcacggaagcgcttcactattactcaacgctttttgactcgcttgaaggatcggtcaacggtcaagacaagatcatgtcggaggtttatttggggaaacagatagcgaacgtggtcgcctgcgaaggaccagaccgagtcgaaagacacgagactctgactcagtggcgaactcggatggaatcgtccgggttttctcctgctcacctcggatccaacgctttcaaacaagccagtatgttgttagccctcttcgccggcggcgatggctaccgcgtcgaggagaataacggttgtctcatgttgggttggcatacgagaccgctcatcgccacttccgcttggcaactcgcagggaaaagactcagtgccgctcactgagtcacgcaaacgagtcgatgcggttaaccgggtcgggttttccgacccgcccgattcgtataagtttgccccgcattctgggttttgttttgtttttgttttttttttaacaggaaaaaatgtgttattttctgagctgggtgccttgctgagactaaggcccacaacaagacccataattttacccctttttctttttttttttgagtttgttttaattttatttaggtaattttttaggagtttttttttttcttttttatggttggatgaaatcttttttttttttgtaattttctttatgaatggaaaaaaaaaaaaaagctatgtttattgatgtttatataaatatgagtgttatttcaataagtggtttttttggtgaagtggaataagtgtcatatgatgttatattcaaactctaaatttgcataggttggattccactttcaacagtgttcatcaccaatttttaataatattatttatttaaagaaattatttttattgggtttttcttgtttaagaccccaacacttactataaatgtttatgtgggaagcattaattttctagtttttaattaatgtaatgtgtaaagctctttttttttttttaagtatttcaaaaaccatgttcaattatttcattaattactaattgattgaactagaaattatataatatataaataaaaattctttcttttaagtcaagagggaggcataatcatatgaaagtgaaaaaagggttcacttatatctaattcttgattgtgatatttactactttgctgaaaaagttcacttttttctttggtgttcttataaatatatatttgataatctcaataatgttctttttttttttatgttgtaattcattaaagctctagtctttttaaatttgtttagttccactcttttattaattctctaccattattattatattttttttttggggggttctaaagtggacttgaggaatgagtttaagtacatagaaaaaggaaaataaatagagaaaaatatgtgaactcatgctgtttggtaggcaagaaaaagcactctccactttccatggaaatcaaaatcttatacaaactcataagattctcttcaaaaatatatatatagaaaaacagcaaatttgggctgtttggtttagaggaaaatatatgtaaccaattgtaaatattcttatctaaaaactaattccaattgagtggtctacttcaacattttcaatggataaaaagattaaatattccaacaaactttattttctatttttcttcacatatatatattctctttccattttcatgataggaaattatgcattttatttacatatatttatttatgtttactatttgaagtttttaataggtttccaattacataattaattcaaagtttaaaacaatgtactagctattctagctatatatatagccaactataataataaataatataattgatttattgtgattatatatagtttctcagataccttcatagcaagctatgtaatgtgctatttataataattgtaaacatttatttatacttttaacaactttgaatctatacatattttatattttcaccttttttgctattaaatgttgtaaagcattattaaattttttcttcttaattggaacatttatatatatgccttgcttagtctttagtatgaatactagattacttaggtagctagatttaattatcttgatctttcatttacaataattaaaaatttaaaattttgggttcaattgagtgaaaagatgtcacataatcacattgtcactataatataaaatcaaataggagtcacctataaaattcttatgtgatgagagtgtcacttttgttctagaggaatttcttattttatatttgatgtacaatatacattataattatatatatttgatatttagtaagtttttgaaaaattttgagtattttaaaagtcacgaaaatatgatttaaatagatagtcacacatatacatgttttattcaataagcgtgcaactcataaattatcgatggttatagctgattatattatcatagagtttttagctacatatttattgttatctattttgttgagcgattttttcatttgatgaagatgaatttattttaaaagaaaatatgtctgcaattgaatatattttgaaacatattttttttattataaattatttataatttctcaaaaatttacataataatttttcttttttttacatgaaaaaatttacataataattattataattatagtatacactatcaatttaaaaaattagaatatagtttatttaagtactaaaaataaaaaatatcttcaacgtaaaatcaaaagtgatgcccccacgtaaaaaatctcaatataaggctaattaagatttttatcccttaaactttaatatgtattaaatcatatccgctgaacttttaaggtggttaaaaatcttccctaaatcattgagattgttgaatttaagaacttttttttataattttagtaaagaaagtctaacatggatacaattttaggggatttgattaagtacatgtaaattttgtggggcataatttggtagatattatgttagactttttatttgggcttacattaacttttattggttttattaaaacttgggttgattggatagttctttgct

SEQ ID NO: 17439 - DNA, 4817 bp, Cannabis sativa
aaaataaaattgtgctaaactcaactttttaataataccattaaactataataaatgaccaattctaagtaggctctatgcaagaaatttcacatactttttgagttggactataaaatatgattctaaaacaaagaaaataaagcttgcctttgagaagccaaaaaaaaataaaatggaagcacagagacaaaacagattaattcttgttccatgtccattccaaggccacataactcctatgcttcaactaggtacaatctttcattcaaaaggctttgtcatcacagttgctcatactaagttcaactctcccaacccctcccaataccctgatttcaacttcttagaaatccctgatggcttatcagatctgaatgtttcttccaagaattttgtatctgttttatctgattttaacatcacttgcaaaattccactccaggaagcgttgactcagatggtaaaaacagatggccaccttgaaaaaatcaactccatcatctatgatgagtacatgtacttctccaacgatgttgctaatcatttgcagattccaagcatcatcttgtcgactagcagcgccgcaaacatgctaacttaccaagcaattccaagacttgtaaaggatggttatattcccctgaaaggtgagtagacttcttttctttttttgatggaactaaagttggaaagtgatcgaatggtttgttgttgaaattaagggtgttgattggattagatctaatgtttttaggtccatatccaatcccattatatattgaatattatattttaccatttaatttaatttaattaatttcaatcattcaatcgatttaacattgttctatccattagatatatttcatgcctttctattattttaatttgaatttatctaatattttaagcttaatatttttttatcaaaatggtacccttcattttactttattttttgaactgtcgtacttatattgtaccaccatctaacctacagaaactacgttgctggatccagtaccagagcttcaaccactcagattcaaagatttgcccttttccaatttcacagactcagatggtttgctgcagcttatttctgaagcacacaagacaagaacatcctcagcaataatatggaacaccgcaaaatgtcttgaacaaccacagttagcacagctcggccaaggataccatattccattcttcccaattggccctatgcacaaaatggttccaccatcctgtaacaacttgttggaagaggaccataaatgcatctcatggcttgataaacaaacagataagtctgtcatctatgttagtttgggaagcatagcatttatggatgagaaagagatagtagaaatggcatggggtttagccaacagcaagcaacctttcttgtgggtagttcgaactgactcaggcattgacgaagatgtgattaaaaaactgcctgaaagttttgaggaaacggtaggagaaaggggctgcactgtgaattgggcaccccaaaaagaagtcttggcacacagagcagtaggaggattttggagccactgtggttggaactcaaccatagaaagcgtctctgaaggggttccaatgatatgccaatcttattttggcgatcagaaagtgaatgcgaggcatttgagccaagtattgggagtgggaatccagtgggagaacaaattggaaagaggagaagtggtccaagtggagattgttataagaagattgatggttgatgaagaaggaaaagtgataaggcataaggcaaaagagctgaaggaaaagattgaactttctataagacaaggtggttcttcctctagttctttaaatgacttggtcaatcacatcttgctgtcttaaatgagtgaaacgtctctgtttctcactttcttttttccttattcttactgtactcctcacagaactacacaaaagtttaaatcacaaatgtcttttaacttcaattatagagaaactaaagagcagagcacataattcagtaagctaaagcaatagtgaaaaacattcaaaaacacttaaaagaactattatactattcccttattagaaaatttgacacccaaacgacatattataacaacaacaaccaaaaacaacgataaagcattatatcataaactatctttcaacaatacacgaacccacttaaccggtgactcaaataacttggacaaactcaattaaactaaacatgttaatattcagacaaaagagacgaaatagacctcagtcctcgccagcaatttcaacgactctgacctcgggccttctagcttcctctttaggaatagtaacagtgagaactccattgttcataaaggccttgagctgatcgagctttgcactgtcagggaccttgaaactggtcatgaagctgccactatcagtgctaatctgaagaacccgttcgtctttaagctctacgagcacgtcttcattggcaaaaccaggaagacaagcttggaagatgtgggcatcagaagattccctccagtctacacgggaattgaccggagcacccaggttcaattccgggaaaacgcgggaaattgaggagggaaagaaaggaaaatctgagagtgggttccagggatcaagaaagaatgggtcataaacattgattcttcgatcattgtcgttggttgggacgatcgacatcgttggtgtgtggatagagtttgaacgggaaacgacggtacagaagatgagttctgtcgaatccaggtatttctagtatcttccttaaagtggtttgtctatttatacttggttttcatgatttttgttaccaggccgaagtttttttctttttttgaaataccaggccgaagttttatttattttatttttttttttggaaactatcaaaaatactgaaaggttaattttataaaaatattgacacatctaaattttttttaaatacattctttatataaaatagcagttaaaaaaaaattgaacaactaaaaataaaattagaacaattaaaatataatagtggaacaataaagaaaacttaaaacagtacacagtataaaaaatacacaaatatttttgaaaaaatttctgcactacaataaaaaagaaaaaaaaaattgtaaaaagatatgtatttttttttttttatcaagaaggaacaaacttcattaatcacaagcacttacaaaactatacaagccaataaaaaaggctccacacaagaattacataaaaattctctctatgtatctcttttcatgatctttcatatttctttttttagctacatgtaatctataatacatagtatctttgatatcttgagtaatttttgaagctgtactcgagtatttgttgaaaagacaattgtttctattgctccatatgtggtatatcatggctgccaaaagagaaacatgaattctatgaagtttgtcccctctgttcaagaccatccactgcttccagctaccgaaaccagtcggccacctcctcattcccagccacttactgatgtttttccccacctgctgagataactagcagtcaaagaaaaggtggccattgctttttgttgcattctcacagaccgggcattgtatgttgtcaagagcaatgtggaattgctcaaatttgtcacgggttaagagctgagagttgatagcttgccaaagaatgaacctgtattttgggaggttgaaagagcaccaaatgtacctgctgtaatcaaaaatagattgaggtatgctgctgttatacagcaaggcagccttgaatttcataccagcccctgctttgtgaatgtcttctcgcgtgaatttgtcccttagagaacatagtttcctccaataccaactagtgtcattcttaagttcatattctcaccaattattgcattttagataaatgttgttgacccatttcacccaaaggaagtccctttcggtagaaatagcccaaacatattttgcaagaatagctcgattccacttgataccatccttgaagccaaggcctccataggtctttggaagacaaactttctcccatgaggctacatgaagtttacttctattcccattccatccccatagaaatccccgacaaagtttctcagcctccttagtgacactatgtggaagaatgaatatgctcattcaataatttcttagcctaagaagaacagaatgtatgagttgagccctaccggcaaatgagagatgtctagttgcccatgtgtggagcctttgcttaattttcttgattatcacaccgcaatcctccgctttccatttagttggtcttaagggcaagtacttgagagggaattctccttcttggagggacagctctttcaccattttttgcttttcttcctctttcactcccccaaaatagagatgggacttattaatattgatagtaagtcccgaggtagcactgaattcatctagaatctgtttaataatctgaatcgagccaaactctcctttgcaaaatatcatcaaatcatccacaaaactcagaattaattatctttaggttcttacagagagggtgatacctgaatttggattgattagcagctagaagaagcctcctggttagatactccataacgaggacaaataagagcgaagaaagaggatcaccttgtctcagccgccccttcttgccttggaaactcccttgaactctcccattcatcaaaactgagtaagaagtcgattttaagcatgtcatgatccatttaacgaatctggccggcaagttgaattccttcagaa

SEQ ID NO: 17440 - DNA, 4806 bp, Cannabis sativa
agttttttttggggggggacgactggacaaagcaggattagggttttttttttttttggttgttggtggtgaaagaatggaggcgaggatgaagaagtaccggcaagtgagtccggagagagcgaaagtgtggacggagaagtctccaaagtaccatcagaatcggaaagttcctgtagtttactatctctgcagaaatcgtcaacttgagcatcctcatttcatggaagttcctatttcgtccccggaaggtctttatcttagaggtaattatagtaccagaaccagaatcatcactttcatttcaattatttatataaatatgtatatttatgttttatgagttattcgcagatgttattgagaggcttaatgttttgagaggcagaggcatgtctaacatgtattcatggtcttcgaaaaggtcaaattctttcagttctttatatgataattttcaatccttggtcttttgggtctgtgttcatagattttctttttggctgtaatttattgcagaagctataagaatggatttgtttggcatgatctcagtgaagacgatctaattcatcctgcccatggcaacgagtacgttctcaaaggctctgagctctttgaagattctaattcaggtataatagtttcctttccttttctttattgtttggttgcccagaaaatatagttcgagtagaaacatttcgatttcttatattgaatttgcataacaacacaatggaattccgtgaatgtcaaatcaaatctgagagctgaaacttctttattgaccaccagatcggttcagccccgttgtgaatgtgaaaatgcagaacttaaatttgaaacaattaccaggacctacatcttgtagaagtcaagacgattcttcatcttcatctagtctaaatgggaaggaaactaagcattctcaagaggaggaactctcccctccagtaaaaagtcctggctcttcagctgtatctcctgagtcaagagctgggaagaattcttccacatggtctaattcgctgagcttgactgagtataaaatttacaagactgatggttcagctgatgcttcaactcagacagaggaaaatgtgggtagatcaaaagtgcgcgaaacttgtactagaggtgtttcaactgatgatggctcattagagcctgactttagtgagagctatcaaaatcgggttctgaggggaaaagataactcagagatttgcagtgattcagtttcacctcctccatccacgtctagtgcctcatcctctggtgggaagacagaaactttagaatctttgattagggcagatgctagtaagatgaacagtttcagaattcttgaagaggaagaaattcggatgccaaacaatgcaaggatcaaggcttcaaatgttttgatgcaactgatctcgtgtggttcaatatcagttaaagatcatagtcttggcctcattccttcgtacaagccacggttttctcattcaaagttctctccctttttctctagttcgattatgatgggggagcttgattgcctgtcagataatccaaaatttatgggtttaagattagaagataaagaatattttagtgggagcttgatagagacgacattgcttaaagaagatggtcatacaactctgaagcggtcatcgtcatataatgcagacaggttacttttgcccattgattcagttaattttacactatgttaaaagcttttttatgtttcacaattatctcttatgctgcaaatataaattattaaccatgcaagtagtttggttaatttgttattccaagtactgaaagagatgctcaacactgcagctcagttttgtttttgtgctgagccttatttaatgaagacaatgccacaattattaagctagtcaaaagtgaagttaaacttcgtcatgagaagaattgcttaagcttagaagatttacttgtttcttgtttatttggctcttcagttttatattttcaaatattcatgtttgctagataacacaaccttgcaggacctgtaagcaattggaatcaaatgaggatactgaagagtctacctcagggcgttcaaaatgcatcccaagatcgatcaaggcttcactaactaagcaaccacgatgtgattctatgaggtccccagcttctgatagaccaagaaactcttctgatggtattgatggctcgaagatcatttcaagcccatccaatggtgctagtaaaagaattacagaaccttcaactaatagggaatcgaaaagactagattcttttagggaggaggagaaaatgattaagattgaagaaagttaagtattgactcctcattttgtacattatttgcttaagatatcatcaaaataactcccaaatattatttgttcacatgggctgacatttttgttaatttcctccaacaggcttgcttcaggagctagggttataatccagtccaaagctccttgccatacaaccacagttggcagcacatagaggtcctctgcaaacatactatcaagtaatgcattcacaattttaggcactttgttcatttctgtacaattagggttttttcagtcgttgtttgaatttcaaatgaggcaattttttttgggcgcgtacgtgtaaatcatctctttgtaaattttgctagtgaaatgaacagagaaaacctttgcttgcaaagttggggattactggtagtttagtttagtgtgttgacagacactgtggtggtcctggtggaccaaacccctgagtgttgagaataggagttggatttttggtttagtttttcaatagggattgtacttttctgtagctaacgtcaaaaaaagatcttgtcattttactagtctcatttcactttttttcccacttaatttattttatttcatattagagtttcatataatagcaatgctttttataaaaatttgatattgttgggtggcaaactagcaatttgcatttttcataggattcctttgctttgcccacgtatgtaattgagttttgactaccattttttcttttttgaaaaaaagcagatatttgactcgtagttgacagtgaaaaaggggtattgtttatttatttttcattaaataaatatattgaagtcaaagtaaccaaaccaatcacctaacctggtccttgggccctggctagtgctacagaaaaatagtagagcggaaattataaaattatctcttgtttctttctttgatgagaactttgcttgttatgttaaccaaaccatagtgccacataggacatagccagtgtgtttttcttgtcgttgtatgcaagtagggttaaaataaatgtggggtttctgctactggacagatgcagaattagaacattgctaatagttaattgtttggttggtttgtttgtttaatttttttatatatatatatatatatatatatattatattccttgacaatttaaatgtttgtttatgaaagaagtggctaggggcaatggggtatgggcttctaaaaagttactctcacgtgtgagacatctttctttaatgtgttttctcagaattaaggctttttgagaccttaagagttaatagtgaggcagtggttggtggagaataaattgagctgtctatggcttttccttggttgtagtgcatctgggttttggggttttctttttccatcccttttgaaaacttttaattgctttttcttgtggcaaatcaaatctttcaaaattgataacttgctcaaatacacaacaatcaatcttctttttacttttgggtacttagaatgtaatagtagagtagtatataatacagaaacttatagcatactcaaagggaaaaaattagtatgagagagagagagagagagtatagtgagtgactacgtaaggtggtcttttatgggtcttgttaatatttggtgtggaggtgtgtggtccaacttctaatgagtaaatactgattgtgatgcgtatccttagagccaagacacacactctcttttccaaattagagttacaattagcttttggtcagtcactgtccatattgttgttcacatgtgctcaaacagagttggatctttgtagcattcgaaaattccatatgaggaatctaaaaaatagcatgcgtctttaagcatgagaaattgtttgagactatataataatatagttaatatttatgcaattaattattttggagacctgttttatttttttaaaaaataagtaattgtatgattattggtttaaattagagatttagttatatttaattaatgtgtgttttgacttttgagaccaaattattatgtgattatttcttaactattggtagaagtagaattgttcatacgatgtagcggaaaataccagcgggtaaaaatatactgaaatgtggtattttaaacttatttattagtgattaattgttggtgaaattactaaactacccttacttattttttatattaaaaaagagctaattaaatttaggggtatttcagtcattggatttaattaaaagcgaatttttatttgggtaattatctttgcacccaaaataattataagtacaccactttttgagttgatcccatttaataaattaaaatattattttttttttgataaaaacacctcatctatttacaattttaggtcttgaatcaaaagtacactccactcacgtttagggtttttgtttgggaaacttacaaaaatactagattttgggttaaattttacaaaaatactgtcacacggaattttttt

SEQ ID NO: 17441 - DNA, 4846 bp, Cannabis sativa
taatttcattactatcgcgacatgtataaatccctagtgttcttttttatttatcgggattttatttagctaaattaattcatgcaatccttttattttttacaatcttcttaaattagttgacgaaaaattacgtcaacataatataactaaaggggcagatttgcaagtcgcgacgatttttataattcaataggaatttttgtaacaaaaaaaaaaatcagtgaacaaaattttacaagaatcataattcaagtggacaaaccctatttactcttaaaaacaaatatcaaaaaaatttaactaaaatacttgattgccaaaagatattctcatatcacttacgctagcttgattgatagtaccaaactaccaatgaaaaataactgaacacgacaatgacacagtccaagtcaaaaaatgcaccaaacatggtgatgatatcaaatataataataaagactagcaaaatgagttgagcagccttcaacaacagctcttataatccaatgattatgcaaaaaaaaaaaaaagagtatccttttttaaaaaggaaccaattctaaagacataaacctatctaaatctatgaaaaaacaattaacattttcatcattgtccaaggcaaaatctggtccaagttgttatgcaactctttcaatttcaactagtttaagctcccccagaaccatacttctttccgaaaacaatgacctgaagcttgtcataaccggcaaggacaccagcaccagcgacagcacgtaggatgttggcaccagctcccttgaagagagatttggcaccctcattcttaagaatttgagagaatgcatcgaatgaactcttgtacttaacggcttcgcctgatgtcatcatcattcttctgcgaacggtgtcaattgggtacgaagcaagacctgcaccgttggtgataacccaaccaagagcaaaactagcaaagaaactatcctgaaaaaggtttcgaaaagagaatagagttattagcttaagaacattcacaacaaaattcaaattacaagaaactatataatcaaaggctttcaaaagctgtttttggactctacaaagctcttttaagataagctagtttaacatttggtgttaatcataaccgaatctttacctgcatctttccagttaggatcacaggcttcaaagaatcatacattccgaagtacaaaccacggtagacaatgataccaacacaagaaatgttgaaaccgcggtaaaggccagcaataccatcagactttagagtctttctgtagacatcaaccaagccgttaaattgcctctctcctcccttctttgctgccttagaatcatttgctagacgggttctggcatagtcaagagagtaaacaaagagcaaagaagaggcaccagcagcaccacccgaagccaagttaccagcaaaccatttccagtaaccatccctgtctttcttgaagttaaagagtctcttgaaatagtctttgaatgcaaagttcaaagcctaaaatgttaaagacaaagcaataatgtcagcttagacaaaatcaacaagttgggaaacagaagattccaatcaagatattcgaacctgagttgggaaataacggatgacattagctgtgtttcctctccacaatgaaccaaatccttcatctttgatagtacggcgaaagcattctccaatacccttgtaaggttcagagagcctaccggccttgatcatttcatcctggttttgaatcaagagcttcacacgctcgattggggcagcagcggttttggacacagcagctgaaactccacccatgagaaaatcaatggcaaagccagcaattcctttctctgaaggagcttggacaaaaacaggcgatgaggccgaagtgatcattgacagatcaacttggcttgaaggcatcataggagactgcaatgctgcagtttttgagtaatttccatacgagaaacgcctttgatggaccgcaggccttggaagagcagcgtagcggttttgaatatcgttggaaaggctggagcccaagtggacttgaccggcaaatttttgcatcacagatggttgttggtgcttctcagccattgcttttcaacaaaagactcctgaagaaaatatgtatcacatttgtaatgagagaatgaactctttagatatatatatgtatatcacatttgtatttactcgtacaacaaaaggaagaggttttattatgggattacttcataaatactcaaaaattacaaaagtttactttttaatggatctacaatattttttaatgttttatggatatttttctaaatagacatgtgggttgttggtttaaagttgttctaaaaaaattgttttcatattacattaacattatattattccaaaaaaaaaaaaataaatagaaatagtaaaattttaggtgtaaatttttctaatataattctttttcaaactaagcatttgatatgatcatttgagcaataaaccgaaggggtttcaacaattgaaaatttgcattatatctataatgattagaattacccaacaagatcagattggaatgaatctacaaatgcaaacaaaaaaaaagtcccttaaaatgataacaaactaaaatggcctaaatttgttttatacataaaaaatcatcacaaggaacataaatccaaaattttgactattcaaaaaagatattttaaaacatctgttcatcaggtttgtcaaaaagaaaaacatcacttcatcacagtaaaataataacaataactagacaaaacaaagaatgtcacattaggatttcaatattcctaatacaaaactattcaatcaaaggtcacaatcaagctctaaactttcaatccttacaatcaaacccatttaagaaaaaacaaagctaaaaccacgcagagatctaacgatgcaatactgattggatcaaaaaagacccttttgcgagttcaatacaaaaacacaaaaacaacaatacccaaataaaaaaacgcaacaaaaacctcaaaaaagttatcttttttaaacaaaaacaaatacagagcccaagatcatatcacatcaaaacaagtaataagaaacaaaagtagagacaaagaagagtaccctttaaagcccttatgtgaaagaagaagagaacactcaacaattgagttatgggttgtgggagcgaaaagccaatgaaagaggtctgattagaagaggcaaattcggattttatagccctcctcgtcctcgtatcatggtacccctcgtaaacacaaataaggaaaccataatctggtgcatcgcgggtgtattgtattcttaatggtctttagtgtaagattcaatgaatttgggaaagtagggatataaatgtcatttatggaaaagttatcggccaagaaagttgcgttcgaatttaattatgttgaattttcaaattgggcacttgtgttttgttatttttgcatattgacccccattttttttttaagaggaaattataaattttatggaatttttatagtatttgtgcaaaaatatgatttttaattttaaaaaaaaatattttatggaaaaaatttaatgaaaagttaaaaaatataagaaaattaagtaaaggtaattaggtatccgaataaatagaggtgaaacttgttaccatacacaaatctatactttaaaacctataaagaaaatgaaaattcccctttttaaaacggttttaaagtatttgaaattttatgaattgaagattttttaaacaaaaatgaattgaagattcttgttgaaagctaaaatgacgttttcttgaaaagcttttgttaattggtttgtttacattttataaaaatcaattgtttggttcttagttatgttttgctaagagatccttgcaaggggcggtcttaaaatagggtaggctttattaaaagaataaaaattatcgaactatttataaaaaaatatatgatatttttgaaaattattaaaaattttaaaaaaaaaatgagtttttaggctgagtgaaccctagacgtaactaataaattgtgtgcagagtacaataaatattattagtgtaaatttttcccactcaatcttcgtaataaaaaataatagcatttgtttagacataaatataaaaattgtggtgtggggaaaaatcttattgaattcacatgggaaagtaagctaagcacaaaattattggtgaagcatatgggatcaatagaacaaaaatggtcaaaaattaaagcatgaggagcaatatgaaaaagttgtaagcaatttggacaagcaagtaatgatttttatatagaagttgaaaaaataaggaagtgttaattatggactcaacttatttggaaagtttactttttcctcatataattcttctcaatggctggtgaggttttagttggcaattttgacaattcagttgggaagtttgataaaatatttatctattaagttaaaattttttctctaaactaaagttaactaatattggccaattaggccaacttttgtatcctaaaattccctcttattttttaaaacattctcacctctctcttcctctattctcttgctctcttctcggacttaggggtgaacaaaatatgggccaaaccatttaacttagctaactcaatccattttttttgtagtaaagggttatgttaagagtaggtcatgacttattgggttgaaaaatgataggtcatataattatgggttagacacattttaactctatataacccaaaccaacccatttcttgaaagatgttccaaatttgagacttctttcatacataaaatata

SEQ ID NO: 17442 - DNA, 10016 bp, Cannabis sativa
  modified_base (4798)..(4809): a, c, t, g, unknown or other
ttttttttttttttttgttctcaatgggaaagttgtgttgttttctaaagtaaaaaaatgaccaaaattacaggaccagtttactacaagggagtataccacttgttctatcaatataacccacaaggcccaatatggggtaacatatcatgggctcattcaatatcatacaatctaattgattgggttcatgttgatattgctttaaggcccaatgatcctaatttagacattaatggttgctattctggttccataaccctaattcaagatgacaaattagccatattatacactggagaagactctaaaaatcatcaagtccaaaatttggccacacccaaaaatccctcagacccttctcttagagaatggataaaatatcctaaacctttgatgactccgatcgatggcattgatccaagccagtttcgagacccaacaacagcttggttgggccctgacaacatttggcgggtcacaattggagcccgccaaatggatggaaaatggatggcatttttgtacaaaagtagggattttgagaactggaccaggtctgaggaaactccactttatttgttcgagaaagatttagtggttgagtgtcttgatttttttcctgtgggaattaaaggctcattaggtgatgatgacaatcattacttaaataaagatcaacataagaagaagtatgctttgaaagtgagcttccaagctaaagaacaagattgttatatattagggcaatattctgctcatttagatgagtttaaggttgagagtgattttatgaatgatgatttagatttgagaatggattatggaaagttttatgcttcgaaatcgttttatgaccccgataagaagaggagagtagtatggggttggatcatggagactgagagtagagctgatgatatcaaaaaaggctggtctggactcatggtaattaataattatgcaactaattctgtattagtctctttaatttgtttttttcaaccattcttgtaagagtattgctataaggtagcgcttaagatgctcaacatcatacaacgtaatgttttatgagttagttgaatttcgttatagattttacagctaacattgatcatatataaatatgtttcagtcatttcctagaactattgttcttagtgaatctgggaagcaattaatacaatggccaattgaagagatagaaaaattaagaggtgagaagattagtgtcgaaaacaaggatcttcattgtggctcgctctttgagatttctggtgtcacaacttcacaggtaaactatttcagtttgattgttactgtatgacaccttacaccagttaatacaataaacattgattgatgtaatttaatatcgagatctacgtattcaaaataaaatacaagtgatttgatattaaaatacacaaattattgcatgtcacatcatatatagtgttggatgtcttgtagtaatatttttggagttttaactctcttaattatttcaatattttttttaaaattgtaggcagatttggaagtttcgtttgaaattgaaataggtgaattaaaaaatgcggagttattagagtcgagtaaggttgatcctcaagagctttgtaaagagaaaaatataagtgttggaggccaatttggaccctttggtttattagttttggcttctgataacatgttagaacaaactgcaatctactttcgaatattcaaaatcaaaactgatgacgattgtgagaagtatgttgttctaatgtgtagtgaccaaagcaggtatactatttattcttgttttatcatgatttatttttactttattatttttgagaattttaatgagtgttaaacttgtaaaataactttgattaggtcttcattgagagatgagcctgtaaaaaccacatatggtactttcttagacttggatccactccaagagaaaataacattaagaaccttggtatgtttcattaattaaatttatattatatatatgtgataatatattttaaaaagaaaaaaaaaatacataaaattaatcatagactattttttattattattttgccaaaaaaaaaaaccaaaatttccaagaatttccaatggagtattgagtaaatttaaaataattttatataatttattaaaagaatgaagatttgaattttatactttctctttgtgagatgaagtaaaagtgctattgccaaataccaaattatataattttatatattgaattagatattctaaaatgtttgttataattgcttaaaatctatgaaactgtttttgtatatatacatacaaaaatataattatgtaaaatatgggcttttattttgcattggtgtagattgatcattcaatagttgagagttttggtggagaagggagaagtgttatcactgcaagagtttatccaaagttggcaattgacaaaggatctcatttatatgcattcaactatggaacaaagagtgttaaaatcttaaagcttaatgcttggagtatgaaaaatgctcaatttgaatcaaagagagaagaagaagaagaagaagcaaactagtaataattttgtttatcaagtcaaatcatttgaagattgaaacattaattattgatcatgcaaaatttcccaaatggatatctaaaagggattatttagttagttttcccttgactccttgtatgatcattatttattttgtgataaaaataaattgttatttgtaccttcacttttatttttggtcatatatgtgtgtcttgcaacaaacaaaaataaataaataaataaaatgctaattataatttttttctcccaaattttaacatctacgtataccaaattatattttttgaattttttagaccgttgaatttttttcccaaattattgatattgttggatttgagaactttggtccaattttattaaaggaagtctgacgtggatgaaagttcaagtgacatgatctggtaaatacttaagttcggggacacgaattggtaaacatcaaagttcgagaggcatgctttgatatataagtaatcgtcgcgttagtaaaattgaatgaaattttacaaaaatctttaaattcaataatctcaatagttcgagaaaaaattttaacaacttaaaaagtttaagaagtataatttgataaatgttttaatgatttttcagaaaaaaacctttttttttctttaaatatatggattcaattgttagccaaattacattaacccttaatcaaagtaaataaaaatctagtagtaaataataaaaaaaaaaacaacaacaataataataataaaacaaaaactattttgcccgaggtagggttgcactttattatttatttatttttcgagattttcaaatgggaaacgagacgtgacgggaatatgttttatattttttatctccgaatgtaaaatttggtgaggacgacacaaatataacactccctgcccacttaattacttcaaagtgaatatctaaactataataagacaattaattttaaagagcagaagatctaatgatcgaatggctaaggaacaatattgagattaagtaataagacaattatttctcattattgctcacactcatttgtttacttaagagcttttattctataattttttcccaaacataagaaactcacttgaattttgttctagtgattgaaataaaactcaagaggattaggtcattaattatttgttattaggattgaatctctataaaatggcatttattcttttctactattttgtaatacaactatcgttttctcaaacacattgttattggctattttcataatcaatactatatatttaaatacatttacactaaattgtatttgtaaatatttaattaaattatggaggagtgagataaatatagagaaaaaaaaaacctaatatgatagttcacaattttgttcgagtctccatattacactttagttgtaattttagtttgaaatctgttttagctaatttgctaccgatattagtagtaggagttaatggttaatgaaaatgaatttctcattaaaaaaaaatatatagaagagtgggataaaaaaaatatataaaagaagcatccttgtattttattggcaatgacaaggaaactgcctatctaaaatcatagttaaataagtcaataatatatgaagtcaataccttgaaaaaattaaatttaattaattaagccatatatgtttaattgttatcatttataaaattatttccattgttaaaaagttagatgatgtaacatactttatattttatgcaatatactatagtagatgctcatttataaattttttttttttttctaacttattccatgaagcatgcatctttaatcctgttggtttagattaatcaaaacaacaatacgtgacaaaaataatataaaataattaaataaataacaaataggataaaaatatatgtaaaaaataaaataaaataatataaatttatttatttatttctaaatttatattatattgaaataaaagtgctatagctatgacaaataataataataatgggaattatcatatatattatttttttaactttttttttttaaatttaccgtttgaatttttaaagtagttgcagcgctagttgcaatagggatttctatataattttttgttacaatttaggttgcagcgctagtttcaatttagtttgcagctctagttgcaataagagtttctatgtaaaatttcgtaannnnnnnnnnnnaaaaaaaaaaaaaaattgaagtgtaaaaatgaaaaagccaccaatatttaaagaccaaatagataggtagctagcttaataaattaatggctaaactatagtcaatggtctactttatatatttctttaaatagataactttttttattatttttgtataattttgtgcttaattttttaatgcaaagacttgttctatatacaatgaagaaaaaaactttggctatcataataatcaaaacttcattataattataattattattattattgagagaagagaagagaagagatatggaggatgaacaaccttatagaactgcctatcattttcaacccccaaataattggatgaatggtaatttgttattattattattattattaataattatttggatgattatatatagagagtttttttttattttcttctaattgatttatttttctttaattttcatgttgattatgatggtggctcatatatatattcagatcctaatggtatgttttctatatatatttactttaagaataatgccattaatattttcatgtggatttttgctaatttagtaaataaacattattacctttttaacaattatagatttttctactcaatcttaagttttacatctatataaaataactggaaaaaaaatctggattttttttgggaaagtttagttctttattctaaagatgagaaatttaatatataaatatattacaagaatagtatacttaagcttaaaggagtattatgaataaaattaaggaataaatgcaaaaaaatattaataataataataaaaaaattaaccttttgattttgaatatctttgtaattattatgaatttagtaaaattaaactaagtctatgttttatagggagaatttttatttttatgggtttttttttttggcaatgtttataaaaataaggcttttattttttaatttttttcccataaaaatgttatttaaaaaaataaaccatattatataaaaattgataagtgtgtaactttcaccagttttattattatattattaaaaaaaattcattgtgaaccaaaagaataaatgtgaatattactaaactagccttagttatcatttgtaaataaatttgaatttgaaacctaagaataacttggttagatcaaatttgggtttaggaataccaaatagacaatagcgaaaacaaaaaatacaggatactaaataagtattttaactgaaatttgtgtgacgtttttcgaaatacgataaaaatacaggaccaatgtactacaagggagtataccacttgttctatcaatacaatccaaaaggtccagtgtttggtaatatggcatgggctcattcggtatcatacaatctcgtcgattggattcacctcgacatagccttgaaccctaccgatccagatatcgatatcaatggttgctggtccggttcaactacgcaccttccaaatgacaaattagccattctatacacaggaagagactctaaaaaacaccaagttcaaaatttggccacacccaaaaatccctcagatccttttcttagagaatgggccaaatctccactcaacccaataataagcccaagcccagattttgacccaaaagaatttcgtgacccaacaactgcttggttgggcccagacaagatttggagaatagtgattggagctaagatgggaaatggtaaatgggccggacttttattcaagagtagtgactttgagaattggactcggtccactaagagcccatttagtaaattatttgaaaataatgatttaatattggagtgtcctgatttttttcctgtgggaatcaacggctcagatggtgacaataattatatgaataataatgatcaatataattatgagaagatgaagaaaaagtatgctttgaaagtgagttttttagacaataaacatgattattatgtattagggcaatattgtcctgaaacagaagagttcaatcctgaaagtgaagtaattgatttaagattagattatggaaagttttatgcttcgaaatcgttttatgatcatgaacaaaagagaagagtaatatggggttggattatggagtctgataatgatgttgatgctaatgttagaggctggtctggacttcaggtaataataataatagtaataatattaatgtatttaattctggataatttattgaaattaggattcaaatgtgtttaattatctttttaagtgtctaaaataagttttttgaacactgatgttgacaaagtaaattattatctacatgttgtcgaaaactaataagatatttgttataactattatctacgtgttgtctaaaatattattttgcaaaaaaacaaattgtaaatttacattgtaaaatagtatgttttcactagttttccctgaaaaaactaatatcgattacatgtaaatatgtatcagtcgtttcccagaacaattgttcttagtgaatctgggaagcaattaatacagtggccaatagaagagatagaaaaactaagacgtgatgagaaagttagtcttcaaaacaaagagcttcatagtgattcaatcttcgaaatttctggtattacagcttcacaggtaattaaaataaaccaagcaaaatttactttctctattacgagtcataatattttatatttaatttcgtcttctcaattgtatttacataaatatttaaaggtggatattgaagtttcgttcgaaattgaagtatctgaattagaagaggctgagccaatgaacccgagttggattaatcctcaattactttgtaatgagaaaaattcaagtgtaaaaggcatatttggaccctttggtttgaaggttttggcttcaaatgacttatcagaacaaacttcaatcttctttcacatattgaaaaccaatgaaactgagaaaaagttcaaaattctaatgtgtagtgatcaaaacaggtacttataattttgtttcatcaatttttttttttttaactttgttattttttaaaattttgagtgtgaaacttatttttggacaggtcttcattgagggatggagttgacaaacacatatatgggactttcctagacttagatccttgtcaagagaaaataacattaagaattttggtatgtttatcagtccttttattttatagttttgataaaaaaaaaattatattatttcataaataattaaaaatggtaaaatctatacaaatttttacagattttattttattttacaaaaataggaaaggttgtttttttattgttttgaaaatatatatatatttaagttcttttggtatattcactaattaatactctttatttgttgaaattatttgagttccctaatttaaaattttgaactgtcaccatcaaataattttttattttcataaattgttattagaattatataatatagacctatattatttgttttgtttatggataaatatacatgttgtgtattaaaatgtattttgtagtttactttataagaactttttaattcatgtgtgtagattgatcattcaattgttgagagttttggtggagaaggaagaagtgttattactgcaagagtttatccaaagttggcaattaacaaaggatctcatttatatgcattcaacaatggaacaaagagtgttaagatctcaaatcttaatgcttggagtatgaaaaatgctcaatttgaatcaaggattggacaagaaaacttctaattggtttgaagttattcttttcaattaattccaataagtgcttttagcattatttgttttgaattgagtgaaatttcaaagtatattgtgcttctacgttgattgggcttctaatactggaaaagtacttctttggttggttgagtaactagtaactttcaacttttagctctaaaaactctttcaacataaatcagttttaataattttttcaggaagagcttcctaaaaaactagaaacaaaaagtaaaaattcagctaaaagcgtgatttgttgctttttgtaccttcttttgatattttttcatacttggttttatggtaatgtttcataagctaatttgttactcattttgcaatgaaataattgattagctaaattttatttactaaaattaacatggcaagactctcttatatttatgggatatttgttcctttaacatttacacatatgaccttaataaaaaaggtttatcttatgattttattgcagtcatatatttttttagtttttatgctaattaagcccactaaatgtcagctcaaaaatacgcgacgatatatctttttagcttatttaatatgtgatccaataatacgtcactatgtgtttctgagttgacacttaatgattaaaaaataatacgactgcaacaaaatcataagataaggtacttttatcgctatttttttttattaaggtcatatgtgtaacaattataaatgttaagggggtttcgatgcaaatatctcatatctttttctttggtttattttgcatttatattttaggtatttgtttctctatcttttcctccaactctaatatttttagtgggttttgtgtttgctttgggttttatttgattattagagtgtataatattaactcacttttatttttgttgttttttatatatgatttatctccttcttctatttttattatcattagtagtttttattgtatatttgtctctttagtttttttttgttttattttttctctctggttttagttttttattatctttatttttgcttcatattgtatcaactctagtttttgagcaattaaataaaaatttaatcgaaaatagagaatgaagttagaaattaagttattaagtattgatataatatatatgtttcaaaatgaattttaaagttagtgtcgtttttaaaatttagttattagacattgcgtatttttcattatgttgacttctttccttgcgaaaggtttaattagttttagttgttgttgaaggttagagatggaaattgggcggttaatgtacggggaatgcaatcccaggccccatccccgctacctatatatacccccgtcccctccccatccccgtctaataaccaacggattcggggtaggagaatacccatcggttatggggaac

SEQ ID NO: 17443 - DNA, 7032 bp, Cannabis sativa
atttggaattgcagctaaaaaaaaacttttatatagagagattgcctcttgtctgtctgatccccatcgattttagtttgataattatagaacgtttatttcaccaaaaaaaaaaaaaacttttatctagaatccatgcaaaggtgtcaaaatttcaaagaatgtccagaatttctttttttttttaaaaaaagaaagggatgtcaagaatttctgataaaggctatcttgcaaaatattgtcaaagtatataaacatatcaacaactacgagtatttaaaaggccattttgcaaattgcaccctccaaaaaaatcacttgtgtttaaaatttctgatagaatatcaacgactacaagtatttaaaagaccattttgtataaaatcaagataaatgttgatagcgcaactttcgaggctactaatgcctatggtacgggtgtcattgcctgaaatagtaaaggtttagccattgaagtgttcttgactttactgctttgggagtactcatccgattccgaatgttgctgaattaatgagtatcaaagaggccctcaactgatcaaaaccaaatggacaatgcaatgtaattttggagacagattgtctagttgcagatcaagctctttatagttcagttgttatggcttttatttttggtcttattgttcaagagtgtaaatctcttctttcctctttaattcatgttcatgtttattttgttaaacggtctgcaaataaaactgcacattaccttcctcgtagttcttgtttttagtcttatggtatgttttttgagaagaatttcctctttctcttctttctattgtaatggcaaatttggctatctaataaagctatccatttattgaaaaaaaaaaaaaaaaaaagccattttgcaaaaattattcactctacaaactaattataaaaggagacaattttgtcaaataccccttttcttgaaaaaaaaaaaacttcactttatcacaaatgattaaagtactaaaaccatgctgcaatgagtacctaaacaaataataagccaaaataaaaaccaaacaaactttgaggattcaacataaactcatctttgaatcagcacaaagcatcagcaagttagccaataacaaatcgtagcggcatccttgccggccggaaccaagcaatgggctgcaacagcacaggaaactcgaaggttgactcatgtcacatacagcaaaggaatcccaaactggcctcataacatctatctaccttaaccagcaacagaattgcaatatttctcttctaaggaaaaaaaggaaaaagaaatttattatgtacaaatttgaaagaaaccaactaagaataagggcaatagcatgctcaagagagagttgaatcccaaatcatgtggaggcaaatcttatttttgactagttgaattactcttgggtaaaattatacgtattatcaagaattttaccattttatcaaaaaaagaaaagaaaagaaacaacattacttatgaaagtcaaagacatcacttgaatgttctgtttaaaatgtgcaaagattcctttatactagaacatattggggcaggaatcaattgacaacaacaattatgttgtaatcctaattagacctattaatttggctaaacttcggcctataaacctgtgtgaagtagtaaatccaacttttttttttttatatacaaagtagtaagtccaattttaaatggtctaaaaaaagaaatatatgtcatctttataaaggaaaataatttaccacagtttgaggacaactcactttcaaaatcaagacatatatagataattaattgatatccaattatgttgtaatcctacttagacctattaacttggctaaacttcgccctataaacttgtgaagtagcaagtcaaacttttttttgggaggaacaaagtaatttgaattagtcgaaacaaacaagttaataatagtgattcttaagggcttctaaattgaagtatatgtgtcatctttataaaagaaagattatttaccacaattttaggaaaactcaccttcaaaatcaagaaaatgtatagataatatgagtaatatgctacgtgcaccctctctatatacactattaatctcaaaccatacaaagagggtttcttttttttcctatcaatatgtaaagtatataatggttgagatttaatcatgaaaaatacaccatttctaatactcatatttaattatacaaatttatccaccataattataattttcaactaataaaaattcaaaactaaccttttcaaattttgggataattgtgaatttcttatgtaattttatttattaccggacaaaaaaacttaaaatagtaaaatttgttgtaattaactacctatgtaaaaataatttaaattagtcctagtattaaatttttatttaattttatatttaaattatatttttacatgcaaaaaaaaaaactacttaaatacttttgataagaagctttgccttcacaactgcaagtgcaagacatagcaattgggaaaaaaatccttgtcataccaaccctatatataagttcatgaaattgaagaaattttatatgtaaaattatgatttaaatttttaataaaaatttacactaaagtttcatcaataggtgatgaaacatgaaaaggttcatatttattaaatgttgaaatcatatttttacaatcaaagttccatatatcccttaaattgtgcatttgccttgttttgagctaaaactaaaatgtgttctaaaattataataatttttcaaaatatgttttggaaaaatgagcacaactttcaatgtagaacagatgatcaatccattttttggatcatttgaactgaacaagaactttaatattcactagtttaatggggtccattttggaccacaaacataaatgaattcgcaatcaagcattacccaaatattctcagttgagcacactaagccttaactaaacaagaatagttccaaaagttagaaataagtgcaaaaccataaaaaccgactttaaattctgccaagttgcattcatttaacattccaaatcttttataaataggctcttaaataaagcattcaataaatattgttcctagtttataaatttcatttactttcatgatgtaatacattttctttacactagtttaacatctttcaaattatgattattgtttttctctttctcatcactaatttacatttttgttgaggtaaaaggttgaaactcttgatattataataaggatacatttatcattactattttaagatcctattatacagtgaatcttcaagtcttaacaaatcaatcttaaactacattattattcttaaccaatattttgtacttccaaaaatactggcaacaacctaaacctacatctaggtctttaccattctttaaattgtagcaatgtgattattgaaaaagaaatcctaaagacacaatactttctaaaattatgagctaaaccttaagtctcagcaataatgatatcattgggtaaaaattacttaacttattgtttctgtgatcaataaactgcaaaatcaactcattcttctaaaatcagccatcaaagttgcagcaacgaacagccacacatccttctgtatgaccctgttcaatctttgccaaggcttagctataaaacccaaatgggaaaagagaaaacgggaattgacagaaaacttacaaggatcatggttaaaaactttcaaaaaagaaaaatcatttagaaatcagttatcgagtggagttaatactgaaatagttgacagtaaagaagttcaatcctaccaaaagctagaattaagaaacatacatgatgatcaaaggtcctcatcattaactgaacagctacaagcaactactaaagccctcttgggagtttccatcttccctaataacataactcctaccaaaaataagtgcaattaatttagttttgaatctgaattatgcaagaataagcaaaactggacatcttttgtatctactcacctcagcattttaatatcttagggttgaaatttgagaaatcattttaaggagacacactccgggaagaagattttccattcctccgccgtccatctaagctttcaccacttggtgatggagttcttcgtggggaaagacttctttcaggaccacgaccacgccgagctggggaggcactatagaacaaaacagaagggcaccaacatgtaattggaatttgaagaaaataaattatgctgcactgtaaaattggtaaaagcattaataactggaactacttcaaacctatcaacagatcgactgcgacttcgacttcgacttcgactgcgacttcgactgtgactgcgactctgaccccgactcggtccttcatcttgatagcggtcccttacccttttgttataatcagaactaggactcctgcttctccttcgactatgataatccatgtccctcctatggtaacggtcacgctcatatctatcataacttctactgcgacttcttctctgatagtctcggtccctgtagtcatcccgatatctaaaaaataaacaaaatgtaagtgtggcaagtagaacataacattgataacaaaataataaataaaaacaagttcaagttgccttattacaaagtgtaatatcttaagtacagaacaaaaagaaaaatttgtatccgtaatggtcactgaaacgtaacttgttttccactgaaacctgaaagaaactttttggaacttgaaataaatggggcaacaaacaacaaatgaaagaacattttagaaagaaaaaacaaacatttaacgtgcaaattacaaacccattgttgaagcttcagttaactatttaactaaattagctttaaacaaaatatatgtatctcaacttgatacattcaaggaaaagaaaaagtagagtaaaactaagaatggcaacaaataaaaacaaaagagcacaaatatattttctatgatacagctagcatacctggtgcacataataaagcccagaaacaatgaggtcgaaagtttaagcccaagaacagagaccttatcccttccgttcttaccactgagctagccttcagtggcttaaatgaatatataccggcacacatattatacatacatccaattcccgatctacacctaaaaaggtataacactttctccatgtttatttactttcctaacacaaatactacctcttacttatcacataaaacttcaaccacaaaatagtaatttctcactctataaaccataaatcagcatacacaagcctacaactatatataataatagaaccaacaagatactatcatagtaagatactaagatacatacataaaatataatagttatttgtaccttaacatgaaaagatcagcaaattcatctgatctccatctcttcaaaatgaaagatctcttacttttcaatttcgcaacacatactcatattgttgattatacaagtcaattgggagataccatttcagcttacattacacggtagaagtcttgaaaattaattcgatttgggacataccactactagtctcttatagaaataatcaagtttaacaatgtagcaacaaaaacatgagtagacaggagtgcaaataccattttatcttacaaccaaagcataagtaacattctctaacaatatatagggaacttaccttctcctaggactgcgacttcttgatctataccttgatcttggagaagcttcactaatccttcctttatggctggaaaaaaatttttaaaaaaaaagttaactatgtaccaaaacttaacagaaaacataaagaagaacaagcacaaagcgaaccaaaattgcagaaacactcaagatttgatgtcaaaatatctcatacaaaagaaaataataatcaataaaatcgaacactactcaagaaaaagagtaattgatcagcaagttcaacggaaataatttggaagtgtaagtagaacaatcgtcacacgataaaaaaaataagctaactaacccatctgcaccacaactataaagtacctaaacctaatgatttgaagaaatgaaacaattgagaataaattcaaggaacaatctcaaattcaaactttttatgcaagtaacattctatagaatctcataaaccaatttgcaatatgatctatatgaagtcaaattcaaccttaaaacaataattttccaagggaaaaacagaaaatttttattacataaacttacatcctctcagcattgggtccatatttagcaaattgaactgttatctctcggccatcaacaactcttcctgacaaaaaacccaataaatctttttagaaaattgaaatttacacatgaatatggttcgtaagcgtagtaaatcaataaataaaaggggtaaaaatcgtaccatcaagcctgtccactgccttatgagcctcgtctgcatacttgtaacgcacaaacgcaaaacccctcgactctccagtcctaaaaatcaaaacaaaatttaattttctcgacaaccaaacagtaaaagaaagaaagaaatgcaatttcaaacagaaccttcggtctctggggatgaagatatcgacaacctttccgtacttgtcgaaaagaggaaatagatcatcggccgtggtacctatcaaaaaatttcaaaactatcaacgttattaacagaatttccagaacgatatagaatgattacatatagatacagatatgtagagagagagagagagagagagagaacgtacggaaggtgatattgaggacgagaagagagtatgtgtcagagatgtcaggagggccagacctaccgaagtgagacatggttgcactctagagagagagagagagagagtggattggtttcgtttgttggtttggttttggtgtgataataaaaggaagaagcttctccaacatataggacaacccagcaccttctttaaattgttttcctctaaat

SEQ ID NO: 17444 - DNA, 3939 bp, Cannabis sativa
ttaattttaaaaaatgaaaattaaacactattctcaaaattaaaaaattaaccattcaaaaaaaaaaccattcaaaaaaaaattaatattatttttttaatgtacattttaagatatatatttaggattttttatacaaccatcaattatctagagcgaaaactaggttaaaaatcctaatcctaatcctaatcataaacctaaattaaacaatcatcatataaaatttcatatttaaactttagattagaagaattcaacccatcaatttcaactcgtaaattataattattttcctttttgttcgtttcttacttcaaattcacttttcaaagagagtcactcaatctctaggtatgttttagttttactctgtttaaatcttctttcttgtttttatatacataaaattatttgttcatattctcagctccatagattttttttttgaagataattaataatggaaaagagcaagaaagaggattcaactgaactatttcagtatattccaaaggaaattataccaaatatcatgaccaaacttccacatgacctaattatgaagttaaggaactcatacaaagaatggaagcaattcacatctaatgcaacatttattgctgattcattctttcacaccaaatccaattcaatcttgatccaaatcccaacatttaaaccatcaaccccagcccacaaaaggaaatacaagtcaaagttgttagaattggatgagaatggactagggttcaagatcaaaaactttggtatggcagggatgagaagggttagttcttgttgtaatggtttactcttagtaaatgatatgaatgtaaagaccttagttgtaatgaacattatgaccaagtgttatgctactcttcctacatgcccttctcattgcccacataaatcttgtggtatggctctagtgttcatctctagtaaaaaacagtacaaagtcatacacatctataatcatggttttgggtttgagttattgactttaggcactactcaatggaaggtaattccatggccatctcttgttgatttgtattctccttatcattttttttggagtgatcctttgtgcacaaatgatcaattactcctccattggaagcttaatacatttaaacatttcattgtaacaatggatacacatgaggaaaggttatggaggactatgttgccttatgaaataattggtgaaaacttctcaatatttgagatgaagggttgtctttctttgatgtcaaatgtttcctctactgaatttgatgtgtgggttttgaaagattttgatgaaaaacgagtttggtgtaaaagttttagtgtttgggcagattcaataacttacttgtcacccaagtttcttcctaacagtagtactaaagctttgcctgattttagtaaacttgaggctgtgatgaccttgagaaatggtgaagtaatagttttgaagaacaataaatctggttgttgttatttgtatgagacaaggcttgagaggttgaagaaatgtaatgatgatatttgttggggtaaaagtaacttgttacattataagaccagctttatctattgggagaattatgaggaattgctcaccagagaaactatttaatagaacttggaatgtttagcatttttttttagcttttagttattattatttttccctttagttttaaatttcattgtaatttggagaatttatttaaattctcataagtagtaatatgttgatgatattttcttttcttttcataaacttaaaagtgtcatgaaatggttacatttgtaatatgaactaaacttatgcttttaggttattacattgctatttttcttcttatatatttcataagagtatttttcttatattgttttcatgtgttaccctctccaattatgagtaacatgcttatagagtaataaattaggtgaaaatcttcatcttaaataccattaaaattgatgtctttactgaaatagaatttcatgaatggaaagacaaactttgttaggtgacaattccaagctcactgtgacacttgataaactaaatttatggtcatattatacatttggttttaaaagttcttttatttgttatttggttgccatcacttttttaaaaattgaaaatacatttttggaatttaaataatatgtattgttttctaatcttttgtaaatctatatttgtatctttataattttttaaattctgtgctttgaaaaattaatttttaaattttgtgtttttgtagattaaaattggggtatgtagacctaatttttacccaaaaacttatgaatataactaaaactagtaaactttgcggttgtttatagaaatttaaaattatttttgtataatttaaaaaatataaatatttaaaaaataataaatctatatagaattttaaaaaaaacaaatcatcaaacatataaaaaaaattacacaaagaaatatcttcaaatgtacgttatagtgaagaaaaattagaaacaaaataatcttcacataaaataaagaactcacataataattttaaatctataaaaaactcattatatatataatttaaaaacaatttacttcaaaatcgatgtcatcaccgtattctacttatatatagtaatatccttaatgtacaaaaatttaggttaattggaaagtgtattagaaaaaaaaaatgattagctcactatttactatcaaaatttatatgtttataatgaaaaaagtaagataagttgtaagtgtgctaatttacatatttatatgttttttatttttatttttattttcgtaaataaacatgtaaattcaattttaaataattaaaatgtaaataaaattgtgatacttttctaagatacaacattttattttaatttttaaatcatgattgattagattttttttattccacgtttaatttttatttatataattgtctaattattatagatagtttttgtgaattatttgaattttattttgaatttagagatttaatgttacatgtatttttttacattttcaattatttttatttaactttcaacaatactttacacataatcataaatgaattagaaaattagaatgattagaatttgagtatttattagtaaatacatatgatttattattatttttttttatcaaattataagaattttttacgtgttgtgcttttgagctattttattcgtgcttacgtgttatgtctttgggtttatcgtgcttaatcctattttttcgtgtcgtgatatgctaatttacagcatcgtatcgtacccaagcctatattttttcatatcgagtcgtacttgtgcctcttgactcgtgccgtgtcgaaaagcctaatacgtacgtatttacaatactagttgggagttttataatattttggtagatattttgatcattgaaattatttataggaagcaagtttttaattatttaattttttgagagacattttaaatttaaaatatttttttttagaaaaaatttagtaaattgtgaaagcataattttgctcatttttttaaaccataacttagctattttttataaaaatatttaaaataattagtaattttgtcccctaaattttcgacacaacttgattctgccctctaaaatatgcaacttcttaaaagttctacttgaacttttacatttacataaatttaatcattctgttaagttttatctcattattacatttaaatgctaaaatatatttgtgaattagtaattttgccgtctaaactttggcaactatcaaaacgtaccttctcaaaataaaaatgagaaagattcaacattttttttttataaatcttaaaaaattatttaaatcttaaaatatcattttgaataattaagaaaattaaaaaagaaatcaa

SEQ ID NO: 17445 - DNA, 3209 bp, Cannabis sativa
aaataggttttaagtagctctgtgttgttttccagtttgatctttgcagtcatttagatagagaatatataatatgtattcttgtcgttttctataattttatgccgttttatatttttgtcattttgaattttgtcgctgtcgtattctgtcatttattgtgattctgatcatatctacgtcgtgtttcggaaatattgtcgtttttcaaatgtgcgattgtctttttcactttatgtacttttgtcgtttgttttataaacagtaaaacattttgacagtgttgaagtcataataaacttctgatgcctttgaaatcaatggtatttttgcagggcaccctgagaatggtctgacctacttctggataacggactcgtgcccattgactgttcaacaggtgatgttcaaagcaccctttgaggttcttagcctggctggttctatagctgctacccttcaaatataataataaccaaaaagagaaacaaaaacaaaaaaacaagcatggcttcaattcaattctaccctcccagcaagcatagactatagactattatagaatatgttaaacctgcagtcatagagagtttctgacaatcatgcggccacatagaatttttctctgttcttttctttttgtactttgcttttattttaaatactgccatcaggttaataaaatcaaaagatgttcacatctgcttttattgtattaagataccaaattattttgtcacattgtttttaatttttattacattaagcaaacccaaaaccagaaatatgtgtcagcaccaaggaataaaagaattagattgatttggtgttcctgttccctccaaaaaaaaaaaaaacccacaggagaccaaaattgtgaaaggcaaagacaaaagaggtataaatctcaatataacaatctctcctgctcctatattgattcctttgtgtgaagtaaaaaaaaaaacaaactgtttttcttttctgtagtatcaaaacaagcatttctgaacttacttctgtactttctttgagttctttatgtaatttagtaacctctttagagccctgccactgtcgatggcttctcttgctctatccagtgcgacagatatgtcttctgcaccatcacatcctagcaagtgatcgaccattccggcatttaagatgattcgatcataagctggtccttttttaccatgaagagctgctaaacccagctctatattcttcgtaacctaaattgcaatgaataaacataactcgacttatcacattcgcaaggtttaaaaaataacaaatttgaaagccaagtaaagacaggagtttaatgtctcgaaaattttaccgatctatcagttcttggtgtgtcggtgggctcaataccgtagtctttggcatttacctcaaggctaaaactttcaagcgagactcctgcattgtgtaaaatcgaaatctcattttaaaggataaagaatcgtactacgaataaaactttcagctaacatagctacagaaatctatgtaaggaaataggactcaatcacaaacaaaccatcaacttcagaaactcctaagcctgctgcgcgaaaaccagaacagtagtttacaggaagtcctttagatgaatttagggaccgtgatcttgtcgtcattgaaagggccccttcctcgccctatagtaatcgcaaagtaaaatctttataattgtttgatttgatttgatggcttggtagacagttttaagattaagttagattgtcagttagtgggagatgctctttaaggaatttctgtcaacattaaacaagaaactgaccttcaccaccaagcccgcatgtacacctcttcttttcataagcattagaagtggctcctcatagccttcgtgataaaacccagaaacaattgcttcctttccccgggccttagaaaagaaaacatcatttatcgttgttctgttagttcaaacccatgtctatcttcttttatatttcatttagttaaaaagaaaatgcttaaccaagcaatttataaaaagttatgacacagcaaagtaactgatgaagaacaatctctgaaatcatatagtatggggctcaccctcacaaattgctgaactttttcggttgttgccagcggagggcgtttctttatatgttccctcagactaatcaaggaatatctgcacaaggaataatgttgtcctcttcagtcttcacggaaatacagctacgtcaaacttccacgtgttgaaagaaatttgaatttaatcatatctctactagcaaaacctttcaactccaataccaatttcttttagaagataatatccagattgccaattaattctaagcaatttcgaaacgagaatgcagtaccaagaaatggtaacacaatagcataagcaggtttaaattctcagaattactagcaataccaggtctactagtccatcaatgaattgtagacaaaagggaaaccaaaatctggaaacaattatggcagattctaaaccagtcaacaggtcattctagaatctatagatagctcattgctcaaatctattcaagctagaatcgaaaacctagcatacgcatatgcttgtgactcttaaactatttggcaaaacttatatgctgaattcagtattcatcatcctatacttgcgataataaaatattccaagtggtggggtttaaatgaaaatgtctcaacaaacagatagtgcaaagaggaagatcaaaatgaataaatttggctagatattcatacagagatggccgggcttcacgttgacttacgtaggcaaaaccgacttcttcgtcctgaaacaaggataaagatttgaacaattacaaaagttaaaatgcatagcaaaagatcataaattagaaacatgccaaagagaagcaacttaaagacacatgtggatccacaatcacctcgataagtgtttttgcttgcaagggagagagattcgtattggctcccataaacttcagcatttgttcttcagtaattcctccctgaaaaataacaagagtattgtaactaaaccagtgaagagaaatttcattggctagagtacagttatttttcacataatacgtaatgttatatcataatagcaaagttgaaatgcagggtgggatcaaatagaattgtttatgcagtaatgaatgaaaaaaaaagttggctttcaactt

SEQ ID NO: 17446 - DNA, 3797 bp, Cannabis sativa
caaatgaggttgaagaggaccttgattattatattcctccatatatggaagattacattgtttaggcaaatgaattgtttgggtatgatgataataacagtgatgatgtatctgatctcacaaatgaagaggtaaatgtttttggatcgtttaaggtttactgtaattttttttcagttttcaatttgatttccactttgttaatttttattttagttttcaatttgatttgcacattgttaattctagttgcactttgtcaaacattccagataccacttgaaatagaaccacaattccttgatgttgtggtgcttggatgccaagaacctaaagaagaaactgaattgaatggacaaccacctgaaccttaatcccttgatgttgtggtgcttggatgcaaagaacctgtagaggaaactccaagagctaagaggttgagacttaggaggatgagaaagtctcaaactcaaacaaaaccaccttgtacacccttggtggtagatgccattaatgacacacatcctcaaacacaagcacctagtaccccctatggcagatgtcattcacgacacattgcctgaaacacaacctaaaatactacttgaaacacaacttgaaacactacctaaaatacaacctaaaatggaaactacacttgacactaattttgaaataaatcacctatctcaaccccaaacagattttgcacttgacactgattttgacatggatcccctatctcagccccaaccagaagctgaaatagagtcccaatcctaaacagaaattgaaacagatccccaaccccaaccagaaatagaaattgaaacacagccccaacactaaccccagccacaaacaaaaattgaaacatagtcccaaccccaaccacaaatagaaattaaagtacagggggaaaaggacttttaatttatggaagaggagtttaatccagcattacaaggggaaagggaccatgttggaccatcaggtccaagcaaatggtggaaccgggtaagtgagatacatgttgccaatgatgatggcaatgatgggttggaatcaagtgatgaactacgagtgttcacagtgatgatgaagattgtgatcatacctcaaagttggaatttaatccctaaaaaaagactgatgatttcaagtttgacttgagtatggagtttggtagtatcaaaatattgaaggctgcattgaaggagcatttcatacacacaaataaggagtatattctgattcacaatgataaacagaagttcagagataagtacatggcagaggggtacccatgaatgataaatgcacatgtccaaccagataggttgacatttaagatcactttaataagtgaaattggccacaagtgtggcattgtcttggataacaggtacttgagatcttttatttatatgctaaaaagttgtattagattttatgtgtttttagtcatactgaaaggaatgttcattaatttttattttagagatattgatgtgatcaggttaactaaaagcttcctggatcagtttaggttacaccttacatggactataaatcttttgctgaaatgaaaaaggacactaagtattctgaagtcacttcatggcagttttatagagccagaacaaatgcaacgggagaacttgaaaggtctgtagcagaatagtatgccatataggaggattactttaaacaaattttgaagatagccccaagaagtatagccaagatttaaatagagttaagaggtgggaaaagaatatttcagagatgttacatttgtctacaagcatgcaaagaagggttctacagaggttacatgccattaatagggctagatggttagagctttggccggtgcataattgtccacattaataggttatacgtttggagggattacttcagttctctgctccctccgttgattcaatgtgtgcctgaggtcgacaggttaggtccctatcctcccaaatactaactaccctggaggccttcttgcattttcagtatttactagtggaactggtagaacttcctccgagcacgtcgatctctctgcctttgggcacgggttacactatctgctccatcatcgttgttacttgaaaatgtttgaatacgagcaatttcggcttggccctgatgcggggctgtgtatggaacgtactgaaaatactaaacctgcctattttgatcataaatggatatagggtcttgaaaccctatgttctactggttgggtgttcccacttagggacggtagttttgaccattttgcccattattttgcttagacaatccttgactgtctactgttgggcctacatttacatgttgcctgagattggatggtcaaacatgcaaggagttttgggtgtgggtcattagaactatcgactcgtggttattcctgggcataacatatgtttctttccctcaaacaggatccctaatgagaggaatatcttcttacaatttctgcccaatgccctgattaaattaccttatcaacatcgtggttttgcgtgatcagtggttgatcgcctcttgctgggcccttacactctccacttgtttgtccatccactcttggaaaggccttttttgttgcacaaaagcctcgttcaaggatgctcgagtatcagcctgatcgtgatgtaacgtgttcgtgtggctttgaatttaagccactacctccctcaaattttggagctttacatcatcgtcgattgtcacttgggttccatttggtggtactcgagaacctggaccactttcccccacaccatcagtgcaagtgttctgggtgctcggatcaaccatagaagggttcctctaattggaaaaattctgggcaatttgatcagtggccattgggtctactgggtcggtggttgagttcttcgagtttttacaaccatttgctttcattgaacaaactagaaaaattgtgctcttgagtcctcaactctcaatgaaagtaccaaaatattaacctcgcttttggttaatgacgctgagtctctaaagtgacaagatgtttataagttttagagaaatgtaaacgacataaaataaagaacaccagatgttatagaggttcaaccccaatgttctagtaatagcctactcctcttattattatatttaacttgtgaaaagagaagtaaaaggattgttctttctcaaaaaaattatgattaattgagcaacgtataggcttactcaaagaaataatttcagatccctttttgagtagagttgatctactatttatagaggatgttcaaaataggattcaaactcctcgatttgtcatcccactagtttagggaaccaatttttttttttttttaaatcaaagaaatatatcgtgattcccttttgaatggacattaaatacatattcaaactaagattgttctcaactgcatttatgacatgtgtcttccctttggccggcctgtatgagattcatttcctctaaccaggtgtgtgcgtcttgaaattgtacaacacattgcatttaactcggcgacatccctgctggctggaaaacatcttgactgactggcttctgagctcttttatcagcacaggccccatagagatacgtgtcacccaaaggaacctgccatgtcacacgaccaacttttggaataataataagcatagatttatactgtataaatattcattcatacaatataaataaataaaaaatggctagctcgaatgtatttcagtcagatgagtatatatatgcatatatatat

SEQ ID NO: 17447 - DNA, 1884 bp, Cannabis sativa
tttgtgcgaagaggcggcaacttgctttcttgctctggagatggcgaaggacactcaccatagatttgttattgttgagccagactcgactctgagattgtggcggactcttataatagtgattgtgtgagatggggtaattatatttatttctgtaagaaattctctaattgttgttttcacagtttgttttctaaaatgagctgtgttagaaatggtttggctctcaggcaggggcggatatagaggcgaggtgcaaaaaaatcgagaaaaaaaaaatatgtgtattttggttagttacaatatatatttacaaataaaagtgatatctatgaatataaaataagctttggtataatggtaaaattatttcatgcatttaaaggaagtcatgagttttaatagcatgttaaaaaaaaaagaacccgctcacttataaaaaaaagtatcgtcctcttttaacttaaatcttagatctgtcagtactctcatgtatgctaaatgtgctcttgaaagagctatgtaacgtttgtgtcaatatttcaatatagctaagtttatttcaacaaaaaaaaaaatgcaaatttaatatttttatataaaaaaataatgataaatataattaggtggtaggtagtagtacctttcatgagttgtttacccctaatgcaaatctctccagcttggttacgtggaagagacgcgccagtgttaggatcaacaatcttcatctcagcattcctaacgactgtaccacacgtgccgaacttggtcggaaacggctcctttgcaaatcccaagcacaacgaaagacactccgcctctgtcataccatatccctatcatttttaaacatcacacaccaattacatctcctcatatcatcacccaatctcaccatatatattattttagaataatgctaaaggtgtcagtgatgtcgagtaccctcttgtatgttaatattgctattgatctaactaagtatcgggtcttatataatttaatataataacttttaaagagtatcgctagccaattacaacgcgacatgtcgagaaagtgctaggcaccactggtgtctaatagcaatgcttattattttaaaggatattataagacatctctaatagagagctataaatatagtatattaccatttttagaacattttactaaaattcaattccaataatgatttaaaatgtgtgttaaatttgactgaagctaaaaattatgctaaatttgacacaaaaaatagcatgtgctagataattttttaatttcctatttgtcactcattaatattattcattaataaaaaatatttttatatttataagttaataaaataatataaataaagttaatgttttatattttccatgcgtattaataataatattgacttttataattaatttgtactttgtgtattggagcacaaatataaaaattggttcaaatatagcttcattatatattttgggctaaatttaattcaaaatatataccattcattagagatggtctaagaaaatagcttttaaataatatcgctaaccaatcgtgacgggcatctataataagtgataggtatcatcggtgtccaataacaatactctactcaatgaaaaaattgtccctcgtatgtgttaatatcactattggtccaattaaatttcgaatcttatatagtttaatgcaataatttataaattgttcaaaaaaaaatttaaaatttataaagataatattataactataataaatatcattataaaaaaattaaaataaaaatttcaacatatattttcagggaaaaaaaaattgtaatagaaaattaatatcaatatactctttttctatttattcatttaattg

SEQ ID NO: 17448 - DNA, 7641 bp, Cannabis sativa
  modified_base (2860)..(2862): a, c, t, g, unknown or other
ctctctctctctctctctcgacgacgtggtaagacaaaaacttggctgtttctgacgtcgatggtcccaaggggaccctgaaacccagttgtccgatttcgaaaagccaagaacccgagccccactctcttcctcgccatctttccctcgctccctctcttccaatttcccagtgcaatgacagcaggccaaacaaccatccacaattgtgggtggtccaacaagaccacgagatcgcgtttactaggtctcgaacctaaaaacccaaattcttttgtgcttcggctggtcatgaattgaaggaacactagttttagagatttgcgccattggatttgtcactagacggtccgattaggtcacatgttaggatgttattagtgctatttttaggttaatttaagtgtgtttttaatttagttttactcttgtttggagcaattttacgcgttttgttatcttttatttttgtagatttaaaatagaagaacaagggaaaatattgaaggaatatgatgaaaaaagatcaaataaaagctcactgcacacaaaataggaagtgcatgctgcgacccgccccttctaatatcaagcagaatagattttcagcatcttttatctttttttttatcatttttttagctataaaagaagtggacttccatagttttcaacaagcaatcaaggagtacgaatttttgagagcaaaatcgatattgaaggctttctccacagagtttttaacattcttttctcctctattttcttcttctactctaaattaatatgtgcgaaattactacgatgaacatgagcagctaaacagtttattagggtttagatggatattgtttgacattgatttttagttttaatgtgatttaattctccctcaatttctatgtattttatttcatccgtacttaattttatttaattgcttggccatcaattaattgtttatgattttgatacaaaatttgagaagtaagtgtcaattatgctatagtgaaatagaaccaaatttcgatataggacaagagtacctatatggtttcgatagcttaaaggatttctgtgtttaatgcctttaacatgtttaatttatcacgacacccgacagtagaaaatttgcgtgtaattgaggtttatatatctgagaagactataaattacctaagtaaacctgctatagtatagaatttggtaataggaataaaatcatgttaaaccataatcaatagatgcaattgaaatcgaaatttcgataccttaaagggtttccgtgtttaatgcctttaacatgtttaatttatcacgacagtagaaaatttacatgtaatcgaggtttatatatctgagaagactataaattacctaagtaaacctgctatagcatagaatttgttaataggaatagaatcatgttaaaccataatcaatagatgcaattgaaattgaaaaccctaacttttaataatcattaatttccttagtaatttacttacttcttattttcattgtattagtgctttctaattttaatttactctaaaattcgatataatcgtaaagatttagttttaaagtacttaactacaatctttatgggatcgacctcactctttgtgagtatataacttgttaacgatacgtatacttgcgggttaaaaataccacaacatcaccaacgacaatcttttggctgggtatttgattctgggtttggattttcatagcaggtggtatttgatttttttcttttctgacatcttctttgttttggtgcaatggtgaatgtagtggcagtggtagtgggagttatgatggtggtgatattggctgtggtggtgtggtggtggttctggagaagaagaaggaggagaaggaagataggttagtgtggagaggattagggtttcagagaaaaaacaaataaaaagaaaaggaaaaaaaaaagataaataaagaataaaataaaatattttttctttataatttatttatttttataattttgaaattatattttaataattaatattacgtggaccactaaaaatttaccacgtgtacacgtgagcagtccactgtggcacttaattgaaatttttgtacgggagtgtaaagagaaaagtagaatgggggtttagtaggttttgccgtcaaaaattaaatttatgtgattaagtattaaaaaaaatgaaattcgagtagttttgctactaatatcccttaaatatatacaaataaacttcatagtataaatttacttatttgtctttgtttgttacgtttaaagttatgaggagtattaattataacctcctactacaatctctttctcaatctccacattcaaaaatacatgccaaaatattttttttaccgtagtatttgttatagttataatattgtactgtaaatttttaaaaaaattccaaatgatttaccatattaaaatcaagtttgaagtattttgaacacgcatggtaaattggaatatcatgaactttgttaatgacactataaactatttgtaatttttaaaaaatttacagggatgaagttgtaactaatggatactattccattaaaaaaattaaaaaaataatattcgagcatgtaattttagaggcgaaagtagaaaatgaggttgcaattagctctcctcttcaatgtaattactaaaactctctttttaatattagggtgcgtttgaaagtaactgtgtaacattatattttaaaatacaatgtatatttagatgtcaagtggtaattacatgtgaaattttatttatatttggcaagacaattggtaattacacaataaattaatattgtgtaatatttaatannntaattattatcattttgtaacaaatatctaaaaataaatttatccattaataataattaaaataaataaaaatctcatcaaaaaataaactcgaatttcataacaattttgtaagaaatatttaaaagtaatttttgtctattaagactatctaattgctcttgcgttccatatatcttgaactattctatttggtgtatgattttctagctttagaattttgagtatttgtcatttctatattgattaaaaatctatatctatatatagagttaattgcggtaaaatttctaatagttttactttgtttgtagttaacctccaaaactcaaattttggcggtaaaatttccaaaattacgataccgttagcaatttacaattttcatccaaatttagctgttaactaccatgttcgattgtacacgtggacatagtgtacgtatgacacaattttattagtccacgtaaataattatattaaaaaattaaaataaaaaaactaaaaaaatattttttttttctaccatatcatatatttgttctaatatttttttcattcttcttcttcttcagtctatatactgtcactaccaccatccatagctaccgtaaccaccaccacctaccactaccaaaaccaccatcatccatagccaccgtaaacaccaccacccactcctaccaaaactaccaccacaacttattttttaaatccatatatctcacaaaaaaattaaacaaaattcaaaccaaacttaaaccaaatttaaacatatctaaatccaataagcaaacacacatatatatatacacaaaatctcaatccccaaaatcaaacctgaaaaccctaaatttatttctccacagccattatctttctttaaatttgaaaataaagaacacaataatatccaaatagagacatttatacacaaaaatatcaacaacattgcaaaagaaaaaaaaatatggaagagagagagaaggcaaatgaaaaaaagaaaaaatatattagaagaaaatatatattttgtaaaaatatgatacagtagaaaaaaaatatatatctttttaattttatttttttaattttatttttttaatatagttatttatgtggaccaataaaattgggtcacgtatacattatgttcatgtgtataatccaccatggcagttaacaactaaatttggataaaaatggtaaattactaacggtatcgtacttttaggggttttgctaccaaaatatggtttttaaggattaattgtaaacaaagtgaaactattaagaattttgccataatttactcatctaagaaatatttttcttttaaggatgattgacttatgtcttactcaataagttttaagtgtttatttaatatataaaaataaaaaatttatcatataaataattatacatctttaataattatttttttttataaattatatataatttttctttgtttatagttttctttaaaattaacacagatatatataataaaatatttatttataatacaagatgaactaattcaatactttttatacatataaatatattatttacacaactttttaaatttataaataaaagtattcttatttaccaaaaaaaaagtcactttgtttaaatactcttttaagtgttgtacatgtaaaatataaataatattttttattttgtcacaatattttttaatatgtaggtttattaatatcttaactaataaatttttaacacaaagagttaggtggaattttatattttttcattctattttgaaaattttgtgagatttttcaacttttttaaaagaaaactataagttgtgtttggaaaaataaataagttgaaaactaaactacgcatataaaattatgaattaaatctcaaatcaatcaattgtcatggaattaaattccattgcttcttagtcgccacttaggcaatctcaaatcgatcatttctatccacagatgcaattgttgtaaaattaaatcccattgcaacatcacagttgatcttcagccagttcatcgaggggggggaggggtctagccgcgaataagagttggggctgaacgagggaagatcatggttgcaaattctgcaaaggtaatcatgatacaattaatactacaattatcaagaaacaagttatcatgtaccttctcattcctcgctttccatatcaaatctgccacaaaagacgcataaaggaagagctttcttgaattggtacctttttgccaagactccacaagaatttcacccaatcccaacaattttctccgctatcctaaacatgcattagaccctaaggagacaacctctaaatgtgagaagcaaagtcacaatacccaaaacaatgctccatgctttcccatgaagctcacacaagggacgggttctattatcaaaaccaaaatgattgccaatgatccttttaacatgaagcgccctaaagagaattcaccaccataaaatttaatgtctttccaaggccacctcgtcactcccagctctatccagagcttgcaacaagtaacaaaatttggtggaaaaaacaccactattatcttttgtccacatccacccatcacttccttccctcgaaggccttcctatttttcaaatactagcaatcctcttctcatcatagagttggtggagtttttagatgttccactcatcaccaccagggtttaacaagtcagccacctttctacacctatcagttgggctaccacgaggacttggacataaattagtatcatagggcaaaatttagaattagtaaataattagagatttaattgttaatttatgattatataattcttagtaagaagtatgatttattgtcagaaacaaacagcccttagagatataattttccattatggagaatttattaaattctaagtgtattatatatgaaattttatatttttcatattttatgtccgataatagtggtttgcaatgatttgattattagagtcacttagatacagctgagtatctcaaaatcagcggggcaatttatttaaacatcaccaaatattgttaatcatcgctaaacttcatctttaatctcatatttggtttatcattgtaattatatcgctaaatatcgcaaaatatcacaaaaaactagaaaattagaaaaaaatgcaaaaaaacgagagatgtcgtgagagaagacaacagcggggccttgcgactgggattttgggtctgtgtgttcgataacaagagttctgggtcggggttcaacgccggagagtgagaaagttagagagaagttttttttttttttttttataatgtaagagtattttttggtgaaaaagatattaaaaatatatatatattctatttttaattgggtgttatattcaaacaacatatttacatttaagcatactaacctaaatttcctttaaagaattagaacaaaattacatctaaacagtaaacacaccaacaaattaagagggtgatttaaatccttaaaatttaccaaaggcagaagagtaatctttcatgccataccataccataccataccatggtcatgtagcttttttttttttttcttttccaatgggcatattatgaaattgacttaaagctaggctagaataagctagctttgccaagaagtaactgatgacagcctatctttcaaaagtagacaagacaatatagtcaatagtaaatttatactagtcattcttacttttattcatcaaaaataaaaaagacaacaactcacattttaacaatcccacaccatacccattactctgccaagtttctaggattttgtttcttccaaaaccccacttccaacttccaaagaggtaagtaagtcactttctcattatataaatctacatgattataatttatttatcagtattgttttaagtcattgatgatacttgtggatttcgtttatagttttagttaatttttaaaggcacaaagaattatcatttgttttatagttttggtaagttctttttctatagattggtggtcttaatgtaaagatttgggatatcaaatgagttattagatgtttaaaattcaattgcaaaaaattaaaacttcaaaaaagtggtgttggatttgcaatagagagaaaaatagaggtgcccaagtgaaaattttgattgaaagcataagaaagtgatgaacttctaaagaaaatttagatgattacttatattactttacaattcctaaacttgaaggtaatgctttgaaaaattgtttcagtaactgatgatgaacaaaactaagaagtatgaagtgggtaaagggaaagaggaagaagaagccaagcaaaagaagtttaaggttatattgaacaagctcactccccagaattttgaaaaactgtttgagcaagtaaaatctgttaatattgataatgctggcacacttcgcggtcttgttgcacagatctttgacaaagttcttatggagcctactttctgtgagatgtatgctaacttttgctttcaccttcatggagagttacctgattttagtgaaggtgataagaagattacttttaggagattacttatcaataagtgccaggaggaatttgagagaggagaaagagagcaagaggaagccaacaaagctgatgaggagggcgaggaaaatctatcggaagaggaaagagcagagaagaggattaagacaaggagacgaaagttgggtaatatcaggttgattggggag

SEQ ID NO: 17449 - DNA, 4047 bp, Cannabis sativa
  modified_base (3992)..(4003): a, c, t, g, unknown or other
attctaaattttcacttcattgctagttttccattggcactagatgtaaaatatgctgttgtgcatccgttttaacttgaaaccagatcaggtggaatttctgttatattttaagttctttttttttgttacatgatttatcaaatataaacaatatagtaacatggatcgaaatgagatatacagtatgtttgcttaggacaagcttttgggattatgaacaagttggcatgtttttgtttttgatgtcttgactgctgatataagtgtttatgtatatatttttgtctcaaagatattgactatgtgctaatattgttcgttcctttaattaactacaataagttcttattgcagcaaagagacgcaagtaaatgactgtgttgctgaggattacgatgtgagtgagcgagctgttcctcctacatctttcagttagagaccaaattgagctagaattttgtagaaattatgagcaatcctagcacgaacgtagctgtaatttagaactagttttaggcctattgtgtagtaagtggctaagttctgttgcctgttggtcagaaaaatctgtaataatctttccacgggagactggggagatcttttattccatagcacttcaaactcatcgtaatttttttcaccatatattgtacattggaaaatgtgaatgatatatattttcggaactatgtaatttgacttacaaaattttgaggatgtatggtgctgtgttgagtttagcagttccatgaatcagcaatcaggtaaacataatacttgtttttactatgatttatgtacatgaagaagcttgatgcttgtataattgtattagacttctcttgcttgtatatatggattgaacttttgtttttctttgtacttacacctcaaaacaacaaaaacttaaggggaaaggagagaagctattagactagcataactggttcagaagaacaaaatcttgtagaattcaattgacctcttatcctaaaattccacaatttccctttagaagaaactaagttctcatcacataagaactcccaggagaaccatttctctattgtccgatctacatcatgtactactacatttgtttcattcccatttcttgctaacacagctgcactatatattgctgccatcctacctggtgcttccggtgcatttccgcttggtccatccacgaccaccacatcccattttagatcgtaaacttcttgcggtaaatttctcaatgccagtcgacatttcgacatttgaagttgtcccgagcttgctgtgcaagcctggctttttcttgcatgctttagcagtttgtatgcatcttttgcaggtacttgatactcaaccttgtagatttttgtcgtgttgagctttgtcttgatcttgatcgttcttagcttatcaagatcgtcctctagaaagatggtggtgccgccagcattgattgatgcaaggaatgtgtattgttgttcaagcccaaaaatgaggaggttgcagggagctctacgagtgaccagatttgataggagttggaattctttttctgtcagccaagtcatatttgctaaagttcctattcgattcgtggaggacatagattcatgtaagggaagttgagtacaagatggagaaggtgaagcacatgcttctttttggagaggagtaaaagcaggtggtggcggagaagaagaagaagaagaatatgaagtaactgtgattctaataagtctgaggattgaaacggttgctaggatcaaaacaagagaagggatgacttttttcttggtaaagttcatctttttggttctttgccaatgtttgtgggtaaaaggtaactcttgttttgcctcaggtgaaactggactcaaggttcgaactaatactggagtcacaagagaacggcaataaggcacctctgggggcattttcttcttcagttatcaacaccaaagcagccactatgacattgtccttgtgtaaagcagtatattatctgggattagtttttttatttctttgggtgattttaagttgttatgcagatgggtctaccacattgagtgagaaagaaggaatggttttgcttttgtttcaagtgtctctcatttgtcttataactttagccctcagcttgccaccaaactgcccatatgaaagattggaagtcatgaggtttggtttcccactttacctctttaaatgctaaactagacatgaaactttataaaagttgtagactttgtatttaaaaaaggttctttttttagggattgtttggtgatactgagtgaagttgaagaaggcttgtcagtagttgctgggtcactttcaatcaatttgacattctctaaggctctaatcagttataaggtaagccacttgattgctgatttgatgtaaaatgatgttaagttgtgcatggcaaattttggtttgcttacagttgctgaaatggcaaaagagaaaatcattagtaagtattgttgggtaatcactatctgcatttcattgtcatttgataccactgtcgagatttgaggtcactgtggttgttcaagtgttgtgaccattgatgctcctcattttttctttctaaaatatgttattttatgagattaatttacttaaaatataagagatgatgaggtgtgttatcatcatgatcaataaaatattagccattaattcaaaattagttgagaagtttcatatttatttgtaagaaaaatattagtttggtacccgtttgatttaaataactttgttctgcacctgaacattttcaataatttttgttttagaatataccattttagtacagcatatattaaaattaaaccctttttaatataatatggtatgatcatttgttttgccgatatataaacttaaaactttttctagggtagtactattcaaaagaaaattttgcctagggtttttttaaaattaaacttgcactagattttgacttttttttttaaaatggcaagtataaaaaatactattatgctcagttttctttattttacaaaaggaataaataaataaataaataataatatcaaatttaattatacgcttggttctggttacatttgtctaaatgtaattattttacttttagttaaatgaattaaaaaagaaaaataaaatttaacacttttccttcccatttatgtagatttaatttttaaaaaattaatttaggtttagtagaacttttgctaaattgtcttttaattatattgagaaatttaattagagtaaaatattcatgtttaaaagttgaccaaaattaagcatagtactattttaataaagtcttagaaaacaagttaaccattgaaacttttctaaaataaagagataaaatggagagcttaaaactttttttaattatgaatatttagctaaaatggagatgatcaaaataatatatttttaaatatttctatttttatcaaatatatcagatagtttacataagtatttaacagtcacattcaaaatactttatccaaagtaaatatatgttttgtaaaacaaacaaaaaaatattattagaattttcaatattgatattttaagtgaagctaaaatcaaaagaactaaaataatattgatttgaatacacttcatcttacaatgtgaagatcttatctgatttttcatgggatcaaacttttgtatccacatactctcatctggtaacaaataaggttaattaagatttctgcttttatcaaagattagattgtatcctgaatttccaaatcgttaaaattgttatttgaactagattcaaaaacttttgtccagtttttgttcaatttgactaacatatgcctaaagtagcaattgtccatatatcaaagcgtgtctcacaaacttctgttcatattaggcccccgttaataaaattgaatggtattgaatagaagtctataattctaataagggtaaataccattttnnnnnnnnnnnnttgcaaaagttacagattggaccctgtgttttgttaaatgacaa

SEQ ID NO: 17450 - DNA, 8079 bp, Cannabis sativa
ctccatgtggcaagatcaaactgccactcactagcagcactagcccaaggtaaaccaccatcatggccacgttgttagtggtggatgtgaagtctccatataacgtgatgctcaaaagaccagctctatacgacctttgagctatctcgtcaatctaccatttatccgtcaagttcccaatgacggttggtataagttatctccttagtaatcaaggaactccctgtgagtgttataacactttgttatctcttaccaagaagatctcctctgttgcttcggcaccagaggacgaacaagacctctctcatgaaagccaaagagacgacaaagcccttcaaagtttaaactacatagaagacagaaagggtacctaaagtcagttgaaggtgtgcctaagacagggatgacattgacccatatgtgtgaaatcaactcggtagttggtctgacgaggaactcaaagaactttcccataacataatgaacccgaccaaggttatcaagattggaacaaccctaacagaggtcttaagtgagatgctcatggcttgcctcataagaaatcaagaaattttttcctagtcgcgtgaagacataattgggatcgaccctaaggtcatctgtcatgccttcacatagacaaagtaaactttcgatatgtacaatataaatgtaggctccttgacaaagagtgcttcaaagctctcaaggaagaagttgaaagactatgggagaacaacttcattagggaagatttctatccaatttgggtatccaaccctggtctggttcctaaattgaatggtaggtggagaacttgtgtcgacttcactgatctaaacagagcatgccctaaagactatttcctctaccacgaattgatcaattggtggacgcgatagccgaccatgaaatcctcacattcatggatgcctattccaactacaaccaaatcagtatgcacaaactagataaagagcatactagtttttgaattgacatcgggctttaattctacaaggtaatgcccttcagactcaagaatgtaggttacttatcaaagactagtcaaccgaatgttcatacctaattaggaagtctatgtcgatgatatgctagttaacttaaagagatccaaagaccacatcaaagacttaaaggagtgcttccacatcctgcaggaatatcaaatgaagctcaatcctctaaaatgtgccttcagcatccaaacacggaaatttcttggattcattgtcaactcaagaggaataagagttaatccaaaatagatcaaggccttaaaagacatgaagtcaccatcacgagtcaaagacgtgcaaagcctaaccggatgtttttgctgcacttagcaagatcgtctcaaagtcaaccgataagtgtgttcctttctttaatttactaaaaggaaggtacaagaggtttgaatggactgatgaatgcaagcaagccttccaagctctcaaacattacctagccaggccttccatcctatgtaaaccaatagatggtgaagaattattcatctatttggctatcaccgagcatgcaacaagttttactctagtgcatgaggaagaagggatacaaccctcggtctattaatcagtaagcatctcattggggccgagtcaaggtatcccccccattgagaagctagcctactgcttggtactggcctctagaaagctaatgccttactttcaagctcacacgatcaaggtgttaactgaccaaccacttaggtaagtaagtttcgatggatgaatgaagccagaaagcatcagggcacctactcaagtgggtagttgaactaggtcagtttgagatcacctatcagcctcgcacaataatcagaggacaaacattagcaaacttcattgctgagtgcactggcctcgaagaagatgatcccatgatctgtgaagaccaagtccacacgcttgagactccagctcaggggacactagactttcttgaaagctttatgtagatggatcctccaatgagcatgattctggtgcaggactcatcttagtaactttagagagatttcaaacacacaatgcattgcaattttagctcaccccaataaacaataaggcagagtatgaggcactcctagtaggactacgattagcactagcaatcaaagccgactcacttgagatctatagtgattcatagctagtcgttaatcagattctcaataagtttcaagcttgagggtcaaacatggtatcatacttaaacaaagctaaggatctatagtctagctcaagcactactccatccaacaagtgacgcgtgaacagaatgcaaacgcagactcactagctaaactagctaatacaactaattctgacactcacggtgtagttctcatcacatacctagccaaacaaagcataaacaaagattaggagcccatcgtcatgatcgaaaaattgtacatcatggatgactccgattgcccaatacttagaacaaggtattcttccaactgaccgaaataaagctaagagattcatgtccaacaattttggacatgaaatataatttttaagtccaacaaagctggacatgatacaagcatcccaatgggtcccatcacatccaacattgttggacatgaaaaatacctctttcatggcgttgcatatcatatctatcaacaagaggatgtaaaagagctttcatgaccagtttgatggtcatcaatgaccctttctgtaacagtgtgtaatatattggtatgataacataatttaacaattttatgtgtccatttaagataagtattacctatgtgatgcaacatatccatacacttagggattttgacctccttataataatatttgatattggttaggagattatcgtcgtaggcatgctgtaacgaaaaggagaagtttaaccacactcacgctcaacttagaaatgttattgaacgttcatttggagttttaaaagcaagatttcaaatactagataagatggctccatatgatttttttacgtccaatgagatattattattgcatgttttgcaatttagaaattttatcaagaaaaagtgtatcaatgatgaattcttcaatcaatttgatcaacctcaagtaatcattcttgcaagaaaaaaaaatgtcaagtaatctttgaggaaggaccagaaaaaaaaattggaggaaacaaatggagccagttggagagcagaggatgcacagatcatgaaaaaattgaggaatgaacttgcactaaagctatttcaaaaaagagaaaacaatacatattttaaatttcttaaaattaattatgttttgtatttgaatatttgtattttttaaaatataatttaataagttcattatattatgtaattttttaatttgtgaataaacttctaagtggtggaagtttctttggaagctctctcttcctctaaagataaagaattttgtatgaaaagctagtgtgaattttatcccaatttatgctaatttaactagacatgaaatgaatgcttctaaggtatgtcttatttgtttacggaacaatgaaacaactctccattccttgtggttgtgtccttcctttaaatctactcggcatgggtagggtttgaggggcttggatagtttgaagatggcatctaatttctatgaacttttagttggggttatggatattttgtctaaagaagaagttgaagaattttttgttctttgtttgagaattcggtatcgtctcaatacctttgtgcatgataataagctgatttctaatgatatggttagtagctaggctcttagctatctttggtggttccaagatgcccaccaccactctgatcgatcggtcctagtgagttcaacacagtcttcttcttgtcatatagcgggagtgagtcttgagttaaatttgagagagattaatttgtttgtggatgctcacattttctctaaaaggaagaggtttggcataggagtggttgtgtctcatcccaatggtgatgtgctttgttatgctgctactccaaccgatggcataattgaaccgcatgtggcggaggcttcagtcctgctacaaggtcttcatttttgtaggcggtttgggtataatcacatttgtgtgttttatgactgtttgcattttgtaaattcagtctctaataagatgaaagtttgcaatgagtggtattgttattaatgatatttttcatgtttgaaagtctttctctcatatttcttattctcattgtaagcgagctaataatatttttgtacattctttaactaaataggccctcactttagatgattttgagtttggttctctaattatttgcctaacttattttaatttttcatgcttgtaatgatcgttggatctctgtagctttatgcctttttaatgatattatttatttttttcaacaaaaaataaacactaaaaaaaacattcagaaattaaaaaaaaaaaaaaaaaactgtgaaatatttcaaccaaacaaattgaaatgtcttgatttaaaaaagaaaaacaaatgcaccccaaatgtccaaatatatgttcttaggcatctaaatttttgggaatctctcaactttctctacatagaaaaatcaaaggtttcccaatgtgaagcaaagaggaatgtgaattcaaaaataaaaaaaacaaaagtatatctcttgttatttctattttagggagataattgtccttattattaatttatctattaaaaaaatgacatctctatttcatgcaccttaaattaaaagttatttaaagaatcgtatcaccatcctcttctccctctctttctttgatttttatttttttttgaacaatctctctctcgtttttttttcccaaaaatctctcacaaataataataatatttattttcaaaaaaaaaaaaaaaaataatatttatttttaacaaaaataaaaaaataaaaattattgaaaaattgaaccaaaccaaacacggtttaaaggtattttaatttttgtatcacaaagaaagaggtattttgttgaggtttttcctcgtttctgaaactgaaaaaccaagaagaacctctctaactctatattctctctttcactctgaaatctcacactcttttctctttcttctacctctgacctctctactctccccccaatgaagcacaccagactactgtcaccacccaccactcccttcctaaagcccctaccttttagatgacgaaaataccctcttcctcctccaccgcggtcgccgccgtaactctcgttgtcgttgttatcttcatctctttcattatcccttcaacctatgccctcggctccggcgacactcttgccgtcacctactccggaatagtctgtgggatagtcgccaatgaacaatggcagagaatcatctgctacagaaaaggacaacaaccactcgacgtatttcccaacgtgtccttctcctccatttccggtggccggaattccatttgcggcatcagggctggtggttacaccatgctttgctgggacaatctcttgatggagaacaccaccttacccgtgaggacgcagagggtttacttcaacaacactgtacgacttgaaagtatcgccgttggcgatccccatatttgcgcgacggtggtaggtaccggagctctgaaatgttggaggaacgacagtagctttaaatttccgccatctgggtctgatcgattctcttcaatatcatctgggttgggtttttcttgtggtattttgagagataataacagggttcggtgttggggatctgtttcaaccgttaatgatatacagagtgggtttgggaatatgactatggcgagtattagtgccggtgaatcacatgtttgtgggttgaatagtactgggtttttggtctgctcaggtaacaactcttcgggtcaattaaatgctcctcttggctcaccgttggagttttatcgattgtctctaggagctaaccatagttgcggaatcagaagaaatggctcggtggtttgttggggtggtggagggctattttctgtggaagcaatacaaggggtatcgttcgaaactattgtttcaggtttgaatttcacttgtggattaacaacgacaaacttttctatcttatgttggggaccaggatggtccaataatggctttgttacggatccaaattcagagcttcccttaccagaaattcttccaggaccttgtgttcaaaccatttctggaaactgcactatatatcctttatctcaaaagctctgttccggtaatggaaatatttgtaagacatatttttctcaaatcccatcaaccccaccaccgccacagcaacagtcattgccgccggttttgcagccgcagtcttcatctccctccaggggtttgaggaagggtttattagcattcgctatagtgggatcagttggagcttttgccggggtttgcacagttatttactgcttatggacaggagtctgtttcgggaagaagaaaatccataactctgtccagcccacgatcaccagagctgccagctccaatggcggaggccctaccacatctaacactagcccaccgtctaggtcttcaaccattaggcgccaaggctccagaatcatgagacgccagaggagcggaacttcatcgaaacacgcagaccgggctgaggaattcaccctcgccgagcttgcagccgccactaacgacttctctttagagaacaagattggcgcaggaagcttcggggtcgtctacaaaggcaagctctccgatggcagagaggtcgctattaagagaggagaaacaggtcagaagatgaagaagtatcaggagaaagagatggctttcgattcggaattggctttcttgtctcggcttcaccataaacatttggttaagcttgtcgggtattgcgaagagaaagaagagaggcttctggtttatgagtacatgaaaaatggtgctctctacgaccatttacataacaagaacaatgtcgagaaaagcagtagtttcctcaactcgtggaaaactaggatcaacatagctctcgacgcggctcgtggcattgagtatctacacaactatgcagttccgcctataattcacagggacattaagtcctcaaacatactgatcgattctaattggactgctaaagtttccgattttggattgtcattattgggacctgaatcgggtcgggattttaggccgacgaaggccgctggaacagtggggtacattgatccagaatactatggtctaaacgtattgacggcaaagagtgatgtttatggacttggggtggttcttttggagatattgacaggaaagagagccatattcaggaatgcagaagatggtggcacgccaattagcgtggtggacttcgcggtgccagtgattaaggccggtgaattggcgaaaattttggaccaaagggtgggacagccggagctaaacgaaggagaggcggttgagttagtggcctatactgcaatgcattgtgtgaatttggaaggaaaagagaggccaaccatgactgacattgtaactaatttggaaagagctttaactctctgtgatgacagccatggcagcatctctagtggtatgttattctctattcattcagaataggaatgaacaaccattaaagatttgaaaaagaaagaaagattgattttttaagttaacgtttttcgtttgaagataattcttgtgagtaacaccatttttcttttctcatttttcaccagtgtaaagtttaggactttaaccttcttttgaggtcttagtttagaatttcgtgaaacactaacaactagaatgattttaaatgattgattttcttgtttagggggcttatctttttcacctttcaccccctcacattattttgaaagccatcttgaaattcataaacattctttctgtcttctactttacattttgtgtattctcttctctagctatcttgttcttatcacatgtgtatacttctacttttgtaaaatccat

SEQ ID NO: 17451 - DNA, 2669 bp, Cannabis sativa
catgaatttctacatccaaacacaaccacactccacacactagcttaatgagaattttaacaacacaaaaattcccacgttttcttcattaattttgttaaaaacatacgttttatgtatttttcttcatttcttttacaatatggcaaaaatcagtccatacattacactatatgcaaattgtgcttcttgcaattacaacaccatattcattgcatcagaggcccaggcccaagcccaaagagtttttgttttatttttctttaaaagaaaaaagaaaagaaaaaaattgtttccctcctatgtgtttctctctgatatcttattcaaactagcatatgaaaactttggcaagtgtaaaaaactccttatgtgaaaatgaaaagagctcttcttttcattctctcttcaaaccaaaataaaaaaagacactaaaacttttgtgtttgtgcacaaaatgatatatcaatatcaacaacgagcatccagtgtagaagtttgatcaatttcttgaataccctttttcttgttgtgaaacaaccatccaattataggcactaatggctttctcttattcttcttcatagaaggagatcttctatcaccaccaaactcattacttgtaacaataacttgagctagtgaaggtggacttgcaaacttcacatttctcttcctattatgatcaaaatatcccttaccatcatcatcatcatcatcatcttcactcttttcggttttgatttcgattcttttcggggtttctatgaatttgagatcttcaatgtcaggattaactgcctttaacttttgtagttctctttttgcttcttgtaactcttctcttaatgtgtttatgcaatatgccattaaattggtctcttctttagctttttcaagactttgttttgtgttctcaagctctaatgttaaagctccaattcttgattgaccatttcctttctcagcttcctcggctttaatctacacacatcaaaattgcatattatttccattacaataaatagttgttagtatcattttttttccatgcataaaaaacccattacaaattacaaatatgagaaaatcaattcaacatatttgtcctacttgacttgtacattttcatgtcaaatattcctagtgttgaaaatgaaaatatcccaatttgaactttcaaacacaaattaagatacaagaaaagaaaaataacctctttgagtttgtttgcatatatttcaccaactaaaactttttctccaaatagagcaactgcttctctaacggacttgaaaggcgctctagtgtcaatctcggcgcgcccaatgacaactaggttgccctcttgctcatgctcttggtgttgatgatattctccatccattatttttgctaagaagtttagtgtagaaaattttgtcaaacacttgaagaacacaaactattaatagagaaccaaaaagaaaaacaaagaaggaatgattgtaaagaaggtgacaagagtgtccccttttaaataaaagaggggtttgttgctaatggcatttgtttcatttgatttttgctttttcatgatgttaagaaaagggttgttaataaaatcatgttggagaaaattaatcttttgtgtttttctttgcgtccactacacttgaattttgttaattgaagttgacatataatgagttgggttggtttagttggaccatcttgatcaaagattgtttttttggggttagttataattgaaaatgcattccttcttctcttgattatgacctctttatttttttttatttaattattattgtatatttatctaaatatactttcttcatggaccccagcctccatttcagcactggtggagcccaattgacacttggaaatagcaattccatcatgaaaccatgtcatatgcataccaaaactaaaagcacaattgaatttatggagtgatctttgttacattacatgtgtattttaattaatattttaaattaattttattaatattattgtttaaaataagcaagggtgatgtgacattatttaattttttcttttaaagttactttattagtaaagagtatatataattataaaatttaattaaaaaatagtatactgaattatggtggataatttttagagttgtttattattgtagtaatttttgtaaaaaaatgtgtttgaatgggagagaaaataatatatatatatatatatattaggataatatgtgtattttcattagagatgctaaaaaaattggagaatgcttgttgaggtgaataatttaattggcaaaatataaaggtactattggaaagaaataaatgtcattttaaaattttagattgatgccaaatagtggcattggtactgttttttttttttttcttttaaataaattattattaagtagatgtaatactacaccaaaatagggatttagtaacatttagaaatgttattattgcttaattttagtaacatttatggatttagtgatattttttaaaaatgtaaaatagacccgcgtgagcaaagatacaaatgttactataatctctttggtgtcatttgaaaaaatgtcactaaaaataattaaaaaatattttaaaatattattaaattatatattatttatttattaaattaaa

SEQ ID NO: 17452 - DNA, 3150 bp, Cannabis sativa
taaaattcttatatgcccttgatcctatttttatattctcatttctaagttgtgaggaaggtctatactgtgtcatgagatgtgatgatagattaagtgggtttgattcattcattcgaggacctaaattcttttgttttagtgtatattgcttctagtttggattcttacaataaagtttgtttcctatatgataaaataatgttctttgtttaatagccaagaaaaagtgctttgtttatttattctattttattctatatttgcatttcatatatgacattttgcaatattaaaattttaaggatcaacattgtattcaccaaatcatattagatagaaaacattatagacaataagagtgaaaaaagaagaaaaaaaagactcacttgaaaaaaaaagaatggtcaaagaaagtttctatatatatagagagaaatatagaactaagtttgtactaacttgtttctttctatatttttatataaataccttgtaattgatgttggtaatagataacaacttggagcagaatttatgtactaatactgatttagcaaatatctagtgcaataaaataagaatcttatacaagtgtagattcacttttacattcctgctcatctaaagtaaattttcctttctcgtatatactctatttattttttatacagttttattggttcatgttggttgttcttgaattaatctagtatttaataagtatatgaattgaggctttgtttgatttgagttttataacttttctatttattattcttgtaaatttgagtcttgatttgcgtgctagtagaatgattatatatgtgtgtgataagactcgagaactccaactcaagaacacaataaaacagtagcaataataggagtaaaacagtagcaaacaataggaaatgtatattgaatgtatgagaaacccaattacaaaggataggagcccttaggcccctttggtgcaaatagagatttactcaaacattgcctagcttctttactatcttactcacctatatatactattgtattcccccctaaacactaccctcaaaacaaagactcaaatgcccttttatttaatataagctagcccaccatactaatcccaaggcctaacattaccggccgcccaaaatttaccttgtcctcaaggtgattgatgaaaatcaccaataagagccccatgctgaacgcgacctctgtcaaagaaccaagctagtaatgtggtattttgtggtgtccgatgcacaatcagaatgttggagttgtatttggcgctctctatcgaaaatccaattcagcaaagttaattgacttcctttcatcaccagaatgagtggaggttgaactgaagagtcacttgcatgagcatttgtacttgtagaccaatcttcttcccaccgaatagtcacaccaactgattctctcttggaataagctatacttatcacgtagatgcaccactcagattcgaaagtaaaatcaaatagcagaaattcagtttgtcgccctctatcaaaaagccactgaaggaatttgagcatttctttcctaaatatccagtgacatatagtaaaatgctcctcttcatgaactccattaatcccataaattctgtacgaggaaggaagagggagaagaagttcatccaagtccaccattacttttcctttgtgaaaattaaatctatcccaacaagccgagaggaatgagagatatgagagaagaatttccaagagatagtcagacccaagagaaccccttccattttcccaacaagttgaaagtaatgaagaacaaaagaaaaaattcccatagaaaagagattggagagctcgacccggatcccacacatggaagaaccaaacatatatgaaacttacagattttgatgagttgacagaagggaaaactcgagaaagttgaagttgttccttccccatggctaaaatcatggtagctgctgctgccatgtgcgacaccaacaagaaagtgttcgagttcgagcttggatccttccatccatgctggacgttgatggtaagaggaggtacctggaaaggttccataccgtgacaagaagatgaagaggagataggaaaatgggccatcatattggattgtatcttacttgggtcccaaagggcaaatctattaattggaaaaattaggttgagacatgtgtcatagtgggctacacttggagcaaattgaaataagtttggccatttgtggtacagagaaatgcaacgtgacctttcattaaatggcacatgctctttgatggtgtattgtttgggtcttttatgtgaagaaatatgattaaatggacagtgccaggatcagattggacccgcccattgaaggaatgagttagggtaagggttttgcttaggtgggccaagtttggtggatttggatatgaacaaagagttaaggaattgggccttgtgttatagggctttaagaagtttgtttcaccaaacttatctctcgcagggaccatcttcaacctcatctcttctgcctgaaccgtggggtctaacctcgacaatttctgactcttcccatttcacgccagtgatggaaccacctctagcgatcgtttctcctccggtgccaactcctccgatgttaaatcctgcatatatttcttcgccagcgacgttttcctctgctagttctttttcggtgatgtgtccttcacaccgaagcttcgatcgtaaggactatctggcacaccaatagaagaggatgatccataaagagactccgtcttctctggtgttttctccagtgaaatcattgttgcaggcagcgatggcatctcttccttcagctcatctctaacaatattgcaagtctggtgttggattttcaattgttcttgaactagcagagcttttgtaaccagatctatgagtgtcctaggcttatattgaagcaccttcttcaccatctcccttggaagattaaaatatcccgaaggaacgtgtctgggatacccattagttgtgcaacaatctgatcgaattggtttttgaactccatcacagaatttgtatagggaaatttgaattttcatacttacaataccctaaaattatttccctaaatgcatagttattaaaa

SEQ ID NO: 17453 - DNA, 5974 bp, Cannabis sativa
tttaaatattgaaattgaaatttagaatttacatatgagtttatttttttaattctattttttgaaaaatattgtttaatactttaatgtttattcaattcatatttattttttgacattaatttaaactataacttttttaattttgaaaggcatatactattcatttatttttttctaatcaattatttgaacaccaaaaactaacaacaacaaaaaaaataaaaaataaagatcggtttaaacgggttaatccaaacaaaccgacaaaaatcattgggcgagttataccttttttttattttttcattggatgggttacaattagatatttgcaacccgatatttatattgggttggtaaaaatacactataacccgacgaaatcgatcgatgtacacccctaatagctgaccactgtcacgctattggggcagtgcctatcaaatttgatgggcactgccatttccttatggcagtgggcggatatggaccttataaagccttgggtgacttttctcatttgtatttgatacatatatgtataagatgcaacttggccagtgaaacccttctccttatgctagggccgaccactgcactctattgtggcagtgcctgccatttccttatggtagtggtcggccaagtgggttctataccacttggtggcttttttcacttagttttgacatattattgatgaaaatgtattgttggcaaaaagtctcacttcccctcttcatggccgactactgccatctccttgtggcagtgcccatcaaaattagatagcactgccatttccttatggtagtggtcggctagggtgaatcctaggtgggaaatagtttctctcacttgtttttcactctttggtgttgagggaactcatttgaacaattttccttccatggtttgtaaggagagaccactgccacaagaagtggcagtggtcatcaaaactgaagagcactgtcatttccttatggcagtaggcgcaaatgccttttttccttgtggttttaatgtcattttgactttatgtataaacctagtcattttcatgctcaaataagtcaagtctttgttggttttattggaggattgaaatttaaagggtgaaaatgcttgtgcagcccatgaaccctagtttgggcacacttgggtgtgtgagtcccggcaccaattggttggttgatgttttttattactctaaaagtgtcatggagccttcaagaatgatgttttgatttatttgacatttataggtcttgattaaaatcgcaagcttgacttttttttattttttaaaaatcgagtgcaacattactaattatttatgcataaagctaaaatattatttgaaagcaattttcttccttaaaaaaagttttcctatttgttaattttttttgagagagagaatactttttcttaagccaataaaaataataagagtacatcataacatgttatgttaggtcacttctgattggacaagacattcatattattaattatatctgcctaaaaaaacagatcatctaaaatttaataaaactaattacttatttagtaattaaaaagaaattaaacatttccaaattaggtaatgtgcatcactgcattgtgcaaaagcaacatctacttcaacttcagttttactccacaaaatttatatgatgataggtttggtttaaatttcactccggtcacttatttggcttaattatcatgaaataatggctcaaattcatccatatattgaatttaaatgattaaaaaactgacagggtaactaaaatttaacaaataatttaataacaaatttaagttcaattaaatgattaatgactaggtttttagcttatattatatataataaagaatattaaaaaagagagagttgtgaacaaacaggggagagtggagttagcctttaaataagatggaagtgagagtaagtggcaatgtggtgtcctggctgtatgtaccgtcagatactaaagtatcagtgtttgaataacgtgtctaaatatccactactgttagtattgcttttaatatttcaaaaaaaaaaaggaagaaaattataacaacttttaatatttcaatttgatttttaacagattgattaatttaatatgcatgtatatacatttggtgtgagtagattttaatatatgtttaattaagccaaagcgtggtagagtgtggggtccactttaaggaaaaaagaataccagctgctactgcagacagaagcactgaatcagcgagccataataataagcaggtttggatccgaagctatagatctcccgagcctaactcgacacgtgtctttcatttattggctggaaacagttgttctttcgttttttttaataatattaattaataatactttcatttacattttcgggacacaccaacttcccattctcggccaaaacgaagatccgacgggggaaaccaatagttggaaggggtctagctgaaattacggttgtacccttttctctgtccacgtcagtattttgtttttgctgtacactttattattcagtctttttttttttttttttgaaacgggtgttgtgcaccctagtacagttaggtattttcacacaatttcacataaacattttgtaagctttatacatataatcttattttattgtcaaaaaagttttaatttgtttctgtatcaaggaaacgttgggaataatattctggttttaggattattgattttgtattcttttaaaaagtagatgatatgttattttcacttgctttaacataattaattagtacaatacataatgaaatacttctcatcaggaacgaactatcatgcctttttcaaatagagcatacttttctacttgataacaaaattatcaattattaaattaaattatataaagaataaatagaatttgtttcctcttaactatgatttgtatagtttgatctaattttattttttgatgcaaatttttttaaaaaaaattattaaaaatcgttacaaattttataacctcttaatcaatctttatgtctgaaatcacatgttcgaatatttttttttgattttttttgtagcggtatgcgttataactatagtatgattcctgtaaatttttaaatttttttgaatagtttacaatatcaaaaataaaattcatgatatgcaaatatgaattaacagataattaattaaaataattagaaaataaataaaagaaaaaaaaatgagagaatagaaaaattagctctttgaaaagttaaaggattacatcatctatcctaacattatgtataattcgaatagtttacaggggtgatgttatgagcataacgaacaccttcatgagaaaaaaaaattgaaaaaaaaattctaacatgtatttccgagcacagagattgactaagaggttgtaatatgcaaaaataataatctaacgcgtcaatatttttaaagttaatatctctatatttaatatcaataaattatatttttaattggttaaaattgttaaatagaccattcacttaaacaaattgcttcaaaaaatgatcataatgtacttgcatagagatatttacaatatagggataaaactctataaaaattatagttgaagaagaaaaaaaaaataccacttattttcatctaagttagtaatcatttataattttgctcgcttgcttagtatagtcttaatgtgggtggtttgttactaaagtataatacatgttaattaaccttccttgtggtgataaagcctaaagcccatactttaacagcctttcaacattaatgtgaaattaatctaaactcatatgcaaatgtagaaatcctcacaaaatttctacaagattattgattaaccaataaatgctctgtcattattcatatgtaaaggtaaaaactcatattttgctattatgttttgattgttaattgtagtaaatttatatttttctcttttacactcaactcaagtcattcttttattgacatgtaccactaagagacctaagtgcaccgttattcaccaaaaagtaacaatattatttattttcattaatagaattaggttggcacatatttttatattattttataacattgttattttccttcaaaaaactaaataaataaagtataacattgttattaaacaaagtggtgccaaatatgaccatgagatatagttttgcaagtggttgatattttcttacaataattattaaatcaaaaattataaaatccaatattgaattagaatatggcatatatttgtaatattggttatttggtagtcttttttagcagcattttccttaatttatttttaaaaagtattgattgacacgtgtaacttgattagccgatataatagataaaacttttgaccataaagagagagagaaaagaatcctaatcaatataacctttgttcggttcataatgggttctttgattttgatattttattttccttttattttataaaaataaactaaacatgagaagagagaaaacagaacgtaaaatgccaatagttgtacattattgggcatctacaaggtagaaaaaaaataaattattaataatgataaaaacaaagattgaaaggcagaaagagacccgtgagaaaagataaatccctttgtccatctcaactcaaacccaattttttttttttttgctcttttattttttccttaataaaaaaaaggtttagaagaaatttactgagaaagtattgtggtgggaaaaagaggtttcactttgaaacatttacttaagataataacattccaagatatcctaaaagtgggtccttctacatggcagtcattaaatgagtaatcaatagccacgtggacaacaaacgacccaataattaagtcaagcttatgatcggagccaatacagtctaaaaaatcctcatgtgaataaaattattaaataaaataaatatttggggaaataacaggtggatatatagattttagattatagaatatagaatagacacacacaaatacactgagagaggggtccgagcgtgactgtcaaatctacatattctctctctgaaaactcttttgtttctcttaaaattctcacaatccaaaatcccagacaccggtctggctctgttccggggattcgattaaatcgccgatccttttctacagttcctcgggaaaagccttcgcctctttctctttttccagtcccagaatgtaatgtttcagattttcaaggtacgaatatatttataaatatataatatatattcatctaaaaaacatgattgtaaatgggaaatcttttggggtcggttcgtttttttggtttgagtttttgttttagtttatgggtatatttttggtgtgtgtgtgaagacattgatctcataaagctctctgttttttttttctttactcttcttttgtgtttgttttttattctgggtctgggatgtttgagctttctcttgagaaagttaatgctctttctgaattataattttgtgttgaattttggttcttcgagatcttctaatgctaatttatggactttgagattttgattctggtggggttttgttctcagtttaacccacgaagtgttcaacatataaaaaattaatcaacaataatatattaaattgttgcacatgttgggtgtaaagttttttccccttttatgtttagaaatttaattgtcttagggcatatgccatatgccaattcattttgttcattgaaagctaacataaatgccgctacgaagctttcttaggtttccagtttggcgcttgggacgaagaaatgggttttcgatgtgggaattgggattttagcagccacgattgttgcgatttcacctttggacgccgaagccacaaggattgagtattacgccactgtggcagatcctcca

SEQ ID NO: 17454 - DNA, 6437 bp, Cannabis sativa
tatatatatatgtggctagaagtaattaatgtttatgactgtatgtgcacacgtgccatgctgttcatcatatgctaactaattaatgtgtggaaaagagaaggcataatataatctcaatctcatatggccaacatatgttatcatcatgatctttgaaataataaatagtatcatcttattagtgtagaactattgcctgcatgaataattgtacttttttctatttactgtttagaagaaactatacacacaatttgtaaaaaaaaatggagaaaatgacaagaaaactttactccttattagctctaactagaacagttgtacaatcatgattacttgttctctctaaatagtgaaattgtaacactcacaactcctgaactgtttttgctttatctatttattttgtttaagactataatattttcaaattagattgacattgatgatcatgtggttgtcacgtgtgaatttccaaactcaaccttacaaattgaaagtagttgtaattttgtaacactcttaagttactaaggtgactagtttgtggaaaaagaaaacaattaagttttaaaaaacagtacaagttgttttcaaatcccatattaatggcctaataagaaactaaattaattttcaccccatgtaactgaaaatttgagagccaaaaaaaggttaattatgatagttgggatgaaattaaccgttttaactaacctgttgcaaggccttgccctttatcagctaaagtaccccaacaaacaaaattgggatcaagatacactcaactgtcagctctgaacaaagtgtttctctacagaatgaagaagtgaaagggtgttgaggtgaatgaagatacatgaacaagaacttgttttccacttttgctatctctaaagcctccatgaaatgacaagtgtaaaagcatggatgagtgaagccatattggtgttcaaaactagctacaaaatccatttcttgctgttgttgtgaatattcatgtagtagagttggagatcttcttgatcctcctcccatggctcttgaaaatcccccgaaaatgcttcgcggtaggctcaccattcggcgaacaatcccataataagaagccattgatggggaaaaagaaacacaaagaaagtggtacaagtggtattagtactactacaattaggctctttggctcacattcatactctgtagttgaatatatggttagtttagtaaactattaatcaaagtatagcaatcaacttcatatagttcctttttctttttattttgttaaagtttagactaaagacacaaagagaccattgtggattgtggaagaatgtgaagattcttcattcattcattcattcattcttttaatttctggataatttaaagtagattctcttgttatgaactcttcaaccatttgttatgccagaaattcatgcaattttttaaagccatataaatttttagagcatacaaaactaaaagtggacatagaatacaattctaatgcttttcactatagctttcaatatccagtagttttacatatattctgttgttaccactaaaagaaaatgtaattgagattattctgagaattatatttgagttttttttaactgtcaaatattcaaattaagtcaagttaattaaagggagcaaagaaaaaagctgcagaagaattatgtacggcagatttcattttccacacaacttaacaaacagtactattttcttttactttagtcattagttataaggcccaacttaaaggtacaatgtcaaagtttaaactgtgtcttaaatagaaaagcttaaaaaagacttaaacagattcattatgttgctgaaatcatcatcattgtttcttctttaatttatcaaatttttagtcacaaaaatagaaccataataagcagatttaaatgcttgaatacccttttcaaagattatcaactatctctcattttctggatgtagatatactatatatggccattggccacatatctttttgacctccaaacaaactttatcaaaataacaataataaacctttgaactttataccaattgaatatatatatgtacatacataccccatgtgtctaatgataaaaaataataatatgataatttaatactagtttgaaggacatatatagtggtgctttaacacagtatttctcagcttttcttttttataaaaagtgtaatatagtgatataccttacaaacttgctgatagtaatcacatggtctccactccaccaaagtttgaaaaatttacaaacataaatatatatttatatatagagagaaaaagttttcattattatataaatgtgtaatcatggtgatatttatttttagttattagatcgatattaaataattgcgattaatttaaaaatattaaaaaaataaataataaagaacttgtaactgtatactttattttcttataaaaacttaattaaaattaactatatttaaaattaaattactattaattattaattaattttatggcatttattattaagtaaagatcttttagcaattaattttttaaaacttatataattgaaatatttgtagcaaagtttcttataatttaaaattattatacacataaccttaaataataaaaaatagttagaatgacctctaattagaggtaattttacactcaatcttattttcaataattttaagtgtcaaataagtgtgtcagtccaagactggttcaaattatttattttttttaaaaaaatatgaaaaactaaataaaaaaatagtttaaaatgtaataacaattataaattaaagattagttgactatttttgttcccccttgaaatcatcttcatcaatctagagattgtaaaaaaaaattaccaaagtagattattaattaattgagattgttgcttctttttcacaaatgagcataatagtagaaaaatagcaagaaaatcacttaaaaccaaagagaaatctaactgtagctagtggattggaaaaatgaatttgtagcagagatgtaggagattgcatcaaagtagaaaattcatataaagttagctaatagattttttttttttttttttttgataaaggaggaagataggtaagcggttgttgcaaaaaaaataattagatttccttttcagaaaataattaattattcaaaaaattattttagaaagagtggaagtctaatttttgtaaaaaaaatataattttattttaaatattatagttaaatggtttaactataaaaaaaatcataaagacttaaatataaaaataaaattatttatatatacattaattgctgaaaagggtcttgttaaatatttaaattaaattttaatttaattctaaaaaaaaaagaatttttatctattaataacctgttattacaaataaaaaattataatcattatagttacaataaaaatataattattgagtagtcacatcatatatatatatgaaagacatcaattttgttcctactagtagagatgtctttatttttagaatttagagaaattaaaactcattttttaatatggttgtgtatattataattataacaggaattctatctgtttttgaaaatttagaataatttatattgttgaaaacaaagatgaaacatttaactatatgtgtgtacaaaatctttaaaccttatttttgatattgtaaattatttaaaatttaaaaaaaaaaatattaagagatacctactataattataatataaatcgttatacaaaaaattaaattataatttcttgaaatgccaaacacataaatattcctatcgataatgataattttttgagaagaatgaccaataagaataaagagatgcagagaaaatagagagattagggtttcattcaattgtaaagtcaaaagtaaagtaatataattaataagaaagccttatatagacacctaacataatagactaaaataattctaaataattatttaacaccctccctcaaacttattatgatgcaagaagcatcgagagtttacctaaaagaaaacaaaaacaacaaatcgtatgcaacttagtagaaaatttagcaagctataatgtagaaggagcaaaaggaaaagtaatggtgcccaactttagatggtgacaaaaatgacaatcaatctcaatatattttgtgcattcataaaaatccgatgtgaacaatctggatggcactttgattgtcacaatacatgggagtaggacaagagtgaataacacttgttatccgtattttcggatggaggacacctgtaattgcgagacggtttcagctcaattgtccaggcccaaccaagataatggaatgggtccattatcgaagttaagccttccggatgctggataaataactcgtccaaatgatatacacctccagcatagtgtatctccagatggcatcgaatagatctttcggatgagtgattaatgggcattcaaatatctagctccgtatcacagtaatttattaccaaatatcacaatatcaagactttatttccaagatcatgcccacaatttgtatcttccaaataaggaaataaagtaatttttaatcaagcatttatgtgtctatattctccacaaagataggacacgttttgacaactatcaacgtgatgtggcattcacgtcagtagaatatcaaagcctcatgggttgggccttactaaatcaacccaaatgtcattatattatttgcatgtattccattagtgggcaaggtgtacaaacaagaaccctagcactttaaatataagaaaactcattcatgcaaagggttagaatctcaatccttaagtgcttaggaaaaatctaatgttcaaatacttgtgtaaatcataaggattttatagtcttaatataataatatttactcgtggactaaggttttttaacgccccaaccacgtaaaaactatagttcgattcttagtttattatatttctttagctttatcatattttatcagtttttgaaaatcttggtaaatatattggtacttttactgagagttgaacaaagaagtgatactaaaaaagttgtatactgcaaccatgatagccagccgaaccatcattgataaatctggtattcgtgacagggacgctcccatggaagatgtgaaccctaatacttagacaaaaataggagtcgatgaagactcaacagaagcaaacaagcatccttcaagaagactcaacatactgaaaaatatgttggtgagaatcccatcaatgaagatccagaggatgatgatcttgaagacgatagaaaagacaaataagaggaatattattatgagccaaatcctgcagttgctgagatgtctaaagaaatcgctgaaattaagaagaaatcgacagatcaggaggaattctccaattgaatgtaagaaactttaatcaaattagaggctagacttgaaccaggagaagtggctcacgatgacaatattcttgatgaccatgctccttaggaaaataatgctacgaggagtacaaaccaaaaagatcctggaacttctgatcctgcaaaggacaaaggaaaatgtatcataggggaactaaaaaaaaagattattcccactcctccacataataacacgaatactgccaaccaatctttacaaaaaaagaaggcagctaatgctccagagcaaagttgtccgattaatttgaaaggcagagttgcgcagggtgataagttgagtattcaggtacaaaagcctatcgctcaaggaaattaaagaaaactgccctagtaattttgttaaccagaatgggggagtagaagaggttcacccagttttaaaaggtagtttgtcaacaacagaccttcaggcacgtttagatgcaaagaaattaagaatgagccagaagtgagaaggggagacctcatggtagggccgacaaaataggtcaaacacgataacacaactcgaaacccgctcgagagttaacgggtttgggtttgccttaaatgggtgcaggtcgtattcgggttgactcatcgaacacgtttaataaatgggtcgtgttcaggttgacacagctaacacaaaactgactcgttaatgacctatttaaagttatttcaatacttcaacatgttataaatgggtcataaacgtgttgaatacttcataaacgtgttataggttgatatgtttaaacaaaatatacttttaaacgggttatacgggtcgtgttgtgtcaactcatttataaatggatcatattcaggtttcattttctgacacaattattaaacaggttgtgtttgtgttacttgtttgtaactgttacgaatattctgtttatcacgcaagtgtacgtatcaagtagtatctcacgcaagt

SEQ ID NO: 17455 - DNA, 3780 bp, Cannabis sativa
  modified_base (2737)..(2746): a, c, t, g, unknown or other
tagctaaagatacttcaaaacaaattataacagaacacaaaacatgaaatgtttaaatccaacatcgaaaagtgtatgtagatgtatgtatataaatgtctgataaatcatctctagtaaattatgaaattgacatttcattaaatgttcaaggcttagtggtctgggttggaatattgaaggaggggatcgttggcaatgtgggctttggaagctcatgtgggatttcaggtagttttggaatttcaagttttggaagttcatggggcaattctggaatcttaggaacttcaaattttggcaattcaggaacctttggagcttcaaattttggcaattcaggcaatttaggagcatcaagttttggcaatttaggtaccttaggggcatcatcatgactcagttcatgtaacttagggacttcaggaactttagggagttcgggttttggcaactcatggggcacctctggcactttaggaacttcaggtttcggtacttcaggaaccttaggaatttcaggtttcggaagctcatgaggcacctcaggaactttgggttttggtacttcaggaatcttaggtgtttcaggttttggcaactcatgggacacctcaggcactttgggaacttcgggttttggtacttcaggaaccttagaaatttcatgttttggtagctcatgagtcacctcgggcactttaggaacttcaagttttggtacttcaggaatcttaggaatttcaggttttggtaactcatgaggtacctcgggcactttaggaacttcaagttttggtacttcaggaatcttaggaatttcaggttttggtagctcatgaggcacctcgggcaactttgggacttcgggttttggtacttcaggaatcttaggaatttcaagctttggtaactcaggcattttggggagttcgggttttggaatctcaggcacctttggaaagttaggagtagtttctagcaaatggcgtgcctcggcaaccatcacggtattgatatagaaacaaaaagtgagaaccaaaaatggtaacacgatgtttggaatgcgtcgataagccatgttaatttcaatcaaatgactcaaagaagaattgagaaattgatgataaaacttcttattgagatgaagggagaatgtttgtgtattgaaatctaaaccatgacatgcatgcttttataggtagtgggacgtggaggtttgagttaaaattcttgaaaggtagtggtagttggtattgttgatcaacttcttactttcttaaatgtttaaaaattaatatatacctcatgacattaagtgacagctatacaaatttccacattattcattacatcatgttgggtttctttccaataattggataatgccttatttaatatagggtttatttggaaaggcataggttttcttgggttgtttttttattgtattttacgcaatctttgactgtataggaatttttattaattggtttaagaaaattgttggttgagctttggatagctggaacaattgttgaacaaattgtttacttttgttgccttaaagcaaatactcttttatttttcctgtttatttagtttgctttttgtaattgaaattttatgatatatatgtggtgtaaatattataacaaatatacatgcacactcattttgaagagactcaataaacaaggatatctctcatgtaaattttaatcctatataaattaatatagtcattgcatatagaacaaaacattttattttctaattaatattggaataaacaggatttatcctctaagccatagagttttacacttttctctgttataaaaattcttcttgaattttaaaaattgttataaatgtccccttataattacaatatcttgacaatttattataaataatttattggtataacactaacataatattagtattctaatcgagtccaaacaaaaataaatacatataattagtaatctaataataaattttgtgagaatatgtaatttcttaaagttattgtttgtatatattaatgccaataactagaatttattaagtaccttaaagttattaataagcacgtgtactacaattatacttagaatttatagccacataaataaaattgttataaataaaatgatcaaaatataattaaaaaataatatttgcaaccaattgtatagttcgacgagattttcgtaatatagagaaagtttaaagattaaactttacaaaggtatataatttatttattcgtaatattaaccgttactttacagcattatattaattaattaaagtggattgttatttaaactgcattatagttagagactataggcttggaatattaattaagtatgtgtttcatctttaatgcagattaatataacaaataatagtattattaagcatatatgcacataaaattcgtacgtaggtcagcggttagcaagaattaaatcaacttttggtgtactattcaaacgacctaaaccataacctctcaaacacattattacctacccataaatgtattttttgtgtgcaagaaagtagaagttatgaccttaaatatatagcaaatatatttatatcttcatatattagatgtgctatccaacggttagtttaatttttatatatatggaatattttttaagggtattacttattaataatgggtaataaataaatttaactataaatattnnnnnnnnnnatattaaactattagattttggtcgaataataaaaaagagaaatttaaatttctatgtttaatttaactacttaattaaagaaaatattaaaaaatacatctttttacattatatcaaaaatatatatgttcatataaaaaatatttaagtcaaattcaatttttttttatcgctttttttgccaaaaactttttttaattatttttttaattgatggaccaattccagcccatataatgttaaaattaaaaaaaattctaattaaatagaaaaatttaatcataaaaaactaaattttttttaatattatccattcatggataatacccattaagagtgcacttatatattgtaaattctttagtacccatcaatgtgtaatacccattgagaagtattccatatatatgtatattatctaatcttaacacaatttatattattatttaaaaaaatattattaattaacactacaaaaaaaaattatttttggtaacaacaaaacttgtgattaaaattaaaaaagttttgattaacaaattatcgttcttaaattgtgattaaaaggtctatgaataaaaatattagtcacaaaaatcacaatgttatgactaatgctcaacagctccaacaagccctaaaataagaatgtttttttttttttgaaaaatgcgtttataaataaaactgaagttagacctcatggtcattacaaagaatattaacaggtatagtagatatctctaccatgcccgtaacattgttggcaaacgcccatttggccacattatgagctgcgtaattacagtttctagcaatacaagaaaaattacaattagtcataaaagtagaggagcttgcaatgccgcacatagctctcaatcccccaaatggagtcatccccttttaggttcttaataacaatctcagaatcactctccaccaaaacaaaaggatgatgcaatgagaccgctgtctccatggctataagacaggctgcagcttctccagtgagtgggtcagagaagtgtag

SEQ ID NO: 17456 - DNA, 3527 bp, Cannabis sativa
ggtgcgccttagatagctctaactatggaaaaaagatatgatgaatgtaatatagaattttacatattacattaattgatgttacaaaataataacaatgtataatatatggtgatgcatgcatacatgtgtattatgatcatgtagacatgtatttatatttatgtatgtatgtatgtatgaatataattatatataaataataaataaagtttgtgacagagcatttaacaatgacagtgcaaaaagtaagggtactagtactagtgcatgcatggcagccgatcccataaaacaaccgcaattatagtgtaaaaactttcaagctaggggtccgcgcgcccttgacagtaactactcatgcctcctcctgctactacctccaaaacagccgtaaaggtgtttcataaaatgcctcacaaactaaataaatataaaatatatatatattgtatattgtcgacaaaacaagacagggccgacctataacaagggcatatataacttataagagagagagagagagagagagagagaaggtgtttgggggctaacaaacaaacaatatgtataggaaaattttctgacccacctggaaatggatgggggatgagatttagggatatttgagaaactatgctagcccattggttcagccactttcatggcctccctcattcaatgctgagtacagtaacccaacagaactatatcttatatgccaaggaatcaaaacttcacagtcacatttatatggtgccattccccactctctatatataaaatatatatgtacatcattgtagtttgtttttatatacttataaatatagtactacctactctcttacccttcttttttcgtctcttatttctctcccccacatattttgttttaacatatagctacctagctagatacctatatgtatatgtgttgattattaattagttaatttatatagcccacttctattttgttattattattattattattatttccttttcattgttataccttcattgcatgcctatgtagtactctacctagctagctttcctctgctctatgagattttatcttcctactatttacttatgtgacatcatatatatatgtgtatatatataagttttgtttttatgagacacggtgggagagatatggtatggaccattttggaccatgtgaatcatatggcagagacctttcgagagagaaaaatgtgtatggaaccatcataaatgcactcccaagagcatatattaatatacatacatgttgaatgtgtcatgtgataataatgtactatagtttaatagttaattggtaaataataagtctttgtagtatcaaatagtgacaaaaggataacctatatatcaaggctcttatttgaaccgtccaaggatcaatttctgccaaccctagtgaaattattaattttacttcttctatatatatttagattgaattgatcactagtgctcggcggaataggataagtttcttttcagttttattccacctatatttctagtaaattactgaaatggccctgagtaggggcttgatcgaggacatcactgatgttgtagtatgtcacaataaattcttatatcttttggttttaattatcaaccaactattgtaaaaattccaagtctatatattattaaactaaaaacatggtagaactattttagttttgtttttatatgtaagtaaatatacaagtatatatatttataataaatgatttttaattgggaaaattattgctatataaatatgtagagtgtggggataccagaaatggatggcaaatatcaaagtttgaaggtcccccactagtagtgtcaacagtgtgtatggagtgattacaattgtaacttttgtctttgtttgatatatacatacatacatatatatatatatatacatatatttggctatatgtacttccaattgagcatgcaatatataatgtaatgttttctgtggtaccacaccccctctcctcctggctcaagtaataaatatatatatatatatatttgataaggaagactatactgtgcatactcttaattaccttttgctcccatttttttcctttatatattaatttccttttaactttatttgtgattttgttgtgtcactattttattggttagatggaatctctgatcgtaaacattcatctttgatctgttttgttatcatttattttattataccttcaactaatgatacggatttacactagagttattaatttataacacataatatattaaatgtatttgtatatataattagtaaacactatatacacaacacacggtataaccatcgtataatatatatatatatatatatatttatatgtttttttctttttcctgaaagaacagaaagaattctattaatatgaaaaggtaaatctctcaactatattcaattgcatatatataatatatcgtaatatatttgatcttaaagcttaaaatatgttgcacttaactttatcgtagtgttagggcagtagctagaatctcctcaatagagaagaatgacaaagactaacatgatagatttaatgaaccgccacccacacaaggtgacactataaataataatgtcaccatatatacaaattaggcatgattataacttgccatagagagaaagaggtcattattcaaaaaattaaagacagaaatgaggaaacaactcaaaacaaaacagaaaataactgatgacacaataagggaatacaaaagaaaaccactacgacctcgagcccaaacatcaagttatttgtcattgtatcatgcatatgtatcaaataggcacataatattattaaccacactatataatgagattgtcatttagattttgatatacgtactaattaaatgcatatatgtaatctttttggtgaaccattactattttagtgcgtggttggcctttaattagtcgttaacataacgccaatgtcaataataagattgaattaaaaaaatacataaacacttaattgtcactttaaaaatttttaatttgtggctaaaagttaaaaaattgtgtacttataaatcattattcttatattgtgactaaaaggtatgtgattaaaagtgttaatcacaaaattttatataatttattgtgattataaatatgttaggcacaatacttgttgcgactagaactaaattaatgacaatttatatttaaatagtaagttttaatcacaagtaacgttttgttgtgaaaaaatcatatttaatcacaaaaaatttatattgtgactaaaaggttgtcactaaatatagcattttttgtatatcatcaattttctccacaaatatctatttatgttatattattattctttttaatgaatcagcaaggttatcattactccaaataatcaaatacaacttaatcagcatctccattaaagagacttgaaaatatttacacagcaattacaccatgtatactc

SEQ ID NO: 17457 - DNA, 5690 bp, Cannabis sativa
atgatttggtatatgttaaagttcggggagaaaaattgctaattagccctctcttaataaaagtaaagaatcagtactaacccccaaaacacactcagctagcagctatcaaatccattttttttttatatttgatgcataaatgaacttgcatctacgaattggcttacacatatgtttttatcattttagtcaatggcaatggcagttcaagtcgcggcggcaactttggcgtcagagactggatctttgtacctttctgttggtggtatgctcatgtgagtactgccttttaaacttttcttgaaattgaaaattatgtggtagttaggagggaatcaaataaattaagcaacattcaaatttgtctaggacttcactgacatctgtaagctagccataatgctgaaaactcagaacagaatttggataattgggataactatccctatgataccatgtttatagtagcaatgaaagcaaatcataatagtagtttggatggaaataatgatttcctaacattccatggtgaataggcagtgaatattttttccagaagatgcattgtcagcatattaacatagaataactaattgcaggtttgtattcacatttgctctaggcgctggtccagttcctggtcttctcctctcagaaatatttccaaaccgaattcgagcaaaagctatggccttttgtatgtcggtgcattgggtaaaagaaatactttcccttttcttcgtttattatctgttgctttggattaatagcattttcggaacttattatttttcattcttcaggtgataaatttctttgttggactgcttttcttgcgattgcttgagcaacttgggccgggactcttgtattcaatctttgctaccttttgcatgatggcggttgtgtttgtgaaaagaaacgtggtggaaaccaaaggaaagtcacttcaagagattgagatagcacttctttctcaggattagagattagaaaaggaaaaggctcaactggtggtgtggtgctggggagtacctaagtgataactactcttaaacgttgtcaacttagcctagtagaaaattatatacacttaccaatcgtcggtcgaagcaggagttcgttccttttgattcgatggaacaaacacatagtgagagtggtgcatatattagagattaggcaagattactttgtccatggacaatcttagtgaaccctgttacatgactcacattgtcacgtgagtataaaattgtgggtttaaattatccgaagtgattgctatatggaaagacaatttgaaagagcatttacatgcgttcttcttaatgaattgagttatttatactgttggtatgaatttatcatcagcatcatcggtgatattatcagaactaatagttgtcagtacgagtagtagtactagtatcttcatttgtagtcatttgtaattaaggcagttacaacttgaattctacttatgtttgtaagagagaaaacgaaattaagaagaccccaatactctcgctccaataaaagggaaagaaacaaaatcataaaccaataattagggtctttcgctttagatagggtatcttagaaaactggtatatgatttaccaaagaatatcaaagaaaattaaacgatacaacaacaaaaataggcacctcaacacccttcgagctcatgagaaccgaatagaaaaaccactatctgtggtgttaacattcacagagtcaaagtcctcgtcagactccgaatccattccattgaaattaccccagttagcagactcatcttctccggttctggtcaaaggaacacgtagttcggataaaggagctggtggtggttcttcgctgaaatacttgtcttgaagtaactccatggctgtagctctactagcagggtcataacaaacaagtcttttgacaatagaaatttcctcaggcgatcgattaggaagacaggcttctaaaccaatggggttttctaccttgttgaacgaaattatcttgaaatcagggagtttcacacaccctggccagacttcttcagttaagttgcccaaaacatttatgattctactcagctgatcaatatcagaagttcctggaaaaagtggctgcaaggagaaaagctctgcaaaaatgcaccctaacgaccatagatcaacctctaagccatagtctgtggatccaaagagaagctcaggagctctgaaccagcgcgttccaacacatgaagtgagacaacctagagtgttctctccaacatcctctgcctcataagaacctgaacccttgaaaggatcgtcgccaatgtcgcttgttgtgcaagtggctagacaagatgtatctccatcaggaatatacgtctccttatccaaatctttagcttttataccatccaacacttccaaaaactcttctttgctcatcattgttccatgctcttgcacttgacttctataacgttcctgatatgatattcctgtttcaggggttacctcatttggctgaaccatagaacctgcctcctttagtgtgctctcaccaacgtattcaggatccatgagtatcctagcctgcaagcaaagtcaaaacttcaaaccaaacattcactcctaaaactaatgaccacaataagattaaaccaaatacagattccaatcttgtgggtatgtgtgtatgtatgtgtgtgtgcaattaaccacatttctcttggtaaactaagggtctccttccaaaggtagaatggtttgaattctcaagatttccatcatttttcatgtctggccaattaaattcactacacaatcaaaagactgataatgctaaccaatctcacactatactcaattcaagaaataacacaatgaacaaaaaagaaaatagtggtttcctttgccttgaaagagtagtaacattcatgaaaataagattacctgcccaaaatcggccaatttgagcactccatcatcagagatcaacaaattgctgggcttcaagtcacggtggacgatcatattcctgtgacacgcatcaactccagacagaatctgcagaatccacctctttagctcgccgagaccaattccaccatcgtctcttttcttggcctcactgatgacagagaacaaatcggtcttcagaaactctaagacaagcacggcgtcctcgtcctctctccagaagtactcgtgcaaaacgacgacgttggggcaactttgcaggatttggagggtctcgatctcgcggaaggcggactggtaatcgtggacctccttgagcgcgactatgagaccgtcgtagaggcgacgggctcggtaaacgtcggagtaggctccggatccaacacgttcaaggatctcgtattttctgatgatttctgctcgggtatggatgctccagctcttgggcggtgaagggtccatctcgaaattaatgatgttgttcttgtgtagtgattaaagtacggagctcagtttttgagcgcgaatggtgaggctttgaggttgagaacgacgaccactgtgattactactgatgcatattgcatccatcctcagatgagaaagaaagatgatagcctaaattacttaaatgcccctctttttttctttttctttttcttctttgtatctatattaatgtaataataattctttttgaccaaaataataatttaattttgctccaacacaaaaacaattaataatattttgaagtacatacaatctacaaattgacactacaagaagctgagtatttcaaataataatactgttaaattttttaaactatttaaaaatatattattttattttatctctcttttatattattcttaatactttttttttttatttaaaaataattcaacgtaaacatctctaaaaaaattattaaaacaatcttatattaccatttaatgtatattaaataaataatttttttttattttatgataaaataataataaaaaataaaaaagaaaatatataaagaatgctatgatataatatttttttgtgatatttttttcatttcaatagtaagcattaattaaaaagtactaaaaatatatctatctaatcagacatccttgataactacgagagaaagacacattaaaaaaatttataatttaataatatagtaataattttagtatttattagtaaatatttaaattttaataatttttatatgttttttataaaatgttgttgacaaaatatagaataataaataaaacaataaaatacatataatttagtaattatatcactaattgtaaaaacaaaatataaaaaagtaagacacaaatttaagctcatatacaaaaataactccaacccaataaagcacggcacgatactctttttatatcacaacacaatactacaaattttttatgacacgacataacatattttaaaaaacaagaaaaaatatgggttatgcaaatcacacacatacttaaagtatttttgggttaatattattttagatcctgtattttgcaaaagttactgattgaaccatctctgtatctttcattatgataaaaataggacgctcagtttaattttcgacaactatttttttaatataatcaacttgaagacaatttctaacacaaacagatccagaaaatataaacagttttatcataacacatttagatcagattattattaaattttattttgataaaaaaaatcaaatcaattcaggtcctattttttatactattttagaaaatgaaaatatataatattcattttattattaaacaaaacaaagagtccaattaataacttttacaaaacacataatccaaaatagtatttaccctataacaatcttacacttttctatcactttaaactttgaatattatgccgttaaactaaaaaagacacatcagatgctctaactttttccttagattggtgcaaacaaaaaaatgaagtaaaaactttttaaaattacaaaatgtgtagcttttgtttttttgaaaaggacaaaacgtgagcttaaagtaactcatttactaaaataactaatatgagttttagaagatggcatgagaaggcttgactgaaaaataatgagggttggtagtagtatttaaagaggcaggaaaacttacctgtctgcaaaccagaatgaagaagcatatgatacagaaggccccctttaatcataacttctgtcctcttcttcctgctaatatttgaggcagaacagaaggaagtgtaagctgccccaacccaacacccattcattattatcatccaatccatgcatctaattctcccccaccctctctcaattcattaattatttttgtctcttattatttccacaccaaaacatatttacaaaatggctttgtttcaaacttttgagtaactcttctctttaagtgaatttatgaggagggctttcccttctctttctaccttttttcttttttgaccatgtcactacattccaagtaaaggaatctaccctgatataaagttctgttcaattaaagatttctgccatactatttgtggtaataaaaccaagacatttggggtatgtgtagagcaaatttttatttactgtgcaagtcttacctggaaagttccattatatgatgatgagcaacccaagcaacaaatttc

SEQ ID NO: 17458 - DNA, 4988 bp, Cannabis sativa
ctgtataaatagctctcttgtacatactttctcaactataaataaatgaattctctctttattttcctctaattctttccctttcgttactctcaataattcaataattctgagtttaaagtttcattttttttctcctttcagggaattccttttaagtcttcgaagaagaagaaaggcatgactgtaggttttgtgagttttgaaagtgtggaacagttaaaaactgctttggaggtatgcttgctacactgatggaatattatatgatgattgctctgtaaaagagctaatgatctttggtcgatcttgttattttttttttaaatttattttttgattgttctattgggcagcaattggaagggaagtccattgggaacaaaagtataaaggttgccgatgttattcctcgatcattcgagaagaatattaaaccaacaactgccttaccgcaaaacggccaggaaactgtaaaacctgtcatatccggggatgatggggatgtctctgttaccttaaatggggctcagaatgttgatggtaatgaagacaattcaacagttaatggttcggtgactagcgtaagaagtgttagagatgccgtgactccccttgcccatatggcctacagtgatcaattggagcaaaaaaagatgtctaatatgcagattctcaaaagacttgtcagtatctattcttcttatttatttttgttcacattactattgtttctcccattctgtactctgctttttttttttttgaattaaattaccatctcttaaatgttgcgaaatcttcattttcagactagaaatgcacgtaaagcttgtcctaatggtgtttcacttccagaatggattctcaagtctagagaaataggtggttatcacatttttgctagatgcaagaaaaaacatcctttaattttacaagtttatcatgacattctgagacatatatgcatgtccttagagtttatcaagttttcttgattggttatttttactctggtttgctccaaagaaggctgcaaatttcggtactcaactcccctttttttttgtaaatgttaattctgtaggtggtctcccatgcattttagagggtatactaccatctccagttataaatggataccgtaacaagtgcgagttttctgttggatattcacttcaaggaaaaataacagtgggctttatgcttggaaatttcaggtaaataaatatacgtgattgtgaggattgtgaggattttgttttcttcctttaaaagcatttgagattttagtggagtaatgaagttttttccagggagggtgtgacagcagttgaagaacctataaactgccctaatgtttctacaatcgcttgcaaatatgcttcaatctttcaggagtttcttcagcattcagacttaccggtttggaaccgatttaagaatactggattttggcgtcaattaacggtagatactgtcaaatcctaggggcaagaaagcacaatgccaaaggcccatttgctgataagttattattacttatttattcattaactttgttgtatttctttcaaggttcgagaaggaaggagaccggaaacaactattgattctgaaaacccagaagccaacattgccgaggtcttacttatggttcaggttagtttctaaatttggataataagttgaatttcagtatgaggcttccttactcttgttttcattataacatgcatctctaactatagcatgcccagtctatatcaaaagcctgcatacatgtatatttaatgttttattttgggtattatggtcacccttctactccttttgatcacataggtttccaccatgagctttgatgaggcattggtagctagtgaatttgagaaacttactcaagcattttctgcaggagctgcagcaagtgttccttctttgcctctaacagctttagttgttcaggtactagttcagtttcattttaaggtactagcatcatatttatggttcctagctttttaggcttgtaaaggtgaaggttctagtgatatctgtcaaccttattaaagattttgtatctgcatcaagttttgcacaaattcaaggtttttaattgtgaaatccactaatcattgtacctgattaatatgaagctctatcttctaacacatgaaattgatccctagcgctttcgttttgtctgcaaaatagtacttgttctgttttacattgccttgtatttggaataccagaaagtgggcatgttgggtttcataataatctcttataaaattatatgcatgttggggacccttgggtgtttatagtgtgtcagaaactgttcaacggagtaaatttttttggacgaaatggatgatggcaagtacattttttcctaatttacaaaatgaaggtgggtgggtctgggggggtgagtttgtgcataggagtgcacagcagaggaggatcaggaatattgcagcaatgccatgttatacagctgtttcgagttttattttttcctctcaattctcaattaagactattgggggttttcagattgtaattcttgagcatgtggcatggaactaatactgagcatattaaaccattactgcacgggaatgaaaaactggaaagctccattttgcaatcagaatgcaatggccaaaaaaaaaaaagaatgtctagtcggaaaactgcattttgcgattagaaggcaatgcttgtctgcttctgtttacttggtttcttgtgctttagcatggcatgatatggtctctttctaaaataatatcattcctttaaaatttgatgggtatttatttttttgcaggatcatcaaggaatatcaaatgtcgcaccagctgatgcaccactaaggcaactcccattgggtaaagagccagatgttccagaaatggaagcagacaaaaatctagtagacccaagaattcatgattacataagcaatcttaaattctgtatctcacccacagctttctttcaggtaaaaagctggtgatgttttttttcagtgtttagcagaaaagtttttccttgtaaaatactcagtgccaatattattgtaggtgaattcccttgctgctgaaaagctttactcgcttgctggggattgggcaggtttgggtcctgatactttgttatttgatatctgctgtggaactggaacgattgggctcaccttagcacatcgtgtgggtatggtaatactccccatccttattcccgtgattttcgttttaatgcttttcaatgtaggaaagtatgcgggaactaattggcagtcaaaacagaataaattcattagggcttcttttgaactgaactgggaagaagatgatatctttcatctggaaaatgaaaatttggataaattttgaaaggctcatataaactctgctattgtgtgtataatgatgaacttgttttggctctacactggtgccaggttgtgggtgttgaaatgaatgcttctgcaatttctgatgctcatagaaatgctgaaatcaatggcataaagaattgtagatttgtttgggcgaaggtgagatatttttattttctcttcgctcggaaaatatgttagttgaactcacttctatttttgttggttaattggtgaatgactcagttaaaaaaaaattgaacaattaatatttgttgtcatttaggtgttgtttttcttttttttacatttgatcatttatttgtatgcccctcattcataatgacctaggcagaagatgttatggggtcattgttgaaggagtacatgaatgccactcagctacaagatgagtgccaaatatctgaaggggctgttgaagtaaactgcacaaccgaagaaaaagatgggtgccaaatatctgaaggggttgttgaagtaagctgcacaactgaagaaaaagttgagtgcccaatatctgaaggggttgttgaagtaagttccataaccgaagaaaaagatattttggttaacaatgcagaggatcctgaaaggagctcttgtctctcagcagcagacagtatacaagagcctggagaaagctccaaccaagagctgcagaatgtaaatattgcatctgaaggccctcgggaaccagatagccaacttcaaagcaattgccagtctgaaaatgtgaatcccctggtgcagcgtttcaaaaatgttgttgcaatagttgatcctccacgtggcgggcttcatcccactgtaagtaacactaaactaccacacatgatggttttgaaatctttcaaaatccatgagatgcctctaagttatataacagggtgtgtactattttctagaatgattttatttttgattttccactgctgatgtatttggtgttccaccacttttatattgtgttcaaagtgtagtttttttaacgatttttttgatctgactggttgtcccacgaagcaaatctcttttggattgatttttcggtttttgttttgatgatgcaggtgatcaaagttataagaaccaatccacttttacgaagactagtgttagtaccaattactgttgtttttcttttcttatgtgtgatctttatctcaaaccttttaatttgtaggatctaaattcctttctcattttcgtgtagttacatttcctgcaaccctgagagcttagtggctaatgctatcgagctctgcacaccatctgccgagaaaaccgagaaaggaaataggaacaacagaggatggagaaacatgagcgctgctggtctagcccgaaacagggccaagtcaatgccccattccgagcccttccgacccgtaaaatctatggctgttgaccttttcccacacaccgttcactgcgaaatggtgatgctacttgagaggtagttagttttacaaataattatccgtttgctggaattttgtcatgaactgcttcaattattcttaggtttgtttatctgccaattttgtattga

SEQ ID NO: 17459 - DNA, 3944 bp, Cannabis sativa
tgagttcttcctagtttcaacttgccttctatggatccacttttattccctgctccttctagtgttgggtcgtgatcacgttgttccgagacagaacaacgacgacgataaaattatccgtttgtagaaatatagatattttataattaactttagaactttacttttttttcctcaatatcttttaatattttattttagtatttttatttagttgctaaccttacaaatcagatatcttttttataataattggattgggataatatttaattatatatgtcaatattgtttttttttattttatttttcaaatataatttaatatttaaaattaattataatactcattataatttattcaaatatttttttgttataaaaaaaacaatcttttacaaatgggccgaccaataaaaagttttttttttttaaaaaaaatttaatattaaaatataccaataagaatatattactacttatagtgagtaagatcttatcatttctaaaattatacagttattacttgcttccctcctcccaccctcctaattaaacttgtttgctttgagatatttagccatgaatcttttcatattttcttttctttccaatctcaatctctttttgttttccttatatcatataaggaaattatcttgaaatttgtgagaatatagtctcgctttttctggtccttatctacttttgatttatataaaaacaaaataatgcttaatttttatctaatgaacgataacacaatattacttattacatatttttgtttattctgttttatccgcttaataaatatatggacaataacaacatgtacattttcattgataattaaaaaatggttacatgcacatattttatatagaagacctacctatatatattatgtaagtatagatagcaaagcaatggtttgacataaagtacgatatataaaagtatacttgtttgactcgaatattagacacgtaaacttcaaacatagacttacagatttatacacacgcacgcacgaggcaactaatttttaattagatttgaaaaaaaaaagtattttttctgcagagataaagagagagatagaagagtttttatataatatatatacaaattaattacaaaatttaggagcttatatacactttttaatttaattatatatgggtgttaaacatggtgaagttaaactttgctgattatatattcgttataagttgcatgagatttgatgtaatttattttgttcttaattattataattaattattagtaacatactttaatttaattttgaattgtgatataatttattccgacaccttttcaggttactttcgtagcgttggatcccaactatcaaaataaaaaggccaaaataataaggatcatatataatatatatacttttaactgactgatatggtataagcaatataaatagaatcatttttctttttttacttttaacgattccgatgttaatgccccaaaatgtaaccttttttttttcaaaaaaaaaaaaaaaacaaaaaaaaaaaaacaatactagaaaaacaatactagctagtactaaccagtccctctaaaaaaactcaaaaagggaatctcttagtcgaagaaattaatggggtttataagattgtagggtaagtatgtctcctcttttatgtaaaactttcctgtttctgttttgagatataaaactcctcatgttacattttgagaaattagaaaagaaaacaatgtacaatttcataacactcaaatatatttatatatatatatatcaaaataaatattattattagctaggtagcttttctctcccccaacaccttttattctcgtcaaaaaaaatcacttgggatttgattccctggccttgtttttcaaaaagcttgatatgatcaccttgcttcttctaaagctgaccaacacatttgggcccttaataaaaattaaattcacctacaaattaaaattgttatatgtgctctcttttaatttatttcaatctatagacgtaacaccttgcctacactgccttgccccactctcacctaccatgaataatattacctcactagctatatatatgtagctatttaattctaataataattattataatatgcttatgagctcgatccataatccatctttatctttaattttctcatgctatgatattctctcactctcactcgtaattatgattaatcagagggaaaaaaaaaatcattgaatcatgactaactggtcttcgatcgacaacacaaagtcacaaagttagtccctagccaacaaccattatttatgcctggagagcatatatatatatttatatatttatatatgtaatgtatgacggcaattacattaatatatatgtgttactatgttaatattaattaagccagttgttaaaaatatttataatatgtggttaaaataatttgtcggcgaatcccttaaacgcgttttaccataaataaatctcaatttcatcttagttgagacttgtgtgttgtgatgtaacagctattaatttctaattcgcccttagcttgagaacatatagagtaatcatcattaaaaatatgacctttgcttcagacaactaactccctaacctaaatatatatatatttcagtgtaaaaagcttcatgtctcttccaatatttcctactcatcattttcccagccattatagtgacatattttataaatatcttaattaattatcttgcactaattatcttattaccatacaaatatattattattacctaattaattataataattcaaaaatgtcattatcagtttccaatgttttcaggacaacttttatgcatattcataatcaaaaattaatttttttatcatcatgttcatggttaagatgtccttcataaataaaataggtgttagacttcatacatattatatataattgtatggcactcatttcttatttttaaaatcatactaataaaatcgtaaccagagaataagagacaggtatatatataaatatatatatatatttatatatacagtagcacagtgatagaatctataatccaatttgatcaaagcatttttacaatttcgtttttctcaactagctagctgtaacaagttgggataaagttacactttgatgggggagcgctagaacttaaagaatatattatattgactcgaaaatatttttcattaattaggagagagacggcattttaataaattagttaatacattatttatttatttattttacacaaatcattacaaaaaattacttttttttagtgataattttatagtcgatgctaacatgaattttttgtgattaaatataacttttatagttacaataaaaatttatttatgattaaaacataatatttagatatatacaaattgtcactaatttaattatagttgcaacaaatatcgtgacaaaaaacacatttaattacaccaaatagtattttttgtggctaaaacttttagccacggatcttttagtcacaatataagaatgatttataattagtcacaatttttttacttttaattataaattttgttgtgactaaaagcaaaattttttataataattgataaaaatcaatctaatatgagccaaaatcaacaaaaactttcctaaaaaatttacacaataaaactataaacaacaacacaagcccgacaaactcattcacattgtacaaaaatccaaaaaactcttaccaacataaatagaatgagaaaataaataagtactctaattagtaataataatgaaattattggaaaattcgtagtacgtttttttttggaataattatacaaggtactattttttgtaaaagaactacatttttacgtttttttttttttttaatatttt

SEQ ID NO: 17460 - DNA, 2960 bp, Cannabis sativa
atcgaaattttgtacctttttgatcttggccggaattaatggagcaattccggcatgtaggtgaggttttgggaagtatgagagctttaatggtgttagaggatgacattcagatcaatcaaagtcagtgtcgtttacttcttgatatttacagtttagcttttaaaaccattggagaagagatcagacagaatctgaaacttgaagaaaagaataccaaatggaaagctcttgagcagccattgaaggagcttcaaagggtttttaaggaaggagaggtttacattagacagtgtatggattcaaaagattggtggggtaaagcaatgagctttcatcagaataaagattgtgttgaacttcatgttcataacctgtttgttcattttcctattgtgattgaagccattgaaaatgctggggaaatttctggtcttgatcatgatgagatgaagaagagaaggattgctcttgtgaagaagtatgataaggaatggtgtgatcctaagctttttcaatggagatttgggaaacagtatttggtacctaaagagatttgtaaaagattggattgtgcttggaaagaagataggtggagattgattgaagctcttaaggagaagagaagttcgatttcgatttcgttgacaaagaatgagattaagctttctgagttgcttatcaataaactgaatggttcagagaattttaaagggaaactcttcccaagttctgttttattgggtggaaaagattaccaagttcggaggcgattaggtgggggaaatcagttcaaggaaattcagtggttgggggaaacttttgcttcaaggcatttctttgctgatattcaaccattagtacctgaaataactaatcttttatcactttctcaccctaatatactccaatacctttgtggattttttgatgaggagaaaaaggagtgttttcttgttatggaattgatgagtaaggatttatcatcttacttaaaagagaattcttgttcaagaaggagagctttgttttcactcccatctgttgttgatttaatgcttcagattgctagaggaatggaatatcttcattcacagaagatttatcatggtgatttgaacccttttaatgtatttctcaaggtgaggaataattcaagtgaaggttatgttcaaacaaaggtatctggtttcggtttatcatctgtatccaacaatccaagtactcgaaactcctcgccacctcgtgatccagttgacaccttcatttggcaagcaccagaagttttagctaagcaagaacaggcaggtggggatgctgctgctgctgctgctgccgctaagtacaccgaaaaagctgatgtttatagtttcgggatgatttgttttcagttattgacagggaaagtaccttttgaagatggacatttacaaggagataagatgagtagaaacataagagcaggagagaggcctcttttcccacacccttcaccgaaataccttgttaacttaaccaaaaaatgctggcaaaccgagccatctcaccgtccaagcttctcatcgatttgcaggattctacgttacataaagaagtatcttatcatgaacccagatcaaactttgccagagctacaatctccatcagttgattgctgtgaattagagacgagttttgtgagaaaaatgtctactttagaagggggttgttcttcttctaacatgtcctcagtatcccaaatcccatttcaaatgtttacttatagacttttggaaaaggagaagactttcacaccaagcaaagacattacaatacccgaatcaacatacgacataggctcattctttagagactcagcttcagcctgcactattgattatctaccacctgtgttggaagatcctatttcaatgacagcaggaagtgatacaaggtcaatttgctcagaggctccattgaagagagcttcatctgtaaaacaatctcctgaagttatgaagagtacaagaagaagttcaggtcagtgaaaaaacaaaccccaactcatttttttttcttcatatcattattaaaacttttgctttatttgacttaaacatgttatgttttctcagggaaagtaaaatctcaaactcctaaaaaacaaccaccgttgactcgttcgagtcgcagtttgaagatgaatgaagatactcagttgaagttgttaatgaggcctttgagacaaggcagagttagaaaatctggtcatgtttcagattcagaaataattcattagcttttgtttacatacttggtcgttcattgttaaagtacagttttttttagccttcttttactgtaattttctttctttctttctttctttaaaaaagatttgcttttttgtaatccttgaagaaaaaaaaagtcccaggttttagttttttatggtagtgtgtggatgaagttgttcctccattataaagagtcatatacaaactgttctttgatcttcagatttctttataggaaagtcttttgcttttttagttatttaccaattcttgttgagaaaagaaagaagaaaaaaaaaatcagttaaaagatttatgcataatcaattttgtatataaagaaactgtattaaatgttctatccaaattattaatctaactcagaaaatttactcaagctgagataacatttctgatttatttccaactatatattgagaataaataaacttggttaaaataactataaggtgatatgagaacaatggcaaatggggttccaaactagcaaccataatatcttcaatttcaagcacttgatttcccaatactgttaaatagttgctcaaaagttgtgaatgtgccaaacttgatttttacactgattaatttctcttaaaattacttctaaatacactcaaattggcagaagaaacactcaaatgcttcactgattttagacaa

SEQ ID NO: 17461 - DNA, 4876 bp, Cannabis sativa
  modified_base (4015)..(4017): a, c, t, g, unknown or other
aaatagtaaaaataggacattgagcttaattttcgacaatttttttttagtataatcaacttgaagacaattcctaacaagaacagatactataaatataaatagtttgttataatattttgagatcagattattattaaattttattttgacaaaaatcagttcaggatcctatttgtaccattttaaaaaatactagatacattttgtcatttaacaaaacaaatgataattaataacttttacaaaacacaaaatttaaaataatacttaacctaatgacaccgttattaaaatattttattaaactaaccaaaaaaaaaatcgttaaatagtttcattttatatattaaagcataaaacttctttatattaaagagttcgaaactattatattagacgtttgactacaacataacaacattatactgtatatagttcattagattcaataaagctaactattccattttcaatagttttctttcaacgtatactgacaaaagcgctcaaaatgtaaataatcattagttagggtaatatataatattaatcttttaaaaaatttacttttaattcaaaatggaattagaaagtcccttgcccttttttttctttttgtttgaataggctttcattggctttttgtggacccacatattcaaatttttataattaatcaaactatgtctcaaacaacctgccaagagccaacccatcttaataaaattgctaatagtaatttattctttccgtacacttccaatggctatggatctaaatggattaaaatatcatgatcaaagtttaacgaacaaaaagcagccataactgactattttgtttggaggtggaaactggaatttttaattttcttttacaaagccacaacttaataatgacagataatcaagaatgaaataatattttaaaaactatgtaagttgagaaaattgccttcattaactcattctcagctcattgaagattctgatgtacttacaaacttttcttttctaatggaaaaaataaatgattacaattaatctagcatcaatattatcacagaccccaaatttgcagaaccaaatgcaggtgcaaaatgtaatgcagcatatcaaatcaaataatagaatgaaaaatcaaatcctggtgaatcaaaatgtactccaaagagtcacaaatcagagtatcaagcatctacaaccttgtgaatcttggggtccttcaaaccatcgatcccataaaacgtttataggcccatttgttctgtgaaatcaaaacaggtttattaatagcaacacaaacttggaaagagagaagatgagttttgaaccttacgttggagttaaaggatctgatatggtttctatatgagacagcaacctgaggaacaataacaaaacaaagcatgttaagtcaaaacaaggtgaaaatagactttaaagggatgttcttggtcaacaagagttgatcaatccccgttctgccttttcaaatctaaatgcagataacaaaacaatggcttgactatttgtctttaagcttagtagcatgagaagccatagctcgtacttactctgcgcaaatcattgaggcattttcagttctctccagctcttccaactcttcctgaacatcagaagaatcaggatcaaaagaccgaactaaagaaacagacttgtaatggagtatggaaaaatatgtttttatgcaccatgtaaacaataaaccatggggaaaaggaagatatgaacaaggctgttattaatttgccgatccaactcgcttacacaaaaacctaacatagttacgatttcactaaagttgtagctttttaaaaaggttagaagatctcaaagctttttgagttaaagtgtacattgcagattgttagagagtgtcgtattgataatgtatggaaagttaataccatttataagatcatgggctacttcactcgttaccaattatttttagtatagaaccacatacttcttagtccttattctactttctaaactaacaagagccaaaagagatataatattatggctactccaaaccccatactcctaattatatacctcgctctattgtactttctaaacctcgattccacattcttacacagataaataagggctgcaattttatgagacttgaactctgcactccaaagcaatttttttacaccttaagttggggtaagctaattgggagctaaataaaatctgtattcttacacaaaatgcaataaaaacttgaatgcagtgacttgtttgaaacctcaatttagccaccatttagactcgtattagcttttctcccaagctatccaactgcaatgagatattcagctccagctctcacacaaattgtccttagaagtttaactctctagttgagccatttaaaaggataaactaactaattcttaacaacatattgtagtgaaattgttaaaatgcagctttaaacaaatctaataaattcttagcaagataaaattaagtaccattctgtgtttggtatgtcaaacctcaaaccttgggttactttagaaaaagaaatgtatagcacaatttaggcaatactcccattttctgtcattctcaaaatacacaaacaagtagcttttttgtgcaggaacaaaaaaaaatatgaacaactcttctatcaatttttatatattttttaccaaaaaaacaaacaaatggaaagtctcaaaaggaggaaaaaatgggattcttttcttttttccaagaacccaactttccagggaaccaaacaaaagaaaatggagtgaaaagaaaaaggaaaaaacctctaagcatttgagctcttgttcaagacacctaagctcagcaagaatcctgtgttttcctctattatcattgggtcctccaccacctcctactcctcctcctccttcaagtcgttgttcttccgaagaagacgccgtttcggactccatcaaactccgggaactgcaaatggagctccaccacgaagaccaataactctcatttcatctcaactccacccatgtttctgggtttcatcaaaatttcacccttttcaatcttaagcctacagatctggtacactacacgcgctctttctctctttctctctgtctggctgagtttttcgagatattatataaaaattccctcaaaactttgattttcttttttattattgttcggggaaaaagagaagaaaatactcagaagaaaagggcagacttttcttttcttttctttccttccttaactttccatgcttggttggtttggtttcttagttttgtttattcatagaataaaaactgctttttcttctttccttcatcccgtgataacgaatcaacgacagcaatatttgttactaagaaaaccctataattacacaccaaactactctattattatttatttatttattaacaactttgttacttattttatattattcaacaagatgatatacttgagttttcaaaaaaaaaaaaattattaatataattaactagccgaattagttattatattttaaaatactatgtgagtagtcatcatagctgaaattagtgttataagttgcctgtggacttgtatttatctatactttttaaaaaatggatcgtgtcatgccgtgctataaaaaaatataggatgtgccgtattgtgtcaacatttttataagataggcccaacacggctagtaagcccaacatttttgtgccatgctcgaattcgtgtcgtgttttgctcgtactgacttgtgtttcttaaacaggccaacctatttttgtatctgtacttaaatttgtgttttactttttcatatttttttttacaattactatatatcaaaactttagctatatttatataacttttgaataatattttactcataatcaaataaaaaattattaacactattaaaatttaaatatttacttataaatactcaaatttttatatcacaccctataaataaattnnnatataatcttaattttttatattttcataattttaattataaaattataatattcagtattatatttaagttttattattattttaacttatttataatcgataaattcatattttattattaataataaattataaaaaaaaattaatatgtcgtgtcatactttttgagcttgtcgtatatcatgcttaaggacatatttttcgtgtcgtgtcgtgtccaagcctgtattttttcgtgcctagttgtgctcgtgcctttcgggctcgtgctaatttcgtgttgtgtcaaaaagcccgacctatatttacagcactagttagaataaatgtgaacttgcaatatgagcactagtgttgttactagggggaaaatcttaaatccaatctaactgacccgaaccaatccgttatctcaaagtttgtccacctgacgtagcatgtccacacaaggtaagacagagtacatgtcgattacatccttgcccatagcaggacaaagtctccttacaaggcatggtagaatcatcaagcaacaagcaagaggagttaagcaagccgccaagaagttgcacaacaatgtctagccaaccaaaaggagtatataggccggctaggatgagcttatatggccggcaagggtttgagcacaagctggctagccaaaggtgacttttcgaccaaggagggggccgttcgactaagaaaacctgacctctacaaggaaaagttgtacaaaggttggccaacacatgcaaaggctggccaacacttgccaaagctggcaggaacatgacctgccaggccctagcaagaacatgaccagctagaccctggtaggagcatagccgaccagaccc

SEQ ID NO: 17462 - DNA, 4900 bp, Cannabis sativa
attagtatcatatcatcatcatgggtagtttagatttagtttctgtattactatgattgtgtctttgatcaaagatgaaaacttttttaaatggacttgggaatggtgatggtcggtgagaactgaagaagtgaaaataaaataaagattataaatgatatcacgggctgcactgtcttctaaaaacgctgtcgtttaaggcaagaaaagcaaaataaaaaagctatgcctgtctatgtcccactaatgtatattttgccaccgagtccatgtgactaaaaaatatacctaaaccgtggtgttttccccaaaagagtccagctttgccccagctgtgtgctgagattaggtttggtttttttctcccaccaccaaaaaccttagatgcccatcaaagcaatttgtataatattaattattatattcgccaccatcccttttcacattctcctctcaatcatattaaaatttaaacaaattagctggcatgatttggtctgtcttcttcttctagcatattttattagctgaccttgattttttgtatgtgggttatttaaggcaatctttttgagtaaagccaaaataaaaacactgcaaaaatcattggccttaatatatttaatatatatatatatttgttttatgttttaatctttctcttttgggttgacttgttctaactctctgctattttttaccttattgcaggaaagttgatggaagtggcctgcaatgtgcttggtgtttttggtgtatcatcttcatgtcaataaagaaaaaagtttctcttcatttttaaatactcaaaacagggaaaaacaaaaatgtctttgtataaacaattcataaatggtaaaagattaaaaaaaaaaaattgcccttttctttgtttgtgtaattttgattcaaatacttgatcttcccctttttagctgtgaacaagagctttgctgtgtgtgtatatatatatatatgtatatatatgcagtgtagagtggccctgcctactactactaccactaccaccatggaagaagattatataaagagaaaagaagagagcttttgctttgaagaattttttttcttcactttatagtccttacagaaaaagagtaaaaaaacaagtgttactgttgtttttgtcataagaaaatactgtaattacttccatatcattttttttaaaataattattttatgtttgccatctctattgtatatcataataaacaacttctctgaaatatcatattataaattcacaatcataggctgtgttctttgtcctccatttttgattgagaatcaaattagattattattattattattatttctatatacacttataatatttgtgtttggttgtttgtctttgtggcttcattgaaatatggagttgttgtggtgtgaataagaataaaagtggtagttagaacttagatgagttatttatttgtaataagttgatgatggtggtctttcatggggtggtgttattctttgtcattgttataaataagattaagaaagttgaacttaattaaaaccaattatcaatactcttttctctcccattaaattcccacgttacttgatgaataatgttcaataatatttaattggagattcttagcataattacttttgtagtgttacttaaaattatttcccaatttttcattatatcatgttgtatattgtaactaaacattttattttaaataatttatgacgtgaaaaataagtttaaaataattattacacataattttaaagaaaatatgcacggactgttttaaatttttaaaatttacagaaataattctttggaaaataactatgttattagaaatttgagatgccaaaaagaaaaaacacccctatcatacaaataaataatgtccctacctaataattttccaaatttatatattgcaaagctgcccttgaaaaagttctaagtgtgatggttctaatgtatgtctctatatatgcttccacctataaaactttgttttttgcattttcttttggggtcaccgacagtttatatatatatatgtatatatatatgcatgtatgtatgtatgtatggatcttcatttatgattaaaatctcaatgagagtagttgtagaagaaaagagagtagcaaccagcaacactgatagtaacacaatagccatatatatatatatatatatatatatatatatagaaccacacacgtagggtccagtaatggggtcaattgcaccactagactagtagacttattggaaacaaaaataaataatatttagtatatattcttaaacctaaattagtatatcttttaagtatttaacagaaacaaatatataagtataaaaaagaattgtattatttaaatttgggttttttttttaagccaaaagattaaattttattaaatcaaatcagttactaagatagctttcaaactagcagagacagaaccccagcgagaaacacagccaggaatagaaccagaagaacgagctaaaaagttagtcgcctgattcccagaccgtttaacaaattaattaattgaaataagaaataaaagagaggattgcataagagcaacacaatccaaaattaaaagccccaccggagacaacaactgcttcttctgttgcacggcttgcaccggcagcagcgagtccgactccacaaccacaccagcaggcacacccccctcaacccaccttcccttcacccaactgaacgcctccttcaacgctatagcttcagccaaaaacgggtcgggttgaccataagttttaatcgccagcacatatccaagaataaccattatgatcccgagcaatccaccacattagtgtttgtaagttacagttctaaatttaaatactcaccttattattattaaaaaaaaagaacctggcatattctttctccttttcaaaaatattaaacctataaattaatgacttattttcttatgattacaattacataagagaaatacatcataaatattttaataatcttatttggcttatatattgtagtattttgttttgtttttaaaagacagttaatttgtattttaatatatttattttattattattttaaaaaaatacaattttgaagcatacaaaaattattaatatgttcctctatggctctatatttgtaaaatgagacacacacaataataatatgaactcgattttggtcaaacttttatagaaagaaaaattgatccaaattgagtttgagtataataatattatattttacaaacacgcagagtctgaattatcatttaacaaaatagaaaaataaattaataagttttacgaaaatacaaaattcaaaataatatttaaccgtataatttagttcacgataattattattattaattgtggctataattatcctacaattatttcgtgtatcatgtgtgtattgtgttatggtgtcatcgatcaagccctaccataccatgtcgctctcctatataactacacttatttaagggctcatagctttcttcctcctactacttgtactaggacttaaagccttggcaacaaagagaagagactccatcacatttttgacttgttaattaaatactcactttatttatttatttctttcttatgaaatttccaaatccttaattaacaatttaagggtcagataatatgagtttacatacttccaaaccatgataatgatagaagaacaaacaattcctcctcttctatatttcttttggagactttttctttataatatatattatatagatatatttatatgtatattacttttatattttaatataaagggaggggttggtaaactttcaatgcatgctgcaaataaacaaataaaatatagttaaggagtaatacaatacaatgcatacaccatgttactatcatatacattacttgaaaatcaaataagatttactagctaaataacaactcatatcgtataattagatattagaattatgatataagaggtgacattttctagcatgtataaatcttttacatatatatatatatatatatatttttaaaaaatatatatatattatgattttgagatttctaaaattatgattgagagattgagattcaatcaaccctgccattgatttggtagacaaaaatacatatacaggtagaggacaactttttccctacattacccattttaatatttgagagttggctttaaaatcagaaccgaaaatataattcgttttccttacaaacactacaagaataattgggatcactaatggcactattactacaagaatattgaacaataaaaattattttgaacacttagaaagagaaaaaaatattaaattattagtgttttatagaaaaaaaaataattattattgtacaaaaaaaatgtcacattctattccaatatcaaccaaacacggtaatgttgatttcttaggtttatcattcccttcatcactctccaagcaatgttaaatctattcccatgaaatgaaacctacataccaaacatcggcccctaagggtttgtaggttgaaaaagtctactgatgggtaaaatacatttaaatattgactttgggccgatttggggagatccactgttggggaaatctgttgtccgtacacggaggtacgattgatggtgacagctaggaatgcacacagggcggggaactggcgaggagtgctccccccgtccccatccccgttaaggattttaattctcatccccgcttattccccatcagggatggggcggggacaaggcgataaatttcctaatagaaaaataaagtttataatgaaatttttaatatacaaaaatattaaactaca

SEQ ID NO: 17463 - DNA, 4490 bp, Cannabis sativa
tagatctactaaaacattgtgggacacctaaatatttcctaacaaaaggtttatcttcaaggcccaaattagtgtaaaagaactcaaaatcagcaggactggtattgggagaaaatagaacagaggatttagaaaaattgactagttgactagtggctttatgataaagatcaagagcatgtttaattgctaagcaagaacggtcagaggttgtagagaagagtaaactatcatcagcaaaaagaagatgagagatatgaggggtcgaacgacacatagaaatgccttggaaattatggatcgattcctgatatctaatgccagtagacaaaccatcagagactagcaaaaaaatataaggagagagaggatctcgttgccttatacccttgctagacttgaagcaatcagacaagacaccattaacaagcagcctaaatgaagcagtagaaatacatctaacaataagtgaaataaatttatcagggaaattaaaacaatgcataatagcttcaacaaaactctattccacacgatcaagccttttccatatccaacttaattgcagcccacccaaatttaccaaatttcctatgattgatggcattaacaagctcattagcaatgataatattataaaaaatgatgctattttaataaaacactttgactcgaagaaataatatcattcagaacaatcttcaatctattggctaaaaccttagagacaactttatacaaagtagagcaaagacttatgggcctaaagtccctaactttattagcattctttttttttcggaataacaacaatgacaatttcattaattaaagaaaaatcaacattattattcaggatagcaagaacagcagcacacaaatcagcacccaaaacagaccagtttctttgataaaataaagcattcataccatcaatacctggggatttatgccaggacagttgataaagagcagctttaacttcatcagcagtgaaaggctcctcaagcatctgaaagcatgaaacattcacacgagtactaacacaactaagaattttctcaatagcctcaatgctagtaccctgggacctaaaaagattactataaaaattgaggaactgagaattaatatcagcaatattaacagcagaggtaccattatctaagataatactatggataaagttcttttgggttctagaggaagtcttggaatgaaagtatttagtgctcttgtccctggctcttaaccaattcactcgtgaacgttgtttccaaaacacctcctctttataaaggagggaatcaatttgagattgtatatgcttagctttctggttatctaaggccgaaagggaagaattggaaaaaatttatctaagctagattgaaagcgattattctttcttaaagttattcttattaacactccaatttttaatagtagtgatacaagcagactggttggagaggaaagaatgaaggggaccagaggggacatgggatgaaagatcaatccaaccagaccgaacagtatccccaaaattaggctcagaaaaccaaaagttttcacacatgaacctgttatttctaactgtcctaaagcaaggatccttaaacatcacttttaaagccctatggtccaaaccgtaaaaacctaagtgatgaagggtcgcagtaggaaaaagatttaaccacttttgattaataatgcaccaatcaaggcgctcaaaaaacacaccatgcttccaagtatatttattgtcaatataaggtaaaggagtgagattataagtgttaataaaattctgaaaatcattcataacatactggggaggattattagaattggatctatcattaagagagagataatcattaaaatcgccaaaaataagccaaggcagcaaaggagcaacatcataaagcctattcaacagagtccaagtatgcatttttttcataaatataaggagagccataataacataaaatatgtcagtttatattatcattcatagtaacataacagtttatatgattagaggagtagttatttataattaaattaacagcagcagaccaaaaaaacaataaacccccctaaaccaattctaggaacctcaaaagcattctcaaaagtaagtctagacttaaggaaagaactagaaccatcacctagtttagtctccataacaaaaagaaaataaggcttatgcggcttaaacaaaagggagagatttcgaaatgcccgagggctccctaaacctcgagcattccagcatataaaacttatttttctaggcggggttgctcagcaacacccgccggtacaacttcgtcttcatcatcattgggaaccactgcttcattatcattagctcgagcccggtacagaatactcctaaccgaattaccactgatcacctcttgacgagtataagatctctttgtccctaaactaccaccaatagtaagaggcctaggtggaaaaatagggacaaagacagtagggatagagacagcagcgagttaaatccctttccccttatccgtatgaataatttgcagaagccttaaacatcataacttgagaaaccgcatagagaaggctttgaaagcttctgaccagggacgaagagacaacagaagtctctgtagaggattgaaggggtaatgtggaagcttggacatctatcctaggatgaatgtccatgcttccttgggctccaagaaaactcccagaaggaagaaactgattgactgcatcatgaaggtcctgattcaggtgatgggaccttagattcatctctttaaatggaatggaattgtacatgtcaaacagatccccttttaagaaagttttaggcaaagctcttatattatccttaaagggtaaggtaggaggcatgcgaccttcatcacagaactttagagaaaacacccacacttttagaaaaaatatgatcaaatctcccacaaaagtaacaatagttttgcaaaccctcatatttaaaattgagccatttagttgtccctagcttcctaaaaagacttgcctgcctctacgaataagtttcataatatctagaaggacacgaatacgaagaaagggccctgaaatttccaaaagggtggttttatgaatctcaatcagatcaccaatatcattggcaacaaactgggctaggtgagatgacctaaaaccaaagggaatagaatggacaacacaagagaaaataaccaaaggaagaatatgatattgcattaaagacgttagttatatatatatagacataagtagtatacctctgaagagagatcctctgcagatagtggagagatgccaaatctatctccacataaatgttttcctagcgtgacccctcgagaaaagggatagaattaaaatacatttcaccaaatttttcttaatacatttcaagagagtgcatattggtgtctaacatatttaattaagtgtcatacatacttattcacaaagttattaccaacatcaatatttgagaagacgacatacaagatcgaaatttatcgattagaaaatatccacgaatgcctaaatgagggagatttatttttcactgcactcttttttccttgactaagtatttgacccaccaagttttctgacaagggttttgagcacctataatggacatccaatagagagtgttataaaattatatatggatgaccataattatggaaaatcaattagttacccaaagatgattatcatcataaatacttaactgtattttcctttattacattgatttagtttttcattcttttatctatatttttgtataaatagcggttcaccctattagaataaattagtgagaaaaatatcattcattctctcactgtcttcttctctttgtcttctctcttcacttattttctctattctatattattttataacaaatgtaaaacttaatgataaaatttttattattctataattttaataaaaatattaattaaacattatattttgcatcaagttttgtaatagtgtatttgatcacaatactaaaaattgatataaatatattatagatttatttttttgtaccaagtataacataatttttatatatttcattagagatggtgttattatattgatgcttgacattctttttatcatggattttttttttctagtgagctgtaagagattatatataaaaaaatttaaattattattattattgagagaaaatcattactttaattatatccattattgaatatgtatacatgaataaaagtaaataaataataaactagatagagataaaattcatttaaaatataaaataaaaatgatagagattaaattaatgagtatatatttagatggaaagtttttatggaaagggattatgtcaaaatatatatagttatgattaatcacgatgatgttttgaaataaattttagtgttactcat

SEQ ID NO: 17464 - DNA, 6672 bp, Cannabis sativa
agagactttgcagcatacattccattaagagcaggatcaaccattttggctaaggcatcgatatcatggagttggggagtagcccatctcacaagtgattgttcggatctaactcttgaactaaacattcgttaaaacaaaaatcaataagtagaagaacacattaacaaacataaactgacaacttggtaatctataagctggtttacctgtctagtggctttcggcctgtcaacaattccaacatcaccaccccaaaactgtaaacatcactttttacagtatagactcctgacaacgcgaattcaggagcactgtatccaaattgaccaaccatctgtgttgaaacctgtcaaaacatttgaagaagatgttgctctcttcttagtaatgccagcatacaagaaaaaaagaatagcataaacttgttaatctagcaacaaccataattattcacaatgtactaacttgtcgttctggatttggtgtcaaggcagctactccacaatctgataagtgaggattaagctcttcgtcgagtaaaatgtttgctgacttgaagtttctatgtacaacagaaggcaagcaaacttcatgcaagtacctgaaaaatgtaatatccattacagcaccaacttagcacccttaatcaacacacttagtacacacataaagggagagacatcaattcataaacacatttgacatactctagagcgcgagcagtgccaagtgctaccctaacgcgagcattccaagtgagaatcttacttccatcttcagaaaaatggagcatgtcatgcaagcttccatttccaacatactcataaactagaagacgttgtccatgctctgcacaatatccagccagtgtcacaatgtttgggtgtctcaaacgggacatattagaaatagcttctaaaaagttatcttcctcctgtaacgatagtgctgcattatcgattttcttaacagccattatctgcagacacaaaataaataaattgaattgactagatacagaaaagaaaaggcaaaaaaaaacaaaattgaaagcaagtacctttccattagggaaatcagctctgtaaacacgaccaagggaaccttcaccaattagaaattcttgactaaagctattagttgctgtctgaagagaagcaactgtgtacgaagtagcagtgataggtgactttgctctctttgcagtgccgtttttcccgtgcagcctatcaaccattaccttttccgctggagggggtttgagatctgttacagcagccatgggttttaccctctgttcttgcatatcagtatttactgcaatcaaagcgtcacgcgacataaaaattaatcaacatgtaacatcaatttccctatgtaaaataaatattttacagattaaggcacgaaaagagaatcatataacttaccaaaaatgtagccagtaaccacttaaactgcaatatttattttcagaaatgtacttaatcttaaatttagaggaagttaatagtctaaatagccaactatatacataccgatatgtaatgcaaatgtaagagaacaaaggaattgcagattaagaaaattataccactatttgtgcgaacagaaagacttgcccctgacgttcttgcaccagtatctttccgtttatgctttcggatacaaacaacaagaataagtaatgcaatgagggcaagagacacagagcctagaattatcccaactaaagccccaattgccagccctccatttgaatgagatacttcaccttcaccattggaatctgatttgtgtgtgccagatccagtatgattacggttaccatgggattttcctgggggaggtggagtaaatggtggcggcggaggagcaggaccattgtcaaatgtattcccgtcgtatctgttttattttgaaacaagtacagtgtaggagttcaactttaagaacagactggcaagaaattgaaaattgtaaaatgcttacataaaactcgggattgaaagaagttctccgggaatccatccagtgaagtggttcttcgccacatttctgttgaagagacagtatacaatgataacaagatggaaaatatcaaacaatacaattcatctcaagtttgtgaagagaaactcacagtgtagttaaaggcaaactcgttagaacattgagagaaccagtcaattgattgttttgcacatagctgtcattaatattagagataataagaatctaagcaaagttaatctcataccaattatttctataaaacaatgtaaaaacacttacagagaagaaagattggataatgaacccattgcattagggagatcacttgaaaaattgttgaaagagagatccctatatgagatgaatggtgataaattaagtgagaatgtagtacacaacattaattttacaactaaaatgatactcttaagtcaatgaaatttcaaatgatgataatcatgtgatcagataagatatcttacaaggttgcaagagcagaaccattagagaaaacgtctccaattgactgagagagtgagttatggctaacattcctgagaccaacaattcagacattaacaaagacagctacaatacaacatgttgcagcagattttcaccaaaaggaaaaacttatacaagaaagacaaatctcttacaagtaatttagagaaggcatgattgaaatggagtaaggaagattcccactaagattgttttttgcgagattcctgtagagaacacaatcaacaacagttgagtctttaaccatgaaagtgacagctccaaggaaaaaaccaaaaaaataaaaagaaaaaaacacagaaagcaaattgaaagacattgaaaattacaggctcgtaagattcggcggtaattgatatgggactgaatcgtgaatttggttgtcactcacatcactagcaaacagaaaatcaaaatcaaaaacctcaaaatcagtaagtatatatagtctttagcctgaatttttaaaaactacagtaatagaaatgtatcagctttctcacaaatttttcaaagacacaagattagcaagcatgtatcccatcgtaccatcgagtcccaatccagaaatgtctctgttacagttataagcaagaatcaattaacaaatcccatttctaattaaaacccaaaatgcaattcaaaaagctgcaatttttatacacatgattactttcgtacatggaaacaacagctgaaccctcacaagttatccctttccaggactctccgcatggatcaccgcctccacttgtccaaccagtgagctgagaagggctatttaatgaggtatacataacctgaagagcttgaactgcaacatatacaagcacaatacttatagagctgaaaattttagcaaaaatgaagaaactagtactatctgggttttttttctttcttttttccaatgttgttcttttttcccctaatcatttatatgcaagaccaccccagaaaaatgacagcttttagaataaatttcccaactttctcctctgaaatccctgcattttttttttctggccaatgaacagcataaaggtttttagctttaagaatgtaaacacatcaatataacaagaaccccacaaaagtcaagaccccatttttatcttccattctaagctcgaccctgttcccaaattctcatttcgacccaatcagaaccaaacccatctataaaaaagaaaaaaaaaaaaaagacccgatcactccaaagaaaatgaaatgttatattttaataccatcggaagaatcagtgatgctcttaacaagaggcgaaatatcaaagatcgcagctacaagcactaactgaaagaacgaacgagcaaagtggctgtcggtggccattgttgtaatgcgaagctcgaaaaggagtgaggtttcaactgagtgaaggagcatgcaagactaccatggacgcgcgcacaggggatgaagaagaagaagaagaagaagaagagaatgcaaatgagtcacagaagtagtagcagttgaggttgagatcgcgaccactggaaagaggaattgccattaaagaaaaggacggagagagagagatattcgaagcttggtgcaatggagagagagaaacaaagtgtgttttgtatgcgtgtgtcggcgaaaaaggaaaaatttaaggaaactaaagaaaaatcaaaattcaaaaatacaaattaatgtaaaatggaatggaggagtggtttggttcgaggtaggcgagagagaaagagacagtaacgtatgccgttttttcatgaaaatctctctctctctctctcttttccctgaaacttattactttgaccttcttataaattgtatttagaaagaaaattaccataaaaataacttagaaactaaatctacacctgagaaagttaaataaaggagagacaaacataattgaaattttgcaattttgcaattttttattcattatttttgtgtgtatgcattgcaatgcatgcaaaaagagcaaaaagtgtcattttaggttcgttatgagtatttatgacatgtgggctggcacactaattaactttggcatctaaagcttcagcattataatttttatattaattttttctcttgggttagtatcctattcctatataaattcaatgaatgaaattgtgaaattatattgtttaaatcaaaaactattcgattcacacacaatgtcagttcaaggcatgagattaatgaaaaaatgatgggtttaaataacaaattatttatatttaagaactccttcaatgatgttaaatatcccatgagttatttccttaaaaatacttaattaatcttaaatagaatttttttaaaactatatttgtactaaaaggcaggctgcaaatttgaaaaacgagaaatttatttaactattagatacgtaatttagaaaagtagctttgattattaacatataataatagaaacaaataatgcattaaggattactttttgtaaaaatgtacaaagcttgagttttctacaatttttttaaacaaataatgccagtattggaaaatggaaatggcgttagttgaacttgaaatgtccaagttacccttagaactattattacgataataccctttaagaatctcatgaaaaatatggtattgtaaatgacaaaattgctcagttgttgaaagtactatttggggtcttgccttttttgactccacaaatgtctcaataccttttcacttttttgctcttaatgatttgaaatatttgggtaatggtttacaggatctcactctattttcgttttaatgcaaatcctagtcagcaattcttacaaaattattttacttattatttcatgagttttctatctttttaatccatattttgtttacgtattttctaattcatttcacaaatttgacccaaaatctataaaggcaaagcagaggccagcgtggtacactggtgtggtagtgacattatggattttgtaacattggcgaaattattctcaataaaaaagctatacggtctatgattataaacttttttgtaaagtggttttcattatctatgtttattgtttaggtaaatttcacatcaaattctgtaaatgttgcacataccagccaaccaatattagatgtattattcagtcacattaacatgactcataattgtttctcttcattaactataaaattataaaatattgttattaggtattaattttcataatgtgttgtgttaatgatttttataattatattattaaattaaaatatatacgatctaatataaaattatagtattaaagatataataatcaaagtggtgttcaatacttataaaatttagtttatagtttaccaattctcaaaattatataagttatacatggatgtaattagggttgtttacctaattcaattcatactattttatttatagtgtatttgatttgcactaagtgtaaattttataatttgatctgcacaatagttcaaatctaatccaatccataaaagtacgaattagatcgattatttcagataagttaatttttaatattaaattatttgatatttattaaaatatatatttaagttgaaaaataaataaattatatataaaaataaaatatatacttcatctattaagttttgaaatatatttgtatctgtaatagatttttaaattattatttttatattaaaatattaattgttatataattttttaaaaatttatttatataaatatgtgtggattaaatttagtgtgttatttttagaggtgaattaatattcaatctaatctatacttacaagtgcagacatctgctgtaggaattatattatattagattatacttgaattatgaacaccctaaatacaacccaacaagaagtaaatttaacaaacttcggaaaccggaattaaaagtgttgatcaatttgagaacagaaaatgatggtatttttacattattttattggtgaaactaaaacaaagagaagaaataagttattatattaatacatacatttattttccatacttggctgtcttgtccatgaaaatcaaaaggtatatgtaaaaaaatttcacaagtgagtatgtaattaaagatttcaactaccaagg

SEQ ID NO: 17465 - DNA, 2880 bp, Cannabis sativa
attccttttcttagattttatttatttgtttgtggaccagctcatttatgtttattaagggcaaaaagaaattgaactcttcgaacaaaaattaatggaaaaaatatatatattaataaatataaaaacactataaatacccacttgatgatgcttataatagcacaaccaaatccaaaaagaaaaaagaagcataagaactgttttcagctatattattgaattgaaaatcccttaattgttgaattatggaggttagtattatctcgagtgagattgtgaaaccatcctcccttcagtttaacgatttaaagccctacaaactgtgcctctttgatcaaatcactcccatgacatacgcctcaatcatggttttcttccgcaactgtatcgatccaaattcccatgctaatattcaccaaaccttattatcccaactaaaaacctccctatctgaaaccctcaccttctattacccattttcaggaaggacaaagaacaacttctacgtcgatgatttcgacgcaggagtcacttatgttgaggccaaggtcaactgtagcttgatcgagtttttcaagctcaaacagaacgagttgctgaacaagttcgttccattccttccttggcgtgatgaaactgaatcccaacaagaggagttgcctcaaatgggctttcaagtcaatattttcacatgtggtggaatagctttgtctacttcgttgggccataaaatagccgatggaggaacattagcccttttcctcatgtcatgggcagcctctttccgaggcctccctcaaaataaaatcctacgtcccaatctttctgatgcatcaatagccttcccaccaagagatttgcctcccagctacaaaaatctaaaggataagttgtggtttggggcgaaaggaaactttgtaacgaagcgattcgtgttcgatgccaaagctctcacaaagcttagggaaatcgctagcagccaacgtgtccctcagccatcacgtaatgaggttctcacatgttttgtgtggaagcatgcatcgatggcagctgcagtagttaataataataacaataataacggatttcctaataaggattctgttatggcccatgcagtgaacatgaggcctcgaatgaaatctaatgcgttgagcacctccgttggaaacctcttttggtgggccaaaacaacacccaaagatattcgctcattagagttgtctgaaatggtggaaatggtaagggaatctctagtgaatttcagcaatgagtatttggagagcatagaagttgacgtgggttctgctgtatcagagttttatgattcaattgaacacattattaacccgatatctaacaaggatgatgataatgcaactgagatttatgcattcacaaacttgaaaggcttcttcaatgaggtagattttggatggggaaagccgatatgggtcggggcccatggaaatgtaggacccgagtttaggaacatgattgcgtttgtagacggacaaggtgggaaaggaattgaggcatttgtaacccttgaagagaagcatatggctgttctggaaaaagatccccagtttcttctctttgttaatcccaatcctgaaggccttccggtcaccttgatttgaaccagtcacaacgtacgtacgtagtagctttaaagtataaatataagattataaataagtgcatatgcgacacaatattatgtgtgtaatgtaatactaaatagtgaacgtaaggaaattattatgagtatatgtttagtgtgagtgtcatattgttgttgagtttttgtcgtacttaaaatattctgattcatgttcgtcatttatggccgcacatgaattcataattgttatgagtttttatcgtacttaaaatattctgattcatgttcttcattcatggccgcacatgaattcataattggtgatatcaagctagtttgaatggatatttttctatctttcttctctgtaatgtattaaacttttttattattttcaatgaaagtttattgtttaaaaaaaaaaaaactctgttctgccgtgattatatagagaaatgttaaaatcgatgcataattaaagtgtcaaatttgacaagaaggtatcatattgttatttatctatttagtatcaattttttttattattattttggtggtattggacattttaatttaggataattatgattttttttcgctccggaatttttttagttgttaatttttttttttgaattattaaaattattgaatttaaagaatttcatctaattttatttaattttattaatttaatgatggttcatttactaaattatactcccccatattttaatctctactaaattatctctcaaactcatgtactaaattatccgtgtgacacttctcttattaaaattggataaaagtgtttatattaacaatctcaattaataattttttttaataaattaatagccttaaaaatttaagaaacataatttaatatatatcatgatgaaagaatcctaattcatttaaattatatttgctagtattattaagagcattgctattaggcactatagtagtgtttagtattttctagacatgtgttgcgattggctagcgatactctttaattattatattaaactatatgagactcaatttttaattaaaccaatagcgatattaaaatataaaaagatactatatactaccggttcttttagcatttctctattattaattgattactacaaatacatatatttttggcatttattagtggggtaaataccagtttggaccctgtgttttgcaaaagttatagattggaccctgtattttattaaatgacaaaa

SEQ ID NO: 17466 - DNA, 10863 bp, Cannabis sativa
atatttttagtttgattggttaaataatgccatatttagtgatatttactatttatgccatatttatcataaccttaattattgtcgataattgttgctcattatatagtatttttaataattcatgcattgaaaaaacgacacagttgtaagtgccgttacgatttgaattgatatgaaattagtttcgcaactcttctagtaattttgtttaattttcatcctttcatgcataatatcacataaaaaacgaagctgagttttgagcataaggcgattttgtctacttgtgtataaataactttttatcacacacgtgtggtcagtggtagtaaatgtggctaggaaaacaattgaatggtaagaacacgtgtggtcagtgaaggagtgaaaaaataaaggttctaaggcaaagtcttactatatatcagagcagagccaggtttcgatcctgggacctgtgggttatgggcccaccacgcttccgctgcgccactctgattagtgtatactaatgttttagtcatgtatatagactaaataattacgtaattattctgtaaaggacaactttcactctatgattgaaatcttttgatggaaaatttttttaaaaaaaaaacatatatatttttttttctttcaaattgatggtttcagctaactcatctaaagattgacaaggaaagctgacccaatatagtttataaattaaagcaagcaccccttccatcctttgatgggtcgatcgaagcaaataatattaatagcattataggagtttataacaaaattcatacgtacaacgaacccatttaagaaaaaaagaaaataaacaccattcatattaagaaaggggacgatataactttttatataattatttgtagtagtagctagcttaagcattttggcctcttttccttgtccaatacgaaaacgcgtcatcttcgaactgtccccaaaaaaatcacttttcctctatttaattctatataaatatattttctttctattatggtgaatattgtttgttgtttaatttccctcgcttagtattatgtatatacagaaataaaaactatatatatatacatcgattggtactgtagttttctcgttcccaatatatatagccgttaccccaagacaaaaaacacgtcacctgaataaactctctttttcttacttaccaccacactttcccacctcagattctctcctcccaaacattacttccttctactaatatagtttcaactttgtttttgtttttgtattcattcatattctctcactgtaacctaaactctacaaaaataataatctcaaacactcttgcgccatgttttgtactacacaccatctgatcccaccccatccactcctccatcaaccaccctagttaattatatatatatatatatatatacaaatcttatttattatataactatattatacttccacaccccctttcttgatcttctctctcaaaaatattttcaatattaaaataataaaaaatgcttgtatcagtgtttttggctctttttctaccgtgcgcagggatgagcgcagtgtttgtggtttatctttgtctgttatggtacgccacgattcaacagaatgaagaagccgatcagttccggctgccggtgaagccggttcctaatcaaggcttatcagcttcggagcttgagaagttaccaaaagttagcgtgaaagagctggtgatgggtagtgagtgcgctgtgtgccttgatgaaatcgaagatgggcaaccggctcggcttcttcccggctgcaaccatggctttcaccttcagtgcgccgatacatggctttctaagcattcagtttgtccgatttgtcgggccaagctcgactcccaatttttcagtgactcagatcaaaatccttgttaactaattgaattaaataatggcgatcgttttctctaccttcccccccttttttttttactatttttgttttggtatattttaatttgtgtacagtatatatattatattatataaatatatcaacctgatcttttgtttgtttcaatatctgaacaaatcgagtgttagtccttatattttcaattatttgtttacttttattggtgataagatttatgtattaattcttcgcactaataatctaattaagttgctttatttgagatgattattgagatgggatttaggtaaaaagcattgttaacctttcaaaagctttgatgaagataaacatgagccatggaaagcaaatcaatcaatattagtgtaataaattaagtgacaaaagaagatacaatgattgagtttctttttatttattattgtatttgttgtagttggatgcgtttgatgatcaatggtggtagtaacactttcattaaaggcataatcttggaccaatggaatcatggcacgtaagaggttgggagtgttttccaagcgttttaatgaaacagaaccgacaggttggcgtgcttagtaagcgtagagattgaccatttggagcccactaaaatgtgatatgagatggggtcctttcgtttcgccctatagtggtgccactataattagaaattagaatacaagctgttcaagtagcccacaggtaattttgaactgtgtgcaaaatagggttactttaggtatttcacatttgtttattataattaattggttcgctaatcccacctgaaagtatcatagacgaaatagaatagtccaaacaaaagaaaaaatgtaacttttttaatgttttggagagcaaaagaggaagacgactaaaatatggaatctggtgcaagtatttcagcatttaaatgccttccttttctgcattcccatacaaatgtgtcaggttcttcatgactacgcttcacgaggttcctacgtacatagactttggtaatttgccatctgtatagtgttgtaatcaacgaattaaagaaaagcaattaacaaaaaaataaaaaatctgagatttttattgggaaccaaagaaagatcagcatttattttggtaggtcaaaattcaaaattattctttaattaataaaggaagtgattaaaagaaaaacgttacatgattaaaactgtggtttgttttttctcaactttaattcaattccaattggggtcatagaaacctaaggatgaattggtgtgttttatttaattaaatctaggcaaagtattatgtggaagctgtattaaatggtttttatttttgacactaattatttaatggtaaaaagtagggacaattttggaggaggaaagcacgtcagctgaggccgccaacaatcttggcaaatcattttctttgttgtcagagacagagtagtgctgtgctgttgtggtcaaaaagcttctcacgtgcctcgtttagtgggctggcagtaaaaatgagaaaagagaattgctacaaagtatatatcactcttctactcttttcggtgtgatattattaggagtataaggttttatataatttaacatattaatttttaaaaaatattattaattaattataaaacgtcgaaaaatattaaatagaactggtgtctaatagctaattcataaaaaataaagaaaatgtttacttctcacgtgcctaagagtagaagaaaagggagggataagtgaaatcttttatttaggatgcagagattttttcaacaaaatatatataatatcatatttattttttaaaaaagtaataaataattatgttagaaaaaataaaattatagttttagaaattaatttatattttattctttcagttctctttctaataccaaataatataaaagaggagttattttcctctccatttttaatactctttatcttttttttatctttttcttccattctacttttcatcactctaaccaaacataaccttatgttttcccagtatataccttcatcaaaacataaaaaaaataatagttttccaaataaaaattgatctctctgaaaacaaaaaatgaatgttagaaaagagtgttccttaatttttttttttcttatttttcagttatgactgtagtgaatttagtcctatctatagttagtagttagtgtcagttaagttagttaactaactgtcaacaccatgtgtatatgttcaagcctatatctatatgtaagcaattttatgaaggcttagaacttaacttttgtaatagttttagatgcacattcaatacaagaaacacttttctttttctctgtttattttgtttattatcgaacggattttggtgaaatttgatcaagctcaagttattcccaaaaaagtatctgagctttaaggctgactttgaatccaaaggtgaagattgtgatcattagctatttgaagaatcgaccctgggaacaatgaggaatgcgaattttgatcatgagaagttcacaagaaagaacgactttggtttatggagggtaaagatgcaagctcttctggcacataatggatttcaagtcgcaatagaaagtgaaaggcaatatcgaaggtaaggcagagaaggagacatccaagttgcttgaaaaatctcacaatgccatcattctatgtcttggggataagatcctaagagaagtatccaaggaaaagagtgctgggagtttatggaagaaactcgagcaattttacatgaaaaagtctatggcaaacaggttgttcttgaagtaaaaactgtatgcctctaaattatcacctaaaaaaatgattgaggatcatcttgatgacttcaacaagatcattcttgatctggagaacattgaaggacatatagaaggtgaagaccatgcaataatccttcttaattctatgcctacagaaggctatgaacatttcatagacactatgatgtttggaacattggaagaggttcacagtgcctttatgtctaaagaacttaaaagaatgttagagattaaggaagaaaattcaggtgaggggctgtatgttcgaggaaaatatgaacagaaagggaaaatgattaagaaagtggaaagaatgggaaatcgaagcaaaagtggaaatgcgacatctgtcattcaactacacatctgaaagagggattgtcctaagttggcacgatctggaaacaataaaagaaaattagggaatgcaaatttggtttctgatggatgtgatagtgagggttatgacaatgctggggtgttagtcgtatcaaatggttactctagactccactgggtgattgattctagatgttcttatcacatttgttcaaataaggctcagttttgcaactacacaaagattgagggtgggacagtgaaacttagggataataggccctacaaggtgataggaatgggatcagtgaaattggagttggtaagaggtggtttgatagaacttcaacaagtgaggcatgttcctgaggtcaagaggaacctcattttagtagaaatggtggacaaagaaggttgtttagttaaggtagagaatagtgtcatgaagattcttaaggaatcaatgatagtaatgaaaggtgcaatgatcaatggggtgtatgtgttgcaagggaacactgtaaaatatcaagttcttgtagcatctaagaccatggtgaattcaacaatgctttggcacagaaggcttggacatgtgaatctcaaaggcttggaaatcttgaatagacatgggttgcttgggaaaaatacaatgcatgatcagggcttctgtgagcagtgtgctcttggaaaggcaacaagggtaaaatttggaactggaattcacaacaccaaaggaactgtggactacattactctaatctttggaggccatccatgactatatctcgaggtagagccaggtattttatttctttcattgatgattattctaggcatgtttgggtttacctgcttaagaataaaaatgaggcatttaatacctttaaagaatggaagaaactgatagagacataaacaagtaagacaattcaaaggttgagaacatataatagtttggaatattgtgctggtgtgtttaaatattattgcaaacaagttgttaatctaaccacttgacagttaagaacatatcacaacaaaatggcttggcaaaaatgatgaataaggaaaatcttgagagagttaggtgcatgttaatttactttggtttactaaagaatttttggggagaagctgttgcaataacctggtacttgataaacggatgcctctcatcagccatcaatttccaaataccaattgagaagtggttaggacatcctgcaaggtatgatcacttgaaaacctttggatgcattgcatatgcacacattagacagggaaagctagaaccaagagcagtcacatgtgtgttcattgggtatccaattggtgtaaaaggctacagaatgtggtgcattaagccagacaatcatcaaagatactatgtcagtatagatgtgatttttaaggaagataaactatacaaaaaatacactcttaactcaactagggacactgcaagaagatgcaaatggtggagttcaatttgaggtggagactcaggagggtaaccattcaaaggaaataactaagggtccaactactgaggcagatggtgagggaagcttaggtggtgagatcagtgaagaatcaagggaagtatcatatgacagagaagaccttcataattatcagcttgccagggatagagacaagagagtctcaaaggtcctagagagactaggccatgttgatttaatacactatgcactgaatatcacatatttcaactatgatgaaccaaagaaatatgctaaagcaatgaaaaatggaatgggataatgatatggatgaagaggttgtatcattgaagaaaaatggaacctagattctggtgagaaaatctgcaggagtgagaattataggcaacaaatgggtctataggcacaaagaaggcatcctaggggcagaaaaagcaaggttcaaggatagattggtggtaaagggctatcacaaagggaggtactatattacacaaaaatattctctcttatggtggtgaaacacaccaccattagagttctgttagcaatgacagcaatggaagacctaaaattggagcagttagatgttaaaactgcatttctacatggtgacttggatgaggaaattttcatgaaacaacctgaagggtttgaggaaacaagaaaggaggactatgattctagtcaactccctcctacaacatctcctgatcttatttattattcctctcccaactacttcaccaagcagttcctctcactctgacactggccatacatctgatgttcaattgattaaacctattgttactaataactttactacagtttttatcctaacagatttgatgttccatctacaccagcttctatgcctactgcatcatctttatttactccagttcccactaccactatggtgttgccatctcaatctggtatgatactcaaacagtctgttaaagctcctttaccaactccttccattggttccacttctgttgttcccgagaaagtttatatcaactctcatactataaaaaccagatccaaatctggtattagaaagcctaaagtccttatggcttatattaccccagcaattgtctcaacaactctcaaagatcctaagtggctcaatgttatggatattgagttcacttctcttaagaggaacaacacatgggttttggtcaagtttccacccaacagaagtcctattggttgcaaatgggtctacagggtaaaagagaacccaaatggctctataagcaaatacaaagccataattgttgccaaaggctttcaccaacaagttggctttgacttttataagacatttagtctagtagctaagcccattaccattttaattattctcacacttacagtagcaaaaggttaggtaattagtcaacttgatgtggacaatgcttttttcaacgaggacctacaagaacaaatatatatgacttaacctcacgggtttgttgatccaaattttcctaaccatgtctgcaagcttaacaaagctctttatgggcttaaataagctcctggtttgagaaattgtcatcagctctcactcatctaggtttctcatctgccaaaatagatcactcattattagtgagaatatctccacaaaactgtctttatgtcttagtttatgtggatgatatactcataactggcaacaatcaacttgaagtagcatctctcatttctgccctaagcacttagttgctctcaaagatttaggacatgcaaactattttcttggtattcaggttctaccaagctcagatgggattgtgctctcccaatagaagtatcttgatcaggacctattatacaaagttgaaatgcaagatgttaagactcaaagctcccttatgaatagtggtctcaagcttcctaactctagcagtgaacttgttcttgatgcttcatcttatagatccattgttagagctttacaatatgctacaatcactaagctagagattactttcagagtcaacaaagtatgtcaatttatgcataatcttctccaatctcatcttgttattttcaaaaggattttgagatatcttgttggaactttggcttgtggcctgcacatcaaaagagcttctcatttaaaccttgaagcttactgtgatgcagactgggctgctgaccctgatgatagaaggtatacaactggttactgcatcttttggggtggaaatctcatagtttggcactcaaaggaaacaaagcaccatatcgaggtcctctactgaagaagaatttcgaagcttaactgttgtagtttttgaaatcagttggattcaatccttgctcactgaactgcatatgtctctaaccacacctcctctcacctggtgtgataatgtcagtaccatcatgctagctgctaatcatgttcttcacacacggaccaaacacattgagagtgacctttactttgttagagacaaagttagtcaaaaagaaattatggtgcatcatgttccagctgatcatcagcttgctaacacgcttataaagcccatctccaactctaaatttctgtttctaagggacaaactatgtgtggttttctctaccacactaagtttgagggggcttattagtgaaactaatctagttgagttgccattatttagaagatgcaatgggagatatggtcttccacctctctccttcctaggtctcttgggtgtatcatcttggtgtccttgttgtggttgcattcttttgacctcatttcttcctttttgttcctttgtcttattgtctgtgtctttgtggtctccttttgatcttttgcttcatctttacactgtcactctcttttaaattttcatctttccgttatcttttttttgcctttctttttgtcttctttctccttttccttttcatatgtgccttcttttaccccacttcttggcacctcctctatttggttttgtgctttttgtctggccctgtcttttgtttccctcgcacagtgttgttttgtgctttgttttgtgtgtgctgcgggtttagttggtcttggtttggccatggagttggtaagaaatgatgaggtggtcgttggtaggaatttatccattgctgatgccactatcgacttaactccctgtgcatcaactgtcaataacttaactactctgggtctcattggtaaagtgttttcccctgtgcacgtggatgagaaatgcattaatgactttgtgaaaaacatgtggaaatgccctgctcttgttatcccggttctagtgtccaccaacaacaccaactgttttgaacttgtttttgagaaggtggacgataggaactgggttctgaaccaaggtccttggaatattagaggctcccttctgttacttaaatcttgggaaccgtttgggtctaatggcttatctttttctcatacccgcctccggctacaaattcacaagcttcctgtggatttttttttttgatttaaatggtaataacttgggtgctcttgcgggtagtgttattgaagtggatctggacgaggagaaacctgcttcctgggtgaaatggctacgagttcttgtcaaaatttccatggagaagcctcttttctctgggtgtttcattaatattggcaatggtgtgaaatcgtgggtgaagtttaaatatgaaaagatcagagctttctgctatttctgtggtcgtcttggtcaccagtgcttgggttgctctcttttggaccccactctgttacagacgcccaaggacgtgctttcccccctgttcggtccatggttaaacattggctcaaactacttagactgctttaatggtaactctaggaaacccgtttccttggctcggggtctctagcgtggtcccttgactatatcgcctccttcgactgcgactctttctgacggtgatggtgccaagaattgggtgcccttgcaggcccgtgtttcgagaagagttaaaacgatagctcggggttctcgtttgtcaacccacaacggtgctgtagtcgtttgggtccccaaagctccagttggcgtgaatggaaattgtttggctaaatctggtaatgaggccgtgactgggttttctgatgttggaaaggtggctgaccctctacctattctggagaatggcattgacagggataaggaaaaatgagggcttttattgaaaaattttgaaaaaacttttgaaaggtcctatggtgagttggcggttaagaaggatggtgtgagatgtggggtcgggggggg

SEQ ID NO: 17467 - DNA, 4625 bp, Cannabis sativa
cacacacttgagccaaacttgttcttatcttctctagtgtgcttgcaattctctctaggatttcacattatttttcatcttattagagagagttttctctgtattttaaaagtacatattcattgtattgagaggtgagattgtcatcgatagaataataattcggttgtaggtgaggttggcaccgattttcgtaagcaacttgaaaaaaagtgagattgccactacaacaatccgagagtgagattggcacttcaacaatccaaagaggttgatagttctttggaaaaactattggttgaggtgaagttagcaccggtggaaaaacaactcggttggtgagattggcacttcaacaattcggtgaggttgatagtccttggaggaaaactattgtgagagatttaggaaaaactttagtgaaaaattcctcggttgtaagggttagtcaagcccattaacttggctcgatagttaaactcaaagttaggtcatagctttgaagaccaagtacgtaggtggcttagttctaccgaaccttgtaaaaattgagactttacaatttctattcctaaactctttacatttctagtttgttatttgtttatacttgtgattatctttattattgcattaaacttgaatatttacatgacattagcttaaatttctaattcatcccccctctttgaaatatatcttgggctaacacataaaatcagatggctggtcttttcgcacattgtctttttgaacattttgtttcaacacctaaaatagctttgtttttcattgccatttcttgtttcttgaatacaatatttctactgattaagtactttctataaccagattcaagacaccatagttttgcagtccttgtgtaatgactgcataattagatataaaaaattagtaattaattagtatattatagtaaattatgaaataatatgtgcaaattagacataagacctattattagaaaataggtgaatatgatattattttttaattatggagattttattaaattatgtgtgtcatatatataatatgaaatttattatatttatgtttggcaaaagtgggaattcgacaaattggcaaaaatatcacaatggtataaattagtgttttaaaggtattgatttttttttttttgttttatgaaaagttagaaataaggtattgtgtgatttaatatagaaatgaccattatgtccttgtaataaattttttagccatagtttaatgtaaggggaaatttagtaattttcaattttattgatagcgtacaacaaatagttactcctgaaatgaactttaacctctaagaaccagtttcggaagaagaagtgaagaatgcagtgtttcaaatgcacccggataaaagtcccaggcctggtggtatgtcaccagctttctgtcaaaaatgttggactattgttggctctaatgtggtgagtatggttcagcgttttttctccactggtgattttgaggataaatgtaatgaagctaacatggtcttaatcccaaaaaagaagcaaccaaattgtatggcggacctcagaccaattgcgttatgtaatgttttgtataaagtaatcacaaaggttatgtcaaacagaatgaaattgctcatggacaaaattgttgcagagactcagagtgcctttattcctagatggttaatcacagataacataatggtgtccttgggtcaacaagtgatgagaaggttttcaaatttgttaatctcatgacaagtgagtttgaaatgagtcttataggggatcttaatttttttttgggggggttacaaattaaataaactgatcagggtattttcatctcataatctaaatacataaaaaaaattcttgacaagtttgggttagataaaactaagtatgcccctacacccgtgagtttgtcaactaagcttagtaaagatgagtctggagaacttgtagatccaaccttgtatagtggtatgattggaagtctattgtatctcacaactagtcgtcctgatatatgttttaatgttgggctgtgtgctagatatcaggcctctcccaaacagtcccatctcactgcagtaaaatgcattttcaaatatttatctggaactgttgagtttgttttgtggtattcaagagatactaatatgtctcttgtggggtacaatgattctgactaggctggcagcctggatgataggaagagtacttctggaggttgtttctacattggaaataatattgtgtcctggttaagcaagaaacataactccatatctttgtctactgctgaggtagaatatatagcagtaggaagctattgcactcatctaatttggctgaacaaaatgcttacagactatggctttcctcaagagtctctttcccttttctgtgatagcacaagtgccattaacatgtcaaaatatccagtgaaccattctcgaaccaaacacattgatatacggtatcatttcatcagacaatcggttgagtccaaactttcaactatttctcatgtttccactaatgcttaactggctaatctttttactaaggctttagatgcacactcctttactcatcttagaaaatgtattagtgtctacaccatctaatctgccacagttgcatctgtttctcattttttttacagtctactctttttataaaaatttgtgttcttctctttttgtcttctgtagtgtcttcatttgatcaggaccaagggttgtcccagttaaaaaggctaccctccttaaatgcaatggaaagagtttcttttgtaacactgaatgtctatgaggagtttgctccttctctagatattctttggaaaaaattcataaggagacagctcatctttaggaggagtgaaagccatgattggttggcaaaactcattgaatttatttttgcaaaagaggtagcagctactgttgttatatatttaaaaaaaaataaaaaaaacaaaaaaatagtaaataattttttttctttattgagtaagtatgttgtccatattggttctggggggctcacatgaggtcacttgaacacacttatggcatcttttgtgttcagatcatctagggcatcattttttttatgagaattcactcattttttatgttcaagagaagatttttttttatgaggtttaggtgtggttggtccatttttttcttttaatctttggtcattctttttcgagattgagtaatttttggttttcataatcttgtttcaaaaagttttaggcttctaccttgtttgatttttttaccatgtcttcatgattgggtcatgtgttgtatgattttttttttatgttaatgggccttatactaggcccaggaaattaataggtttcttaattttggctcagctgatcctctatattttgaagtttaaaaagggtttcttccattattgtttccacaccagacttacctactcgaaagtctcctgagctcatccttgtgccgagttatggggaagcgtgcttatcaaaaatccttaaaggttattctgtcctcctacaccgtgccaccatcgcctagtctctcacctacattgtctgggtcagttcatccttcatatggtccaggtatgtcttctcttgtcaataagcaatttactcgttcctccttgtcttccccagtatagaaaccttctactgctgtgtcccctgcacaaaccatgtcaccctcactcacactgtcaactgaaccactatccaaccctaaagatagtcaagttgggtcatcttctaaacgaaaggatgtccatagctgtaaggcttctctgtttaaaaaacctagggtctcagctcctgagtcttctcccatttctagtccacctttttattctcatgacaaacttctttgttttcaagagaatgtgtgttgccgtccattgtggcctgagtatagagtcaagcttaggaatttctcaaagattcgtgagctaatagtgtcaagaaagtgggaacgaactgtctcccatcttttgcagcccaatgtcaatcttgttagtgaattttatgctaatttggatgaaaatattgtcaatgagaatagcgagtataagtatcaggcttacattcaaggaacttggttttggtgtgccccctcgaccattagtcttgtcctgaaaatacctcggttagctaaactcaccttcacaaataactataaaccatcttttaaagaaattagggctaaaattactagtcaacctgactttgtgttgaatggaaaggaacttcctgttaatgtgctctctgagttctatcgggttcttcataagattgccttatccaattggtgggctagttctcatgtgtccacagtgaattataatactggtcgtcggttcctatttgctcttggcactggtgtctctattgacttaccaagcctaatgtataccagaatagtggattgtgctaaagcaaaatgggttaagcatactttaccttatcccagtctggtgcaacaattggttttgagaagtcattcttcttgtaacgtcccagcttcaagcctccattgggtccatacacccacggaataatggctcttatacacgggt

SEQ ID NO: 17468 - DNA, 7389 bp, Cannabis sativa
gagaatgaaaaatggtattgatatgaatcttaagaaacttctggtgtttatttaattattattaccagcgaaaaaaagagaatctctaatactttagtgacaagtaaacacaagaattaagccatgttttcatatatatatatatatataggacatatttatacatagggtttacaattaattttgattctaataaatgaaactccatattaatttatacaaatatagtttgtaatataaaatataacagtagtgtaaggcgtgctctctagaacttttcaatatatatcctgattttttgataaacatacaatctttatcacattttaatggatgggtcgtcaaattataaatattaattcaatgagagagacagttccattgagtgagataaatcttatttgtgtacgtctcttcggatatatttatatatatattgtaatcataatcaaaaaagggtttcaacgaattgttcagttaattacaaaattcatagtgatccagttcatatataaatctacatgcaacgtagtcacctcatgaataataggtttgtaccatatcgccctatatatatatatatatgtttattaccatatcatatgtggtgataaacatacaaagtcccatatataatatatatatatttacaccaccacttctgttaacttttcttctctatcatcaaaattatactttttctattttacatattaaatatttacagtacgtataccatacataaactttttttacaatttcttattacatatcatttaaatattatatttttaaatagaatattattaattaaagtacaaaagaaatgtaataaaaaataaaaaaataataataataactttttgtaggatctttattttacatatgtctttgatacatataatactagcatacctctctaatatattatagagaaaaagggattttgatgcatctgatgagagtggccatagagttgtgatcattatatcgatcggtatcaattttttttttttttttaaaaaaaaaggtgcatatgactaaaaaaaattcttattaaaaagtatattagtcataccatacacaaattaattaggatgtatttttaatttttgtaataaaaataaatagttgtgagattagattagtgacaataaatttgcataacaagttgtgagattagtttagtgacaaatgaagatgattttgtgttttgactaaaagtggcctttaattgcaataaattggtactttgactaaaatattattgacaatatattatatatatatattttcgtaattaaaaccttttcttgatcttgatcaaaaactcaatttgctttttatataagttgatatgtctaaaaatgcaattggcaaaatctaaacattttcatttgtccaattgttcaagtccctattatccatttagagacaatattcccaaaaataaataagtaaataaaaagaaaaagatttatttgaaaaatatagataatacgtgacagatgtagctaataaatagaaagtgacgaaagagtacagagctaatctattctagttgattcataaagtcaattaaatctggcaacttaatagagaaagtaaggtccatcttaattacatcaagtactctagcctctacctatttaaattctaaaaccattattgacacaaatgaccattcctaactgctcactatccttattaccactctatgtttataaatgattaataatattttatactaattaaattaaattatgtcacatttaatatttaattatattaataataataataatattcaacatcattattattagtatatatcttttaacacttaacatttcttataacctaaaccagataaatagatttggatttccataaatgagaattgtcacactacacttttctcggcaccaccacacaaaatagaaaaatgctaaaaggttataagaaaatcaatagtgatgatactaaatagcatcacaaaatatcatcctactattaaaaattaatattatgaaaaatgttaaaagacaccaatagttgtaaatatttggtctaatttaatatctggtccatatactaaaccctaatattatcaagtaataattaatatagatgaccgtacgttaagttgaaaagaataccactttacctaataatcatgctaataataaataaataataataactggttttcatctatatactgtattgtacgtacgtttccagagttcatatatgtaaatatgtaaagctacttaaatattgatagcaaaaagtgagttagaacattaaaacaaataaattaatgataatagagagaggaatagagaaaatttatcagagctacagagaagcatacctgtcctggagttgggcccaagtaccatacaactggtagcattgagtgagtaggctcttattaatgttccagcaccaaacatttagagccctagctataaacaactttatatataataataataataataatttattaaaacctagcatttctccttaaaaaccatattataacaacttcatatattctgtctttcaaatcaatatatattatatacattatatcttcctagaattaatacatgtataatgtccaacctagaattctctctctctatatatattaatatacaaactgaaccaataatatgcatggatttgtgacatttaataaaacgcgtacaagagccttaaacaaccgttttcatcttgaataattgataatcaaataaaagcaagagcaatacaatatattttcttttttcaatttattacaaaatagaaaaaagagaatataaaaagctctatatatatatatatatttatctctttcaaaaacaccttatttgggttatgaaatccacaatgggattcaacaataataaccttttttcttttctttatagtgtacacaaatgaaaataaatatgatcagccacaaccccaccaaccaaccaacccacctccctctccaattaaaaataataataataataacaataacactgtaaaaaacaaaaaactaaacacttctttctctttttctttttccttttttttcttaaacgaattttgtaaaccctaactagattggtgaaaaataataatactgatcatgaaccattgagattaacaataataataagtaataattataatgacactaaatatgtatctttcttcaccatcatcatcatcatcatgaatatatcacctgtattattttttttttcttttttatctcataagggcatcttgaaggtgcttggatcttcatcttgaatccaaccaaacttttccatgaatgggtttgttaaagactctggtgggtactcatcaatgtcatcgttccacacattttcttcacctccattcaagtccctcactacctcccataaacagctgttgcatttaaagcccgcaccaaagctaatcatgaatactcggtcccctttcttcaacctcttcttcgcttccatgtaccctagaacgtaccacagactactcgccgatgtgtttccgaaccggtgaagagtcattctcgccggttcaaggtcgtacggactcagatctaagtttactcctattccatcaatcaccgctttaccacctgtgtggatacaaaaatgatcaacgccggttctgaaatcaatcactggtggcttcacctgcgcctgagaagacgatgtcaccgccgaatttggggaaacactgcgattacttcccttttttgatgatttaggcgatgttgtcgttttccagtatatccaaacagccatgaatcggagaagttctctaatgggtaagattttaggggcgatgattctgaggttatccacaaaggctcgagtcgcggctttgggaagattcttggctaagtggaagccgagccgtccttgatcatcctcagtctgtaaacaacatccgtacgattcgtctctcgctccgtgatgtgtacggaccaagcatttgagtctgaacatcgatttatgctgtaacgatctcttattagtgaggagaatcgcacaaccaccggacctgaacaaacaattcgaaaggatcatagatctatcgttaccggaataccaattcggactaagcgattcggaggttacaactacagcgagtttattctgacacgatttgaaaacgtttctcactatatcaaccgagatcaaactcgcactgcaacccattccagtaagattataaaccttaatatcctctctcatcttgtaatgatttataatccgagaagacaaagaaggaacagtcgaaagcatcgaaacgttaacaacgagaacatcgatctgagacggagatattccgttacgtctgagaagtcttccaacgctgtcaaagaaaaactcctccatctcagagattccatcagcaatagtaggagaatcttcacgaccgtcgaagatgattctcggagcgtaagtctgttcaccgattccagcactgacaatagccttgaggagaaacttgtactcgatgaggcctagattcttggtccgcctaatgagttcgccacaaaactcggtgttgagctttcgatcgtcggttggtttgtagcactggtaatcgagaatgtagcaatgttggtctcttctggtttggtaacgtttccagatgatgaagatgaagtagagaagtggaagggaatagagtaaaacgacaatctccatctggtaaaacgacaattgatagtgagagaaagagagagagaaaatgagtgggggttgggggaagtgaaggatatgatgagttggaatggaaagacttatagggaagtttttttgggcattggaagaaacactatagactacatgtgaaagagagagagagagagagatgacccttcaactcccaactgatttctttgcaactttctttgtgtcattcttaattgctatattttcatcacgtacttagcacgtgattgtcaaactaaaaataaaattaaaaaagagaataagacacatctgatgttgctattggtataattaagtagcaaatcttgtatataacttaagaaagttacttttaaggatatcgctaacgaaccaattgtagggtgacacttatgaaagttatggagcaccactaatactcaatgacaatgttaaaagaaagaaaaataaataattttatacctttggcttgcccctacgtggaaaattatcacaaatttggtgtaaatttaatagagaaatggtgaaaggtaagtgtgcttgcatcatctatgatgtaagatgatatcttatggtagcatttaaagttaaaaaatattattaatgcctaatatctttctcttataatattattaagtatctgattaaatataattttaaaaaatagtttttaaagaataatgctaactaattatgaagtgtcacctataaaaaaaagatggataccactgatgattaataacaatgttaatttttaaaatgtataaaatcttacaaattatcgaaaaatatttattttatttctcttccacattatttcttgacacttttacttttacttctaaaaacatactataaggacatctatttctctccaatattatagcaccctcatatttcaactaaattgcccacctcaacaagtatttttttcaaaatttaactactggagatgctctaatatagttattggtagaattataagtatcgtatcctatataatttaatttagagaaatgctaaaagatactagtggtacttaatactttccaaagtgaattaacataataacttttatagagtatagctaactaatcgtaaagcgccacttataagtggtgttatgcaccaccacctaagcacgcgcctaatagaaatgctttaattttataactacaatgaaatatcactcaccatttacacagccacatctaagcaagggcaatcttgagattgggtgggttttaagaaaataaaaattattagatattttattttaaaatgtatagtattttatgaaattttttgaaaaatatgtatatttttaaaaagaaaaatatttttttaagctcatagactagataggtcctaagtacgagcctaattcgtcttcggcctgcatctaagtaattgatagcaatactcaatttcataagtattatgaaaaataattcggtctgcatctaagtaactgatagtaatactcaatttcataagtattatgaaaaataattaattagcagttagaatttcgaagtatggtaaagaaaataaatatcttaagtgcatgtacatggtgttaatactaaaattgttcatagatttagctcgagaaacatttggtaaatgtctcttaataagaagagtagtgtgtataccttatataaatatataatatatatatatattatgtttctgattctttatcatatatataattttacttgaataataatgacttctctctaaagaaatgtagctaaaatcacaatttattagtacaattcaaattacaaactttttatatttaatttaaattatatacatcattatataaagtatgataattaattaagcacgtgtaaaacagtaccttctcataataatattattattattgttaataatagcaatgctccctttcttaattattttttaaagtttataattttcgttattttgggagtagtggatgtattttatagttcacagttagtaggttacccaatatagttaccaacatttaagttagtgaagggtggtagataaataatagatatataaatattatatatatacgtatataaaatattattattattcatatcttaatatatattaatattattactataagagttgttgtatatagaatacaccaaactaattaataatcacattagtaagaattatatacccaccaaatgttgtgttacataacgtaattaacagacaagtttagcttaattaacgctaattataagtaaatgaacttaattagttcataatcctacatcacaatataattacatatatttttataaaagcattcaattttttgttcaaaataataataataataaaaatgacaattgaactttatactatatatataccatagaagtatagtactttacaactgtcagggcttgcattccgaccatttaatttcgatttaatatatccatcttttgcatttaatagcttgcctgcattatttgatgtatttatatattgtataattatatatttttatatttatatttttattttgacttagacaatagggagtatttttttatctaggaataataatttatagggatacgattttgtctcgtaatgtactttcacggaatgtattctgtggtacatt

SEQ ID NO: 17469 - DNA, 2260 bp, Cannabis sativa
ttctttaacggaagctgccttcagcattctctgagttcatttttatcgccattcttcagggctttctgcactttcagctgattccgcagcgttggatcattgattagcctcttttggagtgccgaatcttgaaaccatttggcaagaggagtcgacaatgtcaatttttgattgcatctttctttagccaaaccccaaacatcggatgaaagtttcctttttcatctttaattaccgttggcggtttgaagcaaaggctctgatcatgagttaataggccgcatttgaagcacattttggggagcttttcatacttatactgcatccataggtctttgagtcgtcgtctatggaggaaaaaatcagagaagagatcgacttgtttaggtcgattgtagctttgaatcgcagcgaactcataccaactgcatcctcaacacctgaaggaagctcatacactagggaggctttggatgcaagttcttttaggttggttagattccaatagaatgggggaatgatgctaatgttcacctagatgggtgtcttatcaaatcgacctcagagggtgataaccatgatggccacggcataatgacgatgagagccccacagacaaaccagggacaaagggcaagaacctttaaagcattgttacggtttaagaaggtgaactggataatgccatcatcaatttccttccatttccatccctttatcgcattctgtgacagtttgagagaaccctgaatagcagccttacccagtttgtaccggcttattattttcccagtaggacttggttggcctcctcaggctcatccacttcgctagggtttagagcaaaagttctttcgtcttgcgaaacctgaacagtatcctggaacatgttgctgactgcagaagcatccattggaggtgacaaacaatccgagttaacaataatcacttgtattgagcagagcagaactctataaacttctacgaagttggctccttagagagcattgttacctcacttaattatctacttctttaattattagagatatgtaaaatatttttattataactcataaatttttttaaaacttttattattaaaaaatttataatataatttttattataacttttattataactcatacaatataaaatatttcttttgacatagtaattagaatcacacataaatttacgaagtagattttcgcaatcggcgcaagaccctcctcaaatcaggataactcatcgtctaaccgaaaaacgtactttgtcaaaccattgactgctaaattcttaacgcaaactacatggaacaaaactgctcctaaaaatttaaacaataaaactataaagtgttcaaacaacacaaccagtacattgaaatacaccttccattattaatagtcgttgtcagaccaaaaaaaaaaaaaaaacatcgcaaccccaaactataaaacaaaattatattagaatgacaatcttcaaaataaaatttaatatacaaacgtagagtttaatacacaacccaattcactagcttaacattactaatttattaaactcaaaaaaaatttaattgtaactagccaaagatattatcctttggctagtaataactgttgggaatattttatcagaatctagatttactaacatgtatgtttcttttacaccctaaatatgaaatcttctaatacgatataattaaacacataagagtttggaaacctttacattgatggcagcggaataatatgactacttctgctcagatctctaacccttgttcctttctgttgcagagtaataacaagatctgatcctggatctccttctctccttcgagttggctaccaccgtcttttgcactgtgattgagtaccttacttgctatatgtgtgggcatgttactctaccactatggctcgaattgatgaagaaaatgaataaggtgccaactcactatagaaggagtctctcatctactagttgtcttatagagttggaaactagatttggtaggttgaaagtgtttgatgagaataagaacatcatgttccttttatagtatttcaactagggcttagaattgaattataggattaaaaaagaataaaataatgggcaaaattacatactagtggctggctacttaatgggctttactagttacaattttgctactttatttcaaccatttattcttctttcaataatactatactttccaatttcaatcctataaatgtca

SEQ ID NO: 17470 - DNA, 4086 bp, Cannabis sativa
tccacaagtccttccaacatcttcacaacagcccccattgcaggcctaattgcctcatcatcctgtatgcaccacactgccaccaatgccacacgcctcgcttcatcaacatcatatgccctgccaagcctatgatcgatcactgcagccacattgccctcgattatctggcgtgcagcccatggaggaaagaaccatttatcagtagtaactcctctgccttcattatcaccagcagagggcagtgtttccacattacggcggccaccaattagttctatcaatgtcattccatagctataaacatcagccttggttgtgattgccacgcctgatatccattctggggcaacgtatccccatgtacccctcattgtggctaacaccctactaaagtccctgccaagtagctttgccaacccaaaatctgaaactttaggtgtgtaatcactgtcgagcaaaatgttttctggtttgatatcacaatgaatgatgcaatctctacattcttcatggagataagcaatacctctggccgtaccgattgccaccttaaatctggattcccagttcaacattggaccttctttgcgtaagtaaacactcaaagaactatttggcatgtaatcataaaccaaaagcctatgggaatcttccgaacaaaatcccctaagtctcacaagattgacatgttgaatgttcccaatagtgcaaacctcagcccggaactctttctctccactgcccggcctctcgaggcgtttaacggcaacaagagcagcagaatctgttaataactttccttggaaaactgctccaaaacctccatggcctattttttccgagaaaccccttgtaatctgatgaagctctttatatgaaaaaactttcaaagtcaatactgggaaatctccatcttcttctactgtcttcctcccttttctcctcttgaaaaataacacacctaccattacgaatcccaaaacagcaatcaacccaacaatgatagcagccaaaactacaggattcaaatgccttttcctcttctttagaataccttctttccctacccttaaatggattacttccaaatccatgttatcagaggtcgaatttctcaagttcaagagagacccaaataaatgtttgcacaacttggtcctcacatcataatgcacaccaacacaagtgcaattttccaagcaagccttttgacagagatcaagtctagagttaaaagtgtcaacttcagaatcactactatcgcctaagctcgcaataccaacctgttcaaacatatcatcagttttttcttcacaagaaacgggatcgttcacacggcgacaaccatcggagtaatccctagatgactcccaatttatcttattaacgggttcaaaaccagagaggcaattacatctctcggtcaggctatcgcagagcccaaacttcccacacgtaccaaagaccaggcacgtgttgctgggctcaaaccagaacatgttccaattctctacctgcgccgaccatgtgttctgccggagctgacccgaataatgcagttggaaccgggtcagcggtggagtcaacccatccaacggcgtctcggcaaacccaaacgacgccgtttccatgaaagggttgtcaaaatggaacctgtatatgtacggcaccaacatctctggcacattggagaaagccttgccggtccaatttccggtgctccagtaaggcatactaccattgaagacgagctcgaactcgctgtagtcgggtctgagtctcaaagagtacaaacctggagaagggtccgatgagctccgccagctagtcaagctttttgccgtggtgaggttcattcccggcagccacgtgtcagtcggatagtcgaagctctgccatgaaaccgtgcctttgcttgtgagaagaaccaggttaccattctccaaaagcttgagggctgtcccggcttcaagattcgtgctctgccacacgatcgaactaacggaatccttgaccgccaatcgtcccgtctcagtgatttccaaggtcgtagacgatatattcttaatgggtctctctcggttcgcaacccaaatgtaggtcggcggcgaaataaagctataccaaatacccagatagtaccgactcccatttggactgaaaaacccaagctgaaacgtcttgttcttactgaagattgtcgtatttgcttctagtaagatctttgtcgagagcagttcctcgatttgcctcgtcgtttcagatgggactgaactctgagcaagcttctgaggttcggaaatctccaaagacccatctaaggaataaggacttgttcttctgggtctgagtaatttcgaactgtaatcactttcctgaacatgggtttcaaacgtttcgaaatttggagtaagattagcattcgagatcattacatgaaaggtcaaggaaagaagaaaaacaaaggttgtgagtggtggcgctggcaacatttttctttgaagtgtttgggtaggtagaaaatcactttcccggaaaaataaatgatgccatgaatatttatctatgaggctcattaagagagaaagagaagaagatattccatagagatattcatgggtgtctgaaaaagctaaaaatactttttcaatgacaaaggagattagaaatgggatgaaacttgaaagtttttcgaatgacaaatttacccttcatcaatttaattcgaaaagtttgaattaaattactaaattgaaagtacatgattttcctttctgaaatatttctgtagtaaaaccatctccatgcttttaattttgtgttaaatagaaaagtgtaaaaaaaatcaataaaattttattagaagtttataaaccatattaaatacatgaataaaaatataaaaaaattaataattatattaattagtgacaaaaaattaaataaaaaaaataatatttattataatatataatttaatttacactaattttgtgttaaatacaacttttatcgtactttaaatttacactacattaaatactactaaattatacatacaccacttttataacactacattatatatatatgttctaaataaataaaaatactagaattagagttgaggatatttttgtaaaaaaagaataatatgtaatgggaggaggtcagaaaaggaatatggtggcagacaaatgttctgaagtccaatgagcaggcttgttggtcatatattttcaacggaagtaagtaattctaagtctaaagtagtatttttattattttcaaaaaaaaaaaaaagtagtatttttttattactaaaaaaattataaaatcatcaacacgcgcaactctcgtttttttttttttaattcttttctggaagggtgcaattctcgttttgaagtatggtcaatattactaatacgatgtttttttttaaatgaactattactatattctaatttcgtttaattcactaattagggtttatcatttgtttgtatctcactaatactatttctcaccacacattcaatactaatattacacaactaatgaatataatcaaaatttaattgaaatcatgccgtataatattaacaatctaacttttaagtatggaattaaggtgaacataattttttgcttgattggtaagaagacacaattttaggatcacattaaattaaatacacaatattggtactagtgtggtaccaagactttgaccctctttacatattagtaatgatattatcaaaatttgagtgaaacttaaatgaatatcaattattattcctttctcttataaggtataagagataaatatattttgtgatttttatttgtgacataatatatagttgatatatattctttttttaaaaaaattatagtaagatattaatgatgttagaacaaaaaatccatgcactgactatgaatggatgattcaagtgccctgcacgtattgtatcatcattttatatcatgtgattaacaatatcactttaaaatttccccacctaactaatgatgaattaaacttgtgatcccttacatagttcttatcatcat

SEQ ID NO: 17471 - DNA, 7086 bp, Cannabis sativa
actgcgatgtgtgatttgataaaagggttcactgttagccgaggcatgtggagaaggagtgggaggagatgcattgtgtggaggggaagtgtgggaaggtgtatgagtaggaaaaacagtaggaacgtttgttgatgtaggaaccgagaggggaagggctgtgataatggagttaggtgaatgagggggtggtgaagaggccgaaggagtagcgaagggaaaacaagattcattgaaaatgacatgacgattggtgaaaagacgcccagaagtgggatgaagacaaaggtagcctttatgcttgctgctataaccaagaaaggtacaaggagaggagcgaaattcaagtttatgagagttataaggccgaagaaaaggaaaacattggcaaccgaacactcgaagcaaggaatagttgggagctttgttgtagagtaagtgataggggctgctatagttgagaacacgagtagggaggcgattgattaaatacacagttgtagagaaagcgtaaggccaaaaatgaagaggaaggtgggcatgagctaacaaggtgaggctggttttgacaacatgtcgatttttcctttcgacacgaccattttgttgaggagtgtgtggacacgagagatcatggcgaatgccatgttgagtgaagaaccaagacaaggaacggtattcaccaccccaatcggttcgaaccgattgaatggtgctctgaagttgagttgaaacaagatttttaaagataagaaatgtgttgaatgcttcatcttttgtattagaaggtaaaaccaagagaaacgtgtataatcatcaataaacaagagaaagtatttaacaccagtgattgaagtaacgggagccagtccccaaatatcagaatgtattaattcaaagggttttgaggcccgagatacaaagttggaaaaacttaatctatgagatttgcctaattgatagcagtacaaaaggttaggcaatctctttttggaaatgaaaaattacaagtagatgaaatacgagaaataatatccgaggccgggtgacccaagcgagagtgccatagatcaacggaagactttgaggtgtagagaagttgaggtgcgacagtaagaggtgtcaggggagggagtgactcggtatattccttgatcaagatggcctttgagaagtatttgatgagtgcccttagttttgacaaggaagtaagtaggatgaaactcaacataagaattattatccaaacaaagttgagaaacactgagtaagtttttagacaaagagggagaatggtaaatgcgattcaatttaatgataggaaaagatgaagatggtagatatgcaatgcccacactagaaataggagagaacataccattgcccatagtaatgtgatcattaccatgatacggagctgcggagtcaaggaggttcagatcaggtgtgaaatgatgagatgcaccagagtccaagtaccaagctgggtctgtaagtgtacccatggttggaggagtgggaagtaggggtggattggttgttggtgaaggctgtaatggtggtggggtggtctggggttgttgtcgagtgaaatatacgttaaatgggcgtggaggtggtggctggaaactgaggttggtgtgatgatagcacatgagagcggtatgccctgttttaaagcaaatctggcattttggaggtctaaaaggagggcggttcggaccagatggaagccatggcataggtgatcgaggagaagactgataggggctgcgtggttgatgaaaaaggggtatcataggtgggcgatttggctgtgtatgggacgggaagcgaggttgagaggcagtttgttgagaggacgatttgggtctctgtttgggaaatgagagatttgcaaagttggcttgaagggagctcaaagaggcagcatcattttgtcgttccaggcatgtttcataactgagaagaagggaattgacctcttcaatggtgggtttgacagatcgagctaagattggagtgacaaaggcgttgtactccggtccgagaccattcaagagataagttaaatgctcttgagaagaaatcggttccccaacagaggcaagggtattgcacagagattttaatttttgaagatatgccgaagcattcaaaccatctttcttcaaattttgcaaggtcgtgcgatagtcggagctccgtgcaaatgaggcggttgagtaagtgcgttcaagggagacccaaatctctgctgcagtagtgaaagccacgatttggctgagcatggagtcggagagagaggcgtacagccagctcatgagtaaccgattgtacctgtgccatgttgtgaaggctggatcgacttagttcgaggtgggatcggaaaattgtgtcgaacatgccatggttccgtcgatgtagccttcaagtccatttgcaatgatgatattctacatttgcattctccacactaagtaattggtatcatctaatttgactgaaatggtttgattgaaggatggaaagtttgagggtaaggaaggagaagaggatgaagccgaagtaggggaggcggctgtagcattagggttttgtgtattggtgatggtagggttttgaagggggttttgggtattttcatcttccatttgtggggtagaacttgtattgtctattaatgccatggggagccttttgtctctgataccatgtcagaaagaatgggaaaattgtattactattcctcaaagaaaggagtacacagtataattgtatttataatagaggagacctattgagggacacatgtcaccatataataaaagcaagaaagtaatacaattaaatacaaagggataattttatgctttaacattgcagaaattttccattgaatgatggattatggtttgaaatcaagaattctatgaatactgagttgaaagagtttaaaattcctcagaattcttatagagctgtgcttgaagtttatgtttcttttcatgaaaatgatgagttttggtactcaaatcttcctaatgattacattgctgtgaatgagcttagtgatactcttagaaatgctctaagagggacataataataccaaatttaatgagcaagttggaacagttgaagcatatatactttttattttcatttggtgatgcagtagaatttcgaaaattcttaaggtcaattaagtctaaaaatttacagacattggtaggtattagtactaggaatcttgttctgagtgattttctacagctagagagtctcaagaaactaaaaattatagtgagtaacaaaatacacaaactttaactcttcttttttactatcaaagtacacaaataaactaaaaagaatttattacttggaatgagtaatgagtgtacagatccacaaaggacatgaaacatatttgtgttggttgtgtctgaaaaatgaaaatcaagagacaatgagttagtaggcaaagaaacacagttgtgtaaataaataataatacacagaataaacacagttctctctgtaacagttttggtgtaatagctttatttatatgtattacagcaaaaagggaaaatagtgtgtagaaaataatttgtacttaaaactgttgcaacaatattgatggccacatcccacaggtcttttggaagaaagctagacacttcagtgaataaaattaagatcattggaagattgagactctctccgtagttctttctcctgttttgaaattttgacaggtatctagtagtttattggattgtaatgtatgtaatagtatacatattgtgatcatataattatacatattttaagtttcttttaattctatagccttttcataaaaaagattgattagtacacttctagtctgaggaccacaaattaatcatgtatcaaagaaaacaattaaaacgtacaacaaattatttcatgactgattactactcaacaagctcacaatacacaccaagagtttatgcttcagcacttattcaagactacacacgtcaactcactgtaagtactagtattaattttaattttaattaattaataactcaccattttcttttcattaattaattttattataataatgtgtcttacgtatagcaattgtatcgattgggggctcgaaagatgattgttacatcagtgggccagattggttgcataccatatgagttagctagattcaatggtaacaacagccgatgtaatgacgatatcaataaggctatacaaattttcaacacggagattataagactggtcaaccgtttctacagtcaattcccaggagccaagtttgtgtacatggatttttatcagaacaccgttgatctataccggaaagcaagatcctacggtatgtattatattgtctatactaaatcgtgttactgtctctatacataagaattgacatagcaatatagaaattgataagtaactatttctcacccaaaaattctgaattattattaattaattggcgagttattcttagaaaaatttgatagttgtaataatttagcttaaattaatttgggaaaacaattaagtaatagttatagttgaaaagacaaaaaaaatcacattaattctggttaatatacataatatatatatatatatatatgaaatatttgtcaaacgaaaaaacccttctaataaaataagattaatatatacttacaacaaatgctattacagattacgagtcaagatatgaaatctgaagtctccaatcgattcctatttatgaaatctcacacaactgtagacaacactacatgcgtatggaattaacttaattctcactgtttcacttctgagtcctatataaacaaaagaactaattatacatactcgtgcatgttttgaatgcacaaagactttcaaagttcaaaatctccattcccccacatcatccttatttgtggatggaccagattacatatactaaaaaaaaacagcacacataaagaatagactaggaaaaaaaatagaaaattggacccaaaagaaaaaccccaaactcacctctgagtatagctgtctgaaacttgaagagagacaaaaagaatgataattttaaagagagaaaggtgcgtacagaaaactattaatatatataaatataggaagagaggtaaatgatgacgataaaagccttaggcgaccagtcagtgctctatatggatgggtggatcatggattaaatatttttggcaacaagagatataatgggaaataattcattaatttggcagcgaggaccacttatgccgctccctactgaacaaaagaagaccaaacaccatactaaaagtaattaaagcaagattcataaagaaaatggtcttttttcagctcaatttcaaagaacagaaaaaagaagtatacagagctcaaactagattaagtagtagaacggagtttaaactatattaagtatgctcgagtgtaataacactatgaagtgtcaaccaaaaacagtcagatgaatatctaagtaagcttagacttaaaccaatgatacaaatctcaaacacctagactatattcaatcgaacagcttatatggagtataaaaatgtcatgagaaatatgttttttcagcatattacacacttcaaacagttcatcgagagaacaaaccaacgattcaaacaataataagaatcactaagaatttcaacattatcacgtctcaaaccaacatcataaaaataaagtaaaaaccaaaaacaaatttggaatatcatacacaatcattcgaaaataaagcttaatcaaagtccaacaacaaatgtgacaagcaaaacaaaaccaagtaccttcattagagttaattcgaagaactcaagagcacaaaattggtattcaaaatagaataaaaattgaattaaatcagtcaatttcattctaatcggaaacaataacaattagaataagttaattgacctttttgggagttttcatcttgagactgagagagagatgagtggtgtagcttttgattctcaaggagatgagaagacttgagagaatgcctaggagaggtaaaacgtaagaccaaatagaactagctttgttggcggaggcaacggctgcaccggtgaggctggcaatggatgtgttctgcaaaatcataggaacacatccaatcacagtaggcagcgaaaaatcaacaaagaaagactatgaaatgcaaagagaaaatcggcaaaaagcaaagggaaaacaagatgctgagccttctaactctaagcttactctttttctctcttttgagacttctaactctaactctaactctctaactctaactctaactctaagccctatatacggtaaaaaaaaattaggaaagaaaatttcacgccaaataaagtattagtcaaaataatgatttaattatttttaaaataaaataaattttatccgaaaggactttgataagtcgtgcctaatactaggactgcacactcgtcgagttttcagacggtcgggttcggattttcagatttcgggtcttagaaatacaaaactaaatccgattttcaggtaactatgtctctttttgtaacagaatctctcctttttttatcggttgtagctttgaacatgttagtagacattgtaactttgcggcccataatgtggccaagtgggctttttcccatcagaggttcggatcagtgactctgaactccttgcccgacaatattttctgtaatgaccgacaggtctaactgtctttttttggtaatatattgcacgcttttcttcaaaaaaaaaaaagtttataagatcagctaataaatatatttctttttgatttattttattatattggaaaatttgtggcaaaagtctctaaaaaatttaatttgatgcaaataaatccccaacgtcaaaaaatagtaactagttgttctaagtttattttattatattgttcctcatatcaatgctcacaaaactaatatgagccttataagctattcaaaatttgtattgaccaactcatcttttcctctcttctctcac

SEQ ID NO: 17472 - DNA, 6048 bp, Cannabis sativa
gtttagctgccaaaaactctatcaataatatgaattattttataagatgctatatactataaagtaaggtggggtttagttggagataatgaaatagttagaaaataatatttatctattgttttgtttcgttacattttaagatattgtcaaagtctttagttaaaataaaaaaaaaaatattttaaaaataaaaatatattttattaattttaaatcaccaaatttttcttaaaaaatggtttgataattttgttactaattagtctcgtaactgatcttaacattggaatgtcattttaatgaaatgattttttatcattgtgaaataattacattattttgaaaaaaaaaaatcattccaaaataaaatgaaaaaatttaatcatttttttttcaattttttgtatatattttaaatttaatttcattccattcttatatctactctcatgtggagtttggttggaagtaataaaatataatagaaagaaaataatttttattcttattttatttggttgtatattaaagtattaaaatattattccaataaaaaaaaaataataattttattattaattttttaaaaattttaaattttattctgttacattcctatattttcattactcccaagtcccaactaaacaccaccttatttttttcattctttccaactaatccccacctaaggtataactccgaaactttaaagagtatgcatttggaattgaatataaatagtaagatttaatgcatttgttttagtaatgtaaattataagaaaaaaccataagtaaattattaacagttaaaaaccaaatcaaatttgacagcaatacacaagcaacaattaaaaaaaaaaagaaaaaactaatatgtttcattaattaatgaaggtttgtataacaaagtttatggggttttagacttcaaaatacagatcccaaaacccatttcaattcaatccacagcataagaaaaagaactgtggaaagaaaaccagtaatttttttggttgaactaataatgccaatacaagttccttgtttgtgtatacaaaacactaaacaaacaagccttatattgtaactaaatgccataagagttatatatactttctttcagtgtataagatcaagagctgcttcttgcactgatggctcagtaatatgtacaaaatcctctgattccctttccacttcctcccaacacttattggaaccttttccttccttcatcttcttcacgaaacacacaaatcgtctccagttatcgtcctcaaacagatatggattcatcctcaagtaagtgaatgcacacatctctccttctccattgctaccttcaaagttaaacgatgctgcctgtaagatctgctcgagagcataatcatcgtaacggggcagtgcgttttcgccagcgagtggaacttgtgccttctgtgtggccatgataacttgtctaacgagcttctctggtaagcatagggcgtcttgaggctgctcgtgatctcgcatctcaatgcaagtgaagttgaatatggcgccgtgtctagctaacatttgggcgatggggaagtaaccatctctgaaacgggtgttgtagtagcctgctgtgagctcaggggcatgggatctggtgccatagtgccagtgaattccagcaatcttcactgagatcttcgcaccagtgtcctcaaaaatagacttggctgcggagacaattctctccccatggtcgatcagcaactgggaataccaagtgaggaagaattcaccataagtagcgttccaacctccaccttcctttttaaaaaagggggcatcttcaggccagttattgtagtgaccagcatcagtgggacctgtgctaccccattccggcttaccatttgcttccgctgctgctttcaaactgctgatcatgtactgtattcaataatcaagattcaagtcaattcattggcacataaaaatacttatgactatcattctttacaaaacatgtgaccataacactactctctacaaaatgcttcaattacacattttttctacagttcttctgcatatgcagcaccatttatgtacattcagctaaatggatattcacaattatatagctaatttattttattgttttaaaaataccaaaatatgtgaactagtcctaatacaaactctataaatgaatttccgaacggtaaaaacagtaccttgtcaaaacactggaaagctccaattccagggaaacgccaagttccattctcttctgggtatgaagggtaacgaagctcaccagctggacccattcccacttgaatttcctgatcaaaaccaaacatgcaaaacttttttttagccaaattgactaaaaaataataggaagaagaacaagagcatcaactacactacttaccacaatggtgtcaccaagaaggtgtttgaagttgtccctaaatgaacgcatgaaatcagcgtaacattgaacaggagagcgacccttaagaactgggatggtatcacatccaagtgaaacgtactcgtagttcctctttccccattgatcagtataagcaaggtcctggtccttgtcaatctcctccaccacccacttgggtaaaggaatactgtattaaattcaaaatcaaaatcatcagtaatcgaatttcgaactggatttaaactggatttaaacaaacaataatcaaaaaaatgtaaaaaaaaaaaaataataataacaaaacgtacttgcaagagtcgcctacgttaccaccacactgatggaaagacataacagcttgaaccttaagcccatgcttcttggccatctcgattagctcgttgtaaccgccccagttgtacgagcccggtgagtctccctcgaccaggccccaccacacatccatcatgattccctcaacacctgcactcttcaacgcttgaagactcgcattaatcgccttctttcgattcactgtgtgattcatcgtgatgctgtctaatggcatcatcacgtaaaccggcaccccactccccttatcatgcgcaccacgtacttctctgtattcactcacagaagaggaagaatccccctccaccacagccggcggagccagctctaaatctgtcgcaaacgcctgacacgccaccgacagatccccccgcattccgccatataccggcgacctgtgtggactccgcggtggagatcggcaaggactcaattgcctagacctacacggactccgcggcggcgatactccgctctcaacggactctggcctcggaatccggcatctaggagatttccacattgccgacgacgaacctgatccagactctcctgaaaccgttgatccagccatcgtcgcaatctggctagtgatattcaacgccatctttttccgatcttcgatcgctagtggcacagatacagatactttttctgattaatattttttttccttcaggctagccaaattatataataataaaaaaaaaaaattaggaatctccattacagattttgttttccatatatacagattttgttttctatacataataatcctccatataattcacttaaatcaatcaattaaagcaacaaacaacgaaaaagaaaaacagtttaaattcatttcaaaatacttcataggagtaagaaattgagccgatcaatatcactttcgataaccaataatcgttcaaaaacgcgtaaacatgaagaaataaatggaagaaaattcttgatagtaaaattcttaccgattgagacgaattcgagctgctgttggtgattccttgctttattttccttttttcgaaatcgagatttcttcgctttaattttttgaattcgtgattatgaaaatacgtttgcggataatgtgttaaagaacttagaaatgagaagaaggggtatatatagtgataaaaattagagatgcttagtcacgcgtgaaacaaaagagcaatgtggacacgtggcagataattactagatgagcagtagaaaaggacagagactaattacttttaagtatttctcttttattaatccattccaaagtttctggccatgtgcgttccacgtgtcaaaatctgaggcagttcagtaggcgatggctacgatttctcggggcatgtgggatggacggtgcgatggcgttgcactcgaaggttctaacttaaggtagcgcgcccctgagacacgtgtggatcttgccaaattcccaagctttcaataatttagtgataagatatttgtggtcaaagtattaaaattctacttaaaattttaggggattattttagcactaaacattttgagtgggtttgatccgaattggagcaatccgtcaaaatctgatctggtgaacttgtaattttttttaaaaaaaatgttcgagtgggtcgggttcaacttagcacccttcaggcggcttcgcgggttgagtttttaagagtatcagatttcgggttgaaccccaacctgcctgccaacccgcatatttaatatattatatatattttttattttttattacattttatatatattaattaaaaaataaaaataattaaaaataaaaggccctaaaattgttatattatatatgtttaaattaataaataaaaaataataattatttgaataaaaaatttatttttttaaaagttaaccaggtcaacccaccaacccaatcaaccggccaaccaaaacccgccaacctgggaccctggccctaagcctaagcttaaacccttggttcagatcctgacctcgaccctgaccttgagcttggacccaaaatccagaccctcacttcagcctagacttggactcgaacatgtgacgactacctagaccctagacctggaacagattcatgacgttggacctagacttgaatccataactaaaccctgactcgggacctgagacgcagacccttagttggagcattttgtaaaaaaatcacattatatataggattttattgttggttggagatggccttaaaatttgcaaaaccaaaaatatttaggtgaaatttttagcgcaacttaaataattttacctcaaataatattctagattaattaaactaatatgacaataattaacagcaaatatttatcgtataacaaaagttgatattataagtaattttgttgtaaaaaaaataaatttagatacttaatactggagaatgagtgtaagaaagatgttactttattgagaagtgatattattaatttcacgaccgacttaaaaattagtgggttataagaaaaatatatttttgggcttatacttaaaaaaaaatatgatattttttaaaattaataagaaatataattattaaacaaaaaaaaaaaaaaaattggacccttggactaagtgggccttaggcacatgtcagggtcgggcctgattaacctcgtattacaattttgggtcgggcctgattaacctcgtattacaattttcttaattaacttttgtacctaaaaatatatgtcgaaaaattttttaaattttttttttgtcttattatgtttacaactcatttccatgccaatagttaagacaagtctctttacacattgtttcattgtctaagaaacatatcactttgattgatatgattaacattaaaattagctaataattaaggctcttccaaaaatataatatttatttgattcctttgtcccaccaaatatccattcatttcattgtaccctttatagacaacacggataaatttgtagtctaacacatggcctttttcaatttcacaaatacaaaacattgattgattaattcatgatatttcaattgaaaccaagcaagaaaacaattaaggataatttataaaaacaattcatatagaatacattacatgacagcttaaatccaataatataaattaatatacaaaaaaaattgtgtccatggaacgaaagaaaaataaaataaaatcatattttactcaaattacaatatttttacacaaaaataatagaaaaa

SEQ ID NO: 17473 - DNA, 2496 bp, Cannabis sativa
  modified_base (337)..(344): a, c, t, g, unknown or other
atacagaagttgactaaaaaattataattagcgctctctaatcaatttatcatatgattcagtgattaaaatggaatacaacacacattttcttgaatgttacattaatgttatattacattattttcagtgcaagatgtaaaatttgtattaaatttactataaaaaaaaaagtttgtgttataattatgcttcaattcgtaaaataagtaaaaacaatattaattattattaaatatttattaaaaatatataaaaatttcttaaaaaaaaaataaaatacataatttttttttattttttaattgtttaaataataataatatggtaaataaannnnnnnnagtttagtaaaagttaataaatcataataattagtaatatttattgtttggtaaattttaaaatacaattgaagcaatattattttttaaatctcctaaaatataacagtacaccacatttttagtacactcccaatacaaaattcaatgctatgtaaaaaaaaccctaagggcagacaatacaacacacattgagcagcacaaatcttataaaaagataatgaccaaggaaaggcaaattaaccaacccaacccccaatcacagatgatataagtaaataatataatgtatatttcttcataattccatatcatatgacatatatagtaatgcttcttatatcatatcaaattcgaagagtgtcaaaatatagcataccacactcaaaaaccataaaaattgcatttcttacaaattacaattgcaagccaaatttagtaatgatcagaaatattggctttgcttatttaatttattatattattagcatttttttatttaacacgcgattacatatttattattcactttattaatactatcccatcccatgtgtgagataatgattcttcttctttttgatatccatcatatattcttaataatctcccttaaatccttcttcatttacttctgcaaacaccacaaatttacaacacacgtgcaattaaatattaatttagtaattttagacattgatatgtttttaattttagatttttttttgtaaattatttttagattaattacatatatataagtaaatttagtgtgtaaccatctttattcatattaatttagtatagtgtaacatcttagtgatgtattttgaaaaatatgatagacaagttctaagtaataaaattgatctcaccttcctttgacggcaacactcattgttatcgttgtcactatcactgctactatcactgctgctactattcccggatattcggttcttgatcctcctaaacaagtttccctccttcttttgatgtatggtgccaccaccggcggcaccagttccgtactggatgtagttgtggttatgaccctgactatggctcatcacactctgactgtggcgacagttagttttggtcacacagtgacatgatgtaacagcattagtagtatggtgtttggtggtgctatgaccactactaccgtggttactatggtcgtgaccatgaccatagtgggccttttgtggcttggctgagccatacccatagttagtttgggtatgggcctgggcctgactacagtggcactgagtcttggtcttgcatgttgcaacatggtgggcctgatagttctggtaggtggtgggcatgggcttgggggattggtggtgtgtgttggtattgcctcccttgacccagctagccattcctgacattttttggcccaaagaggaacttccattgtggcatttctgctggcaggtctcgtgggtgggcctgctgcattggagtgaggccatttcaactcaaaggcaagagatataaagacttaataattagtgagatagtttttttggtcttgcttttcttggtgatatggaaatgttttgcttgatccttttatagggcattggtggtgctgtacaataatgggtcattattttttttttttttcatttttcaattcccattattgtgaaatgacattatttgaatatgctgcttttgtattttggctttatggatcatcagataaggggcaattattcttttgggccttaatttctcagccatcaaataagtactagatctctaaacttttggttttaaattgtttgattcccatatggagcatggtcatggattaaattattatgtgctcttatttattataattaaattgataattaatatccaaattaaccattatttaaagtgcatttttttttaatatttcgtatccaaaaaagtgattacaatcttttcagattatttttatttgtgctaagataattagtttataatttatagaatataaattatattattacctttattttaatccatgaaatctgtagtgttgcatgtacaaattgttatagttatttactcatacttttttttttttttgaacaaatgttatttaacattatattgattttctaatggggtgagttaacacagt

SEQ ID NO: 17474 - DNA, 10260 bp, Cannabis sativa
aacttagggctgaccccccgagtgttggcttgctaggcctcgcccgtggtgccacagctcgcccaaagggtcatataatattgattctttaatgaggctcctcttatcgaataagaaaacaccaccaaataagataccaattcatacattcttaagagagcctccacctccacaagggccggatttacttccatgaagcttcaaacactattgaaaaatttgtattgagaagtaccaaagatcaataaatactttttctatctctgcaacttatttgtatttcaacttccgatttttttttctttttcgtagttctttatattagctaagtgcaacccaagagaagctttggccctcccatttttttttttaatttctaataaaattatatacaattttatataattatactaaatattatatagaattttatatttactcatccatgaaccatcgcactactataaaatattatatagctcttacattagtatcaaatttcatctaaagttttgagtttgtaacaaacataaatttaataattttgtttagaggtataagtattcaatattaataaaattgtaattttcttttaattttgtcaatacaaactctattttgagttatttattagaagttgttatacccaaaattcgactaccacctcaatgaaggacacgtgtcaggatgaagggaatatgaatcaatgcaattgcttatggaataactcattaattacataagagtcaaagcatatttgtaacccgctgactgtaaggtcttaggcgaggaatcaatgtacaaactagcacttagtatattagcgagaagccatatatcgctaaatgcgaatagcgaggcaccggagaaagcgacacatatcaaccgtaaaagtctttagcgtgcaaaactaagtgtaaaagtcggatcggctcaagaacaagtaagcgaggtgaccatctcgctatgggaagacttcctatagcttcctccaactaacgggagcgaggcttacaaccctggcgagtcagaaaaattctttgtaaataaccgcgatcgagacaagacatacactattgacctcggaaggaagaatggtcccagttcgctattgagatcactataaccaagtttttgtcgagacatctccagatacaacagttaaaaatgtgtttaacacacgattattttgacccaataaaagcggaaaaatcagagctatacgattttcaaatcataaactgcatttacacaacgtgatatgtaatcaaatcccacgattttagggataattgttgtaaatatatttcggtcaactttgtaatcaattgtccactatgtaattataaatagtgacaaacaagagcaaaaaagggacggaaaaactcatatgaaaggggtcctgaaaaatacttaaaaatctgaataagattggctcgtggaatatgcagaattttaactgcaaaaccacgtaaaaaaccttgtgctcatattctttattttgatatagtttttattttttctgtgcaaaattaatattgtgaggcttaaatttagttaacgaaaactcgcgttaacagaagtaataattaatattacttgtttctatccaaaccaaatgatttagatgctaagttttatatgtatacagtttaagacactaatgaagtctgtattgaaaaaaattgaataaaagttacaattttaatttttttttattagaatggaattttattaatcaaatagctcaaactattacaataaataaaagttcagcatgagcatccctaatttgaatataaacaagagttacaagtaacataatgtgtgatattatttgcacaatgtttaacaaaataaattttgatatttttactattattgggcttatctttaaaagtattgaacaccctagtatctagctaattctaagagaaatgctaaaacgtggtagttatagtgcttaacattattgacttccacttatattgttttaattaaaattattaaaaatggctaactaattatactagactccgtgtgcccataacaatactctaattctaatactaaaattttactcaaagaaatgtgtagaaattatacccaaaaaggaaaaaaaagaaaaggcaaaggtatataagagttaagtcacactttttaagataaagtcaaaaggtttagcaatggccacatcttccactctcacaccaatccctgcttctcctttcctcaccggaaacacgcgctgccattaccgccgccttttcacgcctcttccacctcacctatccttcaatgccgccaccccaatcctccgacggcgatcgaaaaccaccatcagtgccaagctcggggagaagaataaaggtttggagtacagaagagttggggattcagatcttgaaatcagcgaaatcacactcggaacagttaagtaaaacctctctctctctctttctcaaagtcttgttgtcgtatgacaattttgatgtcgtttgcttcttcgtcttgcttgttgtacagatgacatttggagagcagaacacagagaaagaagctcacgatatgctaagttacgcatttgagcgtgggatcaatgccctggacactgccgaagctgtaagttagaataaattgtgaaattgggtgaattttgtgtatgaaattagtgataaaggtttgaactttatgttactttattacttggacagtacccaattccaatgaagaaggagacacaaggaagaactgatgtctttattagtagctggcttaagtctcaaccccgtgataaggttcaattcaattacttacttgttcataatagatataatttgatgtgaaagcaatttcatttgttatgtaacagaattcctacttgaatgtgataatgattggaatgaatgaatgcataggttgttgttgcaacaaaagtatgtggctattcagagaggtcagcttatataagagagaatgccaaggttttgcgggttgattctgctaatattaaagaaagtgtagagaaaagtcttaaacgtctcaatacagactacattgatttactgcaaattcattggtgagtttctaatttgttgttttgtctgtctataaacattcattatagtgttgattgctgttgagtttaacttgctcgaacataatattatgcacacaagaacttagatgagaaatacaacaacacttagctttttacatggtttggatcgaatgtaatgattttatatccacagaactggttgccttatgttacacactgtttagaagttagaaccgaataatggttctaaattctcccttacaagtgaaagtcattttttctctgtgttttaagctctttaaattctcagcccgaaatcaattttaaaccagtttgctctctctctagtaacaaggacctatttaaacaagtgtagattgcaagctacagcagatttcacaacaacaatttgtagctttttttttttttttaaaaaaaaaagatccctggaattctaatatgtatcatatgaagtagaaatggaagtcttacattaagaattgatctgaatttaaacttgtttaacttgtgctttctgatgttcgatgttctgctctacatccaggccagaccggtatgtgccattgtttggtgaatttttctatgatccttcaaaatggagggagagtgtgccttttgtggagcaactgagggctttccaagaacttatagatgaaggaaaggtaacttgaattattgttatcattatttctctactcataatcaacttactatgaaatggttagcaactggataaattttggttgatttatattctctattcaccaaggattgcttactggttggcgttcttgcgatgctcataacaggacatttaaagctgtgatgtcaaagtataatatttattaatggttttgaacctttacaggtacgttatattggtgtttctaatgagacttcctacggtgtgatggagtttgtacatgcggctaaggtcgaagggctaccaaagatagttagcatccagaacaattacagtctgcttgttagatgtcattttgagagtaagttaacaatttaatattatgctaataaatcaataaagaagcttcattcaccatttgaaacgtttcgacagtggatctcgttgaagtatgccacccgaaaaaccacaacattggtttgctagcttattctccactaggtggtggcacactatctggaaagtacatagatgccaattctgaagctgcactgaaaggaagattgaacctctttcctggctacatggaaagatataacaaatctattaccagggtatgtaattaactcaagctctttcatttgacaaaacagaatagtcccctaacatggaagcaaagtgtttgttattcgatattcatcgtctctcgttctaagaattcgtaggataggatggacatgaaatagctgccaattgtctgcttgatttcgctcttcctttatttatggtaccataacttttccatagagctaaatacaaaaccttgtgtgactttctttatccaggaagttacaataaaatacatggagttagcaaagaagaacggcttaacaccagttgagcttgctcttggatttgcacgagaccgaccgttcatgacgagtaacatcatcggtgcaacctctgtggaacaactaaaggaaaacattgatgctttcttgacaaccgaacggccgttgcctgcagaagtgatgacagagattgaagatatcttcaagaagcacaaagatcctcctctttgaaacatttctaattagtcattaaagtttgtgttagtgtatttctaatccaattcttgtatgcagtgttttttttttaattatttgttttacaaatgttttatttatgttttaattacattaatgtaataatgtaaattgctgttcaccaattttttcatatatacattgaacaaacaaaccaccaattgtgtattttcttttatttattggagcaaaggtatataattactttaatttaattagaaatatttatttcatagattaagaaaatattcaaatttaccaagtatgtccttaaaaaaaatcctattaagcatttccaaataacaatgctttctatcaatatattaaataagaataataatacttaaagcatttttctttaattagtaaagtattagcagccaggcattttctttgatttgggtggattagataaataaataaataaataaaaggggtgtttaattaatgtaataatatataatttacgaaactgaacaaaaatttacataaaaaaataaataataaattttaaaaagtagttaaattagttattgtatataggtggaaggaagagagaaaaaaaagggttgttcagagcttcaaagttgcctgaaacccatattgccctctcatttccaaccctttctctctctctttcaataattcattgaccacattttcattcattgacaattgtttttcagattatttcttcaatttgattgaattttgatgagagggcatagcagaagaaagcataggcatcacaatcatcatcattatcattatctatgaagacttggagacgggactcatcgccgatgccgttgccggttgagctttcttcttcttcttcttgttattatgcttttgtgattatcagttgtgctctttacaacattttcagatggaatggcagatcctgtcacctatggtaatcatgagcgtgacattgaacaagtgagtacactttttttactcattcatgatgaatctatttatctatatttttcattcataaaattgggatttgatgccaaatttccaatctttatatgcaaattttaagaccctttgagagatttgaagttggtattgatggaagacaagtttcaagatatcttctaattttaaatacgcgtgcaacaacctgattaaatcggatttggaagtcttgtaactatataacacgtctttatgaaaatgttaataatgataaaaatgaattttagaaataaatgtttatacattgataatgtatataatattatctttgttgtgtttcgtaggcacttgttgctttgaagaaaggcactcaattaatcaagtatagtaggaaaggaaagccaaagttttgcccatttagaatttctaaggtaagaaagcttctaaattgaccctttttttccaattgaagtattctgaaaaaagtgaatacttttgtagcaaaaaggaaaaaacgatagcgcctgatgaactatcctaaaacgaaatagtttttgtcttgttacttattccctatatactcaatatcttcaattcatatagatatttgtgtgtgattgctttagtttgaaaattctctatgtataatagggaaatatctgaattgcttgaatgatttcagttttagtgtcactaacaggatgaaacaacgttaatctggttttctcatggacaagaaaggactttgaaattatcttcagttacaagaattatacctggacaaagaactgtgagttaataacaaaagaaaaacacaattactattactattagataaaaataaaaactttcctttggctgatggggttgttggtttttctattaacaggctgtgtttagaagatatttgcgccccgaaaaggattatttgtcattttctcttttatataataacggcgaacgatcacttgatctggtcagtaagaattactttatgttaacttgaataaataagtattttgccctctgaactttggtcggaaaagataataccccctaagttattgtcgatgttaaatattcttcctggactatgatcgttagtgaaatatgagacgtttgttaaataagaggaagcatggtttgtcagtggtaaaaatttcatatgtcactaacgttcaaggttgagagagaatatttaacatcacgatcttagtagtgctcagggagcaaaatacttatctattcttattgttttgtttacttttgtgaaagtttgatccgaatttgtattgttgtcattttaaagatctgcaaggacaaagctgaagcagaattatggtttgcagcgcttaaggaactaattcctacaggaccaaagcgcattagacgttctaagagtgatacttctgaagtaagtccctatgttagattcgtttgttcattcagttttgacagttgtgtttggatatgtgtaactgtttgttattttttcagcaacaagatgggaatgagtttattcagaatggcagtcccttaagtgtgtcattagattttgcaagtattgcccatggtagggtgtctatcgatttcaatcctcgcgaatcttcatttagtttagcaagttcagatgtgggaacagaacgcgcaagtatgcaactaagaggaagcggtgcagatggttttcgtattagtgtttcaagcactcctagctgttcgagtgggggatctggaccggatgatatagaatcactaggagatgtttatgtgtggggagaggtttgggttgatggaagtttaagtgaaggggggattgttagctcggttcctataaaatctgatgtgttaaccccgaaatctcttgaatcaaatgttgttcttgatgtgcatcagattgcttgtggagttaggcatgttggccttgttacaagacaaggtgaggttttcacatggggtgaggaatgtgggggaagactaggacatgggattgataaagacttcagtcggcctcgtttagttgagtttttggcaattaacaatatagaatttgttgcttgtggtgaatatcactcgtgtgctgtgtctgcagctggtgatttgttcacttggggtgatggtgcccacaatgctggtcttcttggacatggtactgatattagtcactggataccgaaaagggttaacggtcctttagaaggacttcaagttttatcagttgcttgtggtacttggcattcggctttagcaacttcaaatgggaaactatttacattcggggatggaacgttcggtgttttggggcacggggatcgccaaagcatttcgtatccaagagaggtacagttattaaatggcttaagaaccataaaggttgcatgtggggtgtggcatactgcagctatagtagaagttggccagtctgctgttagtgtttcgtctagaaaactattcacgtggggcgatggtgacaaatatcggttgggacatggaaacaaggaaacttatcttttaccaaactgtgtttcttcacttattgattacaatttccaacagctggggtgtggacacaccatgacaattgctctcactacatctggtcatgtcttcaccatgggcggtaccgcgtatgggcaactaggaaacccagcttctgatggaaaaacaccttgtttggtacaagacaaattggtaggcgaatttgttgaagaaatatcttgtggggcaaatcatgttgctgttttaacatcaagaagtgaagtattcacatggggaagaggtgctaatggaagattaggacatggcgatacagaagatcgaaaaactccaacattggttgaagcattaaaagataggcatgttaagaacatatcgtgtggctcaaatttcacaacaagtatttgtattcataagtgggtttcgggtgctgatcaatcagtctgttcaggttgcagacaagcatttggtttcacccgaaagaggcataactgttataactgcgggttagtgcattgccatgcttgtagctcgaaaaaagcattgagagctgcattagctcccactcctggcaaaccgcatcgcgtttgtgatgcttgttatgcaaaattgaaagctgctgaggctggtaatgcttctaactttagtaggaaagttactactcctcgtcgctccatagattcgagggatcattttactagaggagaaagatgttcaaagctattgatatctcccaatagatcaggtgggaaatcatcatcagactatccatcatcatcaatggttaggacttcacaagttccagcacttcaacaactgaaagatattgcatttcccagctcattgaatgtccttcaaaatgcttggagacccgttactacaccatcatcgcctcatcatagtgtcaacaacaacaccagatcatcttcgccttacaacataaggcgaacaagccccccgagattagcagctcctgtgttttccaggggtgttattgagagtatgaagaaatcaaacgaacatctaactcaccaactatccaagtttcaaaaccaagtaagtactactaatcttatcaaatcttgctcttacttagttatgtttgttgtaatattttatctcttcttcttcaacaggtgaaaagtttaaagcagaagtgtgaaactcaagatgctgagatgcacaaactaaggaaaaatgctaaagaagtagctttgtttgctgagggacaatattcaaggtgcaaactagctaaacaacttgtcaacaacttcacacaacaggtttgcaaataattatatgcattatgattgttgtgagcaagtctcatatcatggtgtgatcgagacaatattactattgtgatgcagatgaagataataataacagagaagttacccccagatgattcaaatatggaaattttacaatcattgcaaactcaagctgaagaatttctagacgcagcaaatgcaacacccgaaatttctactttgcgtaacgcagcacgagctgcagaaaaatctcatcatcatgatcatccagaaactgacaaaccatcatcatcatcatcatcctcttctagagatgatggggcttcaacttcacatagctcagaagatgcatcaaattctcatgaatcttcatccacaaacactgagataggaaaagaagttgttgagttatttgaacctggtgtgtatgtcattcttaaatacaaagatggtaattgggagtttaagcgtgtcaaattcaggtactttacaatactcaagtatctgatcatcttgttagagagacttacattgataaatgtgttgaaacttaatactatacataagatgtatggactactccgctcatagtcaattagttttgagataaaacctcttacatcttaccagacccgactcttaagctaaaaaaaatttccgttttaaaaatataaattacttatttttttctaaataagggctttaaaataatttttttcctaacaccgagttctt

SEQ ID NO: 17475 - DNA, 7342 bp, Cannabis sativa
tataatatagatgataacagaggaatcatacctggaagatgggacaaatgaaatatgaaggaggttgaaagtgctctccagaacccaaccggaacgatgatgagcctccacacgaagctctcattggttcaagtaccctccaaacatctgatccgaggtctgctctactccttcggtttatctcacaacacctcatcgccaggcgagccaactgttcagcctgcacaaatggccagtctccagccaaaggatctaggagtgtttttagctttccttgatccaacgcatactgtacctcctttgttattcccaaagctggctttccagtcagcagccgtaacagtataattccaaaggaataaacatcggattttgatgtaagctctcctgttgacaggaactcaggatccatgtatgcaaaagtgccctttggatcagttctgcaacacaatgtggtattactgtatgaactatcaccattagataacagacggcagattccaaagtcactaagtttgctaatgaagttagcatcaaggagaatgttggctggtttcaaatcaccgtgtacaataccatgaggtttgctggaatgaagaaagataaggatagaacacaactctgtaataatccttatgcgagtttgccatgataatggcgaggtattgtctttgcaacaaaggcgatcttcaagacttccattggggagatattcatatacaagggcccatgcttctgggcatgctccaatgagtgtgacaagattgggatgtctcaacttactcaacacatcaacctaaaaataatcattccagtagtcaatacaaaacacataatcacattcaatttcatatgttctatcctgtcttcagggaaatatgagagaaataagccacggaaagaaatcatatgtataaattggtagaataaatttgaaaagtttgtcatttgtgtttggctcttaatttctacacctcacacatttccgtatgttctatttaaaattgtagcgctggatttagtaattgatttattatttctcaaggacagaaacaatgaaggctaataaatgcaatatactgaattaccataggcataatattcaaccaaatcaagtagacagggcagtccaaacattacttgggtggcctaaattatcaaaaagtgtaacattgtcatcgatcaagattacgaagtaacagatccattaaaatgcatcaaatgaagtacaaatctgatcttagtaaatgatatagttttttcaattattacttagataaatattagtctatataaactattcagctgctactgctacaatcacaccatcttacctcctgctgaaattctgtggggccttgcatgctatgagcgtggagcatttttatagccacctgtgtatgacgcaagagacctctataaatgcttccgtaccctccttctccaatcttcaaggatggatcaaagttattggtagcttcctcaatttcaaagaatgagaactcagagaagaattgaggaatgtgtgtgtttgttccctctccttggtttcttctcagctcctcagcctctctcagtgcattgtcacgctcaacctgcaggtcatctcgttcttttttgtaactctgtaatagctccactgctgatataatcttctcctccaatttctttaccatctcatcagactctgcaatttggctctccagtaatagtttttgatcttgggctgcacgaagttcttccgccacttcatttcgctggttctttattttatcaagttcctctttctcttttgcaaccgcttcctccacttctttcctatgtttcaattcctcagcatataagctctccgatgcttttgcctattaaagccagtattcacaatgagttttcctttcaagcttcagaggtatatactcaggtttacatgcaattactaaatatattgaatgcaaccagtatctaaattgaatacaaccataccaattgtgaggggtataaatttattaacatggaaatttcaaatttgtcaaatcagtaagatggacaatcaaattatcataaaagcattggtaatgataacacatttaacattagaatcagtgttaataaaaaaatttctatcagtattgcatacgtgggtcttgcttatcttctcatcatagatatgatatgaaataaaatgatagcaaagtacataatttgtaatatctacccaattcttgtaagttccaatagaaaatgcccagtccaaagcatttatagaggatagagataaaactacaagcaatctgaaattgaaataatatataagaaaaaggctatttaggctatttaggatttaattacacacatggtgttgacgtgacactaatgtgacaattatctaaatatttatgtcattattctgtttaccacgtatgaggtatgacaaaacttgacagaatgaccaatttacaacactgtgaatagttcgggcaccacttttaacgggctgaaaaattcaagagcacaataatacataagtcatagttcggggggtaaaaatcctaaataacctagggaaaaaaattaacagatgagatgagctcgaagaaatcttggaaggtaagaatttaccctgcgtatagcatcaatagcatccttttcagctttcccacgcctaactgcctcgtgaaatgcttcccgcttggcattttcagcctcagaaaatgcttgttcaagatgatcataaagagtttcatctatacttccatcctgatagcaaccatgaaatatttcagaaattattggaactactcaaataattagtggcaagcaaaagacaaaaggcttcccttcgatccttaaaatacaaatatcatgctagaaaaatagttttgaaacttaccaatacacttggaggggatgaatgagtaagagcttcttttgaatgaggaagtgcagttaggtccaatcctgtgtcactcccgccattcctcacaaaagaattgaaagctgcatccatcactggagtggaagagcatgttgaataacctgaagctggagtccttggtacaatatcccattcatcacaacttccttctgcatcctttttgttctgaggagttgacagtcctccttcagaaccatctagggaagaaatatcgctcaccatcctcccaattttcatattatttgctgatcttaccctgcgataaggatcttgaacttgacttgtgaatgttgcttgataactctgtctcagattaacagactgagatctcaagttgttgttggattgtcctgtctcagtgattggttgcactggtaaagatgttacctcaatatcagttccacctaaattacttctcctgtgttgtagtgttaacagcattagtactcaggatatcaaaatctgtgaaaatctgaacttgtcacaaaggtctccctagcaacaatttactgtacaatttgataaatcgtagagtaagaatttgaaacaaattattgaattgacatctacataatggagaaactactgaataatgaccaacctggtatgaatgaggtgccccttgcaagtaaaatgtatatggcaggaaccaggtgcttgttggcacacaaaaatggctttctttgatttgaggtccatcattctcctgcaattgtaggtagtataaagactaggcagaaggggaaaacaaggattatggacagatgaacctgtctctgataccatgtagaattggcacacaaaatgcaggtatacactggctcttcttataggaggactatagacacaaaccggttattgaaactaattataatagctagcttttctacattataacattgaccaactaatcttatatacaggtacaccaataaaacacaatattcagtaaaaaatttactaaatcctttcttttcaagaaaaagccaacctctgagtgaaggtgcaagcacattttttaagtaaatgtagcagagggtaaatttaactaattgttaacataaagtatgcaatccctcattgggtaaaatatcaaacaagcagaatattaaagcacaaacacatttataaatagatatacatgcattaaataaatagacattgaatataaggtaaatataccataatctgcagctaccacaaattctttacattgaaagcaacattagacaaccaaatttttatgttgactctaaattatttttttctttcaatcaactaattatatagcacatttgtgttattaaacaaaatctgaaccaaaaagaaacagccacatcacattccagttacagcgtataatcctactctcaactatgggtccacttttccccaagtaatgctggatcttatcatctgggatgacaacaagactgagttgagagagaatgcataaaataaaatatacacatgatgagaaaagttattatgtagttgtaccttgaatagtacttgtccgctgctgctcccataacaagattcgtaaccttgtgcttggtgatgaggtcaataattcccttttcaatggactccatatctatatgtagcttctctgcctgtacctattttcacataaatcattttgatcagttgattttgggtcagcaagagctgcaagactaggaataggataaataaactctagattcatacttttttatttggctcttggcagaactagaaattatatttttacttaaaacagacttccgaaaggaattacaacaaaaatcagacgcaaagaaacagacacaacatatattttacccccattcgatcacaaataaaaaggtaatcatctaaacttctgtgcatcttttgcttttcaatttcacgatatgctctgacttcctgatccttcaatgagtttgctggaaaccttgtacccactaagaaaatggaaaagagttaaacaatgttaaaccaattatcccatttttttttttctttcaaaatcttaacaaatctccacaactatatatccaacaacaaaacaccagacttttcagtcaaaaagaggcaaatcaccatcaagtgttgtcaaagtgttgtcaacagcagttcaataaataaagtttctagactccactcctaacaagtaatacatgatcaatgattcagaaatcagtttaaaatacaaatttgacatacaaacatacatgtacttgaaccggcttgttatctagaattctgcatacaaactaattcattaggcatgcataagtgtgtgtgatcataatctctcccccgcacacattttataagtcggagtctatgtatgtaaatacaattgtaataatataagttgcagactcactcaggggtatcatctgtgcaggcacatgaacatgaagtatgcaaatcttcttccctcctgagttctgaagcgcccataccaagactgatttgctctctttcacatattttcccactgcaacatatattgtatcttctgtcactctttctgtgggttccggtacaatctctccctcactactagacatcacttctgagatatcagggtaccttattcgaccaacgttttgagcaacttcagacacagaactcacggccatactatcaatagatcttgaagaactcactcaacattaatatttatatgtgcgcgtggaattttttctccaagtttctgattttctttaaaatttggaacctaaacaaaattctcactctacccaattgaagcttcttaacctcaaatacataaactagccaaaaattcaacttttactctgaactgaagaattttccccaattcgatatggaacttaattaattaacctacaaaaaccacacacactacccacttcaaatttcttttaataatgaagacccaaaaaaagcaaaaaccaaatcaaattctcactttaatgaagatttagctggtgaccaactctgccttcactctaaacctcgaattcaactcttgtccctgtctctacctctgtgttatcactctcacttctccagtctcttctttgtctctcgcagtataagatgaaacctagagaatataatgatcgatgaagaaaatcagagaaataaaatgaaaaagaaattaagagaacgaaaagacaagaaattatgatttgaggtcccaatgggtttgattaggactaataggtgttgtcttgagtctgactcttgacttgtagctataataaaaattataggttatcaattagaatggaagcaggctctgataatagtaaaataaaatggtatcagctacatggatagaaatgtgtaaacaaatcagaaggtgggttccattgcattacattggtccaccatcaccatagttctctctctctctctctctactaatggccccactccacaaagtgaaaataatccgtactttgaggaagcccacaccacaccaacttaactgactatttttttttagtccatttttgtgtcagaaagtatatttaattatttaaaaaaaaaaaattcgtataattacaagtaaatttttaaaaaatttacaaggtcaaaaataaatttaaaattttttgaaggcccgtaataaattaaaatatgaaaatttttatttttgatgttgtaaattacttaaaattttttaaaaatttataaatatgatactgtaactagaacgaataccgttataaaaaaaataataaaaatattctgatatgaaattttaaacgtaaaaatagattaaaagattgtaataaaaagttatactcttttgagtaagtcatatttaggtagattcttatttattttggaaggataattttggcttaaattataaatatttagtaaactttgtaaatttctaaaagtttatatatcaaaaataatattttatttcacacataattttctttataatccataataaataactgtttgaacttaataaaaaatttagccaactacaatataattattgaatacattttttgaacataatttaattaaacatataggccattatatattttaactatattatatatgtggcttattgtgcgaaaaaatcaaacagaattcaaccaataagatatacatttgcaacatgaaggttataataattctgggaattttttacacaatatttgaagcaaaactctacaaaaattagttcccaacaaaacacttatttatcctttttataaactttaaaatctgtttgatgtttttcttttctaaaaaaattaaacaaataataaaattaaaaaaaaaaaaaactatttgatgtttcgcattttcttagtgatattatattacatgcgcgctacataataataaactggaaattaaattcgtgtttatagtgacatatatagttctaat

SEQ ID NO: 17476 - DNA, 11194 bp, Cannabis sativa
  modified_base (483)..(483): a, c, t, g, unknown or other
aaaaaaaaaagtatagatttgtaaacacaaaaaaaaaataaaaaaaaataaaataaagaagaacgtgaagaagaagatgaacagaggagagagatgaagagcttaaggatgaagatgatgatgaaaaaaaatataagaaaaataaaatgatgaagtgccaaatgaaggtaacgtgtgattgataagggaaaaaaaacgtgcatgaagtaacaagtttatataaaagaaattaaaaaaaaaaatcagtataaaagttatatgtagttatgtacacagtataaatgttatttataccggtgtacaataaaaatataacatttggcaaaaatacagtataagatgtaaattttcctagtttttatataaaaaaaaatgtacattctagaacatgtgtggccatgtataatgttttgggcgcacaaaaagttctattatcatttgtcgtttttctagctcagatattttatttatttttatatatanatatttatatatataaatataaagaaagaaaaaaatgggtcttatatggtctttgtatagtggcccaagcggcctaatgtttaggccaaccttgatgatagcgtatatatttctttttttttaaaaaaataataatttaccatgttgaaataaaagctcaatagctgcttacaatgtgaaaaacaatcacatgtgcaataaaatatttaacttttatttttattatcttaaactatttagaattttataaaaaattataaataattttagataacgacaacgtacacaattatggaaaaaaaattgactaaaaaaatctcctaaatatcaaaacaaaaaacaatgtaccgcaatgacttttttaaagtgtgtattataaaaatcaacacatcaggttgaattcctagagcgaaatttgcatatgagtgacaaaaaccaacacaccacgttgaatgccaacctaggggatgggctcaattcttggccgttcaggattccagttttctcctcgaatttacccttatcttcattattttttatgacggaaaaattgcttggaacacttttcaaaaaaactccttggaaaagacccatgttgataaatatgttaacttgggcgtaggggcctagcaccaggtcaacctgggcgctgggtccccttttttgcccccaaatggctatgtttgactctcgtgagaacttgtatcttaatttttgatgaaaactaagaatatgctcagagtactttgttggaattaatgatggaagttgcctagattgacaaaatgtcaacctaggtgctgggtgcctagtgccaggtcaacctagacgttcggtgccttgtttgccctccaggttggtctgtttgtttcctaagagcacttgtttcctcattttggatgaagacaaagaaaatgcccaaaaaaaaaatctctagtttggtgattggaggcgctccagttggtaaaatgttaacttgggtgttgggtgcacttggtccctaggcaccttatgcacttaagtgctcaagtttgaaatttcttcgaatttgattctaatgcctaaaatatgttcgtgacatgtctaattcatgtctaagtgcaaagtttgagtcatcttcactaaaacgatgccgaaaactgaaaccctagccaggttgtcaacccaggcgctgggtgaaaccctagacgcctaggttgacttctcgtggtttatttcgactcctttcaatttccaaacttcgaacttgaattcttcttgtctcccttactcagaatacaaggatggtgacttggaaataacttagcgatatccaaatatctattctagagtccccgaagtcaacttaggcacaggggggaccctttcccaagtcgattgctatgaattgagtaacttaacttcgtgaatgttttccttcgtgccacgtatcaaatattgatgtccacgtctccagatcagttttcgagttaaccattttcttactttttgctaagcaaagtgtatttttataattttaaaactttataagcgtattatagtaaataaaaataaaaattttagaccgtgaaattgtaaataaaacataaaaaaagatatttttgaaaatttttctttaaaaattattaaatttgcaaatcacagaaaaacaatggggtttctaaatctccaccaatattcttttcttttcttttctttttttttttttttaaattattttattatttgttattttaaaattgtaaaatttgattgtttaaaataatattttatggtggacaaattattttattatccatatatattacgtctaattaattaattttttttttttttttaaattgattgaaaattttcaatgattatattatgatcaaattgcatatgttataaaactcaagagagattcctaatcattactcatgggtgtattgattgcaccataaactttccactttgaaggataccaagatggattactcagctagattaggagcaagttcacattgaacttgtcttgaaccacgataaaacactgtgttttgttctttcatctttatattttgtttgttaatcgtttgctgaattgtttttacttgtgatcttgagtcagtttcactacattcatgttttctttgtttcttttttaataaagaaaggcagctcatctttcaaaataattacattagttaatattacttctcacaaatatttattttttattggtgggataatgtagaaacatgaagaagaaagacattaatgtatattgatgatttttgagtcttgaggtcaaactttttattttcatattttaattcctgcctgaagtgaacgcatacacaattatactatcttatgaaaaattataaattataaaatttaatgtaaattttttgggggagtcatgtttcccaagacctcttacacttttttaaggcttaaaatgacgtttactcacgatcctccgttgatattgtttgaactttgaagttcattaaataaagacgaacgttcttttctccttgagagcgtaaaatgtttatttcattattttacaatggattaaggtgatggttttgacttttgacaaattcttacaagctattaagctggcatcagactttgacgttcccttttgagttttgcaagttcctcttaatcaggaaaacaaaagagttttgcaagttccaagtagaagaactcttgaggtgaagtactaaaacaacttttgattctaatttggaattagattagtttaatacggacaccactttttaatagaggattttgattccccaaatccattggcaatgcttttgtatgcacttaggaacaaaacagagtacacaatcaaaagatcaaagtttatgatatgttacaatgagtaatttaaaagaaaagggtctcaaattcaattcaacgccaataaaattgatggaaaaaagataaagaaagagaagaacccttttgctatctgccatattctaatgtaacagttagttcattgtgagagtaagtttctggtttacttgaggatgaggctttgctagaagggcatcgcctaacgacgaaggctggctgtttaggggttggaagggttgcagtttcactgccaagcatgaaaactacgttagacatagtaggacgatcactcggatcttcttgaacacataagagacctaagttaaagcacttcaagtactcctcttttttgcaactttcaacaactgtttcttctatcaagttcaatgctttctcttctttccataaatgccatgcctgaaagaaagatgccattcaatataattaatgattatgaaagacgagagtaaactgtgaaggtcatgaaaagatacacacgtagcctaggagactcaatgcttgttctggctcaaaaaatcctgtgttccttttcccactgatgatctcaatcacaacaactccgaagctgaacacatcggacttgagggaaaatagtccatctaatgcatattctggagacatgtagccactgcaagaatgtgaattagtgaatttgtgatcaattttagttattggtgaagaagaggatattattgttaacttactatgttccaactactcttttcgtgtttgctgcagtttcatcaccaccgaaaatccttgccaaaccaaaatctgagattttggggttcatctcttgatctagtaaaatgttgcttgtttttaggtctctatgtataatccttaacctggaatcatagtgaagatagagaaggcctcgagcgattcccagaatgatgttgaagcgcatatcccagtctaatgacatgcacaactttcgatcttttaaggagtttatttgccattcaagaaagaacacatttagtttcattaatgataatgtagttgaaaacaatagggacatgatgtatagatactaaccaaatatgaaagagtccaagcttttgttagccatgtactcataaactaacattctttcttctccttcaatgcaataacccaaaagtctaaccagatttcgatgttgaagtttagcaattagcagaacctcattcttaaattcctcatggccttgtccagaactacttgagagtctctttactgcaatttcttgccctcctgcaagctcaccctgaatacagtccaaataaactatgtgtttaacaatatctagttgaaagtgactcataatacttaagtttcagtcacataattttattactttatagacaggtccaaatcctccttgtccaagcttattcgcattcgagaagtaagatgtggcagtgagtatgctctccaaatcgaaaaatggtacttctattccattggtatcatcctccttgtacctgcctgaatcaatattcatgcttttagctcttctgtcactgtcataccactgaagcaccccattcttgtcatagcttcctctgctacctgtatatggcatggattaaagttttgatgttgtgatataatattcatatcagcattaaattaccatatgttggcttatgctttcttgttaccttgtcttttgaccagctttcttctccaacagcagatgtaaattatagtgcttgagagagtaattacaacagcaatagttataagaataataataatgatcaaagcaaagttcatttttcctctcctaatagtcttgttgtagccatttcctgcataaattgaattaaacatgcttgttcattttattactcttgttctgttaattaccaagggaaactcaaaatttcatgtcattccaagtaaaaagctagacataaacagaatcatacctctacatttcatgttcaagttatcccatttaaattttttattgcagaggcacctattcttgccatcttgagcagtattgcaagctgaatttggccagttctcacagtccactgatgaagaacaaggtggctccaatggttgtttccaagcaatttctacttcaactccatgtttagatatcatatcagaactaaaattccccaagtttgcattgcagccccgcatcatagtaaatggcaatgactggttgagcttgagaaacttctcactaaaactgtctttacaattatcaagatcttcgagtctgataaaaaatgactgtgtattggggttaatgcttgtgactctgaaggtgccactatttgtctcgaaactaacctggccgttagaattgttgcaatgaaaactatagtacaaggggtcaccacattttgggtcaatgctaaggggataagggatcaggtttgttccgcaaacttcacaactcctggctgtcaattctgcaaaagccgaattccttgacatcagaaaaacaagaaatatgaagtgatacttcatttagtatttgcaccaatagattgtttgaaagatgtgtgacatgacaggaatttaggccatgagaaggcagaactgaatgttcactaagcaaaactgatgtcttaggctcttttggtaaactaattattttacatccattgttattatatccaaatagcccggaagttctaaaaagtcataatctcatgcaaacagaaaaaaagacacatacctatatctgtaactgctacacgaacatggagattccggccagtggcatactcctcctgaagattgttgagctcctctgaccatatccaacatgctgagctgccatggctcatctcagcttcttcaaacaagtatgcttggcactgacaattattgagacactccactttgcattcctcttcagtcttggcattgaactgagagtctggatttccaactttcatcatcttgaggtccaagaacgtgtcaatctccgaattgttttgacatgtagttgtcctcctaacacacccttttgagtaatccccagtgttcccgttttctggtgagattggcttgaaaccaggcaaacatttacaaaccaagttgttcttactattgcagctaccaaagtttccacaagcattgtatacactacatttgtctctgggttccgcccaaattggagacgaaatcatctgagaatcccacctcagatactgaatttgaccagaaacactcataactaatcttgtgttcttgtataaagatgctgtgagataaggaattgagtcatttctaactgtttttgacgtgaagttagaaagcaaataaagcatagcaggaggcatctcattgaggctaataaatctacctgaaactccactattccagtactttactgatcttttcaatataatcacctgattagttttctcttgatcttgctgaaatgtaaagttccctgatcctggatcaccataacttgtccaggaagtcaatactaaatcttcactcaacatcatccctggaagaaaagtatccgttggattttcaaaactctgccagagaacactcattgagttgtcttcagggtctatgttgctcaagaccaaattcccagaatccattagcttaaccactctattcatctgggttgaacttggaatctttgttgaccaataagtttgtccacttttatccataaccttgagatttccatcatcagaaatggccaaaactccaccagtacctgataaaggattatctctattggcaacccaaacaactgtatgtggatttgacttgtaataccatattccaatataccttctactatcatagcttccattaggagtgaagaatcccagctcaaaaacctcccctgctgaaaccagagaatcttttatctcatcactgagcaaacttttaagtgttatggtatcttcagctgagtaacacaaaaatgaattgtataataagaatgagtagaaaaagaagataagaaaaatatgattttgagaccaactacacatgattatatttgtttgcttccttcttttgcttaccataatgtgttagaatttttatgtgtccgcccaaaaaatcttcttaacctctaaagtctaatcaacagtggcacagtaaaacgttaaataattaaattttccattgagcccgctgcagggattcacaagactttcttctctgaataaaaaggcagccttgctgtttttcattatcaaagcgcccccacattctaatttatcttttacaagacgttaacatttgcttagacttaattggataatttgattcaaatgtcgtttgtggtcataaatatttcagttgacaatgacactccaaagtattgaatattatattagtgaaatgaagatttcaataatcaataaaagccaaacgaagcttgaaagtgggaataaacaaagggtcgggtcgagcatagatccgcatagacatgtttttcaaagtcactcaaccatacacgtttttaactgaaaaaaaggatagctttcatgactaaaagtaaaatatttacaatattataatcaacatacatataattagagctagctgagccaaattaaaatcacataggggttgggatttttaatgagattctagctaggccatcattgatattatcaaaactaacttaattgattcaatacgttactcagtctgaacatgtattagaaaaaataaagctaacaaaattaacattccccacatacattcagtgtattatttcaaatttatcaagtgaaaactttggcttgtatttaaatgagtccaaaacagttgtaagtttagaaaaataagtaaatatataaacatggactgctgtgcttcttgtggattggtgaaaaggcgttacattagtttgagtggtgatttattgacttaagttgaattattggtaaaagaaagttaaaggtagctggccagccatcagagtcaagcttaccagaattttgaaatctcaaatcaagatttttgaattgtggtcccttcacttagttttaaatgtttttcttaatctgctatagagggaaggaatttgacataggcttaggactttaggtggtttcttatcgtgaagcaacatctgcttcttctcatcttttttatttgtataataatttgatgaatgagatgttaaatttaaacacaaacagcattttatcattaataataataaatacaattaatattcataaatatccaaaatcagttattttatttagtacattcaataataataaacatacctcaatattgaatattctctatgagtctccttaattcaccataacttttattaagtattgagagcttttggaaaacatctcttataatctttacccccatcatccatatatatctcatattccactaaaatcacatacaaatatataaatatgctaatttaccctaaggagtaaaatttttacccctttatcatccatatatatctcatattctactaaaatcacatacacatataaaggtattagggtgctaccatgtgcctcaaatgcagttaataaactgacaatctcattatggtcctaattgcataatcgacatcatatcatgcagataattgttcacatatgctaatattgactcctaattttcaacacaaaacaagaccgcctgttgaacccaacggggccacataaaacaaaccagtgaaataaatcttggacattaaacaagtgaacttatcttaagtgagtctgacttcagagaagaccaggatttcgggattcgacttttggataagatccttcaattgtcgaattgtcgctgcattcctgaaaccacgacacgaccctcatttgagttgtggggacttttttgggcaagtccccgtagccccaaaacaaaaaacctagttgcaaaagttctccctctctcctttctcttcagtaaccttctgtgtagagcaagtcgacttcagcttgggagtgtgttcaacaatcacgaagtgattattcaaatcaaccgttaaatcaaagacgttgttctcccaattggtttggatagttgactgtcgttgtttcgtaaactcttggttttcctcttaatagggtgagccttcacgcaacaattggtagatgctttagacggtcgccccattcacctaggctttggagaaagatcttgaggattcgaagtacccgtagcattgcctgaactgtatgtgggtggtcttcctctattacgcttcgaagaagtagctcccaaggagctcggagaaaaggtcaggtccactggcagaacaggggacgactgctactcagcaacacttggtgtgggatgcgtttcttttcctgaaaaagtcaactgtttccatggcatggacttttgaggtgaaagcgaagctttcattgggccttgggccaacgagtaatccatccagggcctttcattttttgggtccgaaatcatgttccaaggatctaaagtcctcaatatccaatatgggattaaaaagtgacaattctcccatatatttttccacagtgcccataccagtaagggttttatatcccctagcccataattcctgtaaaagagatggtattaccttgccaaggagactagagtaagaattttgattcaagtgatccatcccagaagggcccaagcccacagaagtgatgttagtccctaaaggtgggacaccgagcgattaaaaaggtgagtactagcgccatcgaaacattggttagaggaactcgacaccaaagaggaagaagcttaactgttcttactcacggtggtctgtggcatctgcacgatgtcctaatgaacatctaatgatcccggtactgtccgaggactggtctcacaacctctttccttctcttgattctgctgtaagcctgaagcaatgtccctttcaggttggtcagatgatggctccgaaagtaggttattcacagaagcttttcgaatcaccagtgtggcagtatcctcaaaagggcaaacttctcccacgccagggatggaaaccatcgaaaaacaactaactttctcttcattcgtggccagcaactcctccaccacatgttcaaccatccatcgatctttttccaaggagttgacgccgtaattccttagcctcccaagagtctgcaacctttacagagttacttaatttcctttgttgtttaaaagtttggtccacagtcagcctcttctggatgatccattcttcaaaccatttaggaagattaggagcgaaaggccacctcacaggctcctcatgtttcatccaaatgccaaacatagggaaaaaagctccgttggggtccttaataaccgttggtggcttgaaacagattttttgtttatgggaaatgattccacatttaagcacaacttaggtagctttttgtatttataatgcatccaaatgtctttagtggcctctctcttcataaagaaacctgaaaaacaagggcttatcaatatcaatggttgcccaaaactgtacagttcccatgccaaaagatccactttcaaagtcgatgtatctcgggagcttatagttaggcgagacttttgctacaagctcttccaaattggatttattccagtagaaatgaggtatgccactgagcccgacccaaatgggagacttattgaacttcacctccgaatgagaaagccaagatggccatgacatgatcactagaagtgccccacaaataatccacgcacgtcgatgaagaacattccaagcatcctccttagaagcaaacataaaatgtagaataccatcatcgtcttccctccaactccaccctttgaaggaggaccaagccatcttgagtgtacccgc

SEQ ID NO: 17477 - DNA, 1981 bp, Cannabis sativa
aaaatggtaactttattaataagaagattcaaccattacaatagaaagaaaatcaggaggaacatcatcctcactaaaaatacgatctggatacaaacaagagctacggacaagacaatatgcagctttgttgacaaaataacaattttaaacttaccaaaattacaagtttgttgacaatagatttgaaagattgattgaatccctccctattttgtttttaacttgtgaaagaaaaagcatatacaatccaagtttcaataaaacaattaatatttgcacttttaacgggtgagtaatgataaagggtatcaactaccaaactaaattatttacataatgaaattcacataattccaaattttgtagttattactttaaagataattcattcatttatttatttttttatttatttattgtgtgtgaaattcaaagaataattgttaattactattagagaagagaggagagtgttgagggaggagggggggccaacaacacaatggaaagggtgatgagcaatgaagaagcccatgtgttgtgggtccctatatacattgttgttctatatgtcactctttggccaatgttgatttagggagcttggaatcttgtatacttgtatttactcacttttgtccattttctttgttcatatcttcaaatttttgtttgttcaaatcatagacatttaaagagttcaaaagttcgggtttaaatttggtacgtgtcaaaatttgagaaaataaattttaatgtctttaaattaaaattttctcataattttgtttttcttaaatatctcgtattcatgtttagagaattgaacaagttcatatgaataagaaattattttagattttgaatctctcaattatttgtaactattgaggactatgatctattaggttgagtcttggttcgcttcaagttcatattgttcttcaagtgttggttctatagtctcgagttgctctacctaagaattgtgtatattactcgagatttaaggtagtctcctcaaccaaaatttatgagttcttgacttattatgagttagtggctagggttctgagaatggttgagataacatttcccttatttggctaaagtacaattgcttgtttttgatcttttaaactaagttaatatcattttagaccatgtattttgtaaaagttaccgaatgaaccttttattttattaaataattctttccttataaaaaaaagttcaaacctattatgaagatttaatctaaaactcaaactcaataatgattagcgctattaaattttctcttgtactcttcaatattactgataaaacgatacaataattgttatgcttattgcttagggttatatgtataacaattttacatgattaagagttatattataaatcatctcttcattattttttcacatattttattaatattaaaataagttaggtagctttttaacataaaaaattaactttaaactccaaatatttgattatgctccaaaagagcaagatttgattaccaatttgcataataataaacactaaataatacccaacttgtgattagattaactaaattggcgtctccttaattatataacaagtattgatattgaaagtgtgaggtcacaactattaattaatacaagtacaaaagttatcttagtttaaaattaagcaacaaaatattatatagttatttaattacattatatgaaaatccaatatgcaagcaatatattttatttaaagcatatcaatcctatacataatctcataaattcccatttgaacatattcatttcaagtaaagagaatttcagcttcttttatacttattttcttttttccaattatgtagccaagtgggtgagattaagtaaagtgcaaaaaaaacctcctgttgtaatttaggaggtgtttgtgttggattaaaatcctatgtgggtacatatgtataatgtat

SEQ ID NO: 17478 - DNA, 4510 bp, Cannabis sativa
  modified_base (1710)..(1714): a, c, t, g, unknown or other
  modified_base (4236)..(4240): a, c, t, g, unknown or other
gcacttagtgcggattggatgttgtttgaccaaaaaagtacggattggatcgaagtacggattggatcgtacagctctattaattataaaataaatatggcatgaagtcttgtgttttattcctattttctaatgtagtactcggcctttccataattgtaagcgtgtagaacaacaatgaccatattcttataattaaaagcaagtgaaacaaagaaaatttgaaaattaatgaattaaataaagaatcatacctaagaacaatgcaaaaagaagttaaattacaaatcaagttctgggtatattaggaatggtatttaaaattaataataatatggcatattatataccatataagagttcaaaaataaaaaaaataccataaaatgtgtctaaatttaaaactgccatatttaagtaaaatatttttagaaatcctgtaattttcacattcttcaaaatctgccagatgggcccatcttcacaacccaattctctatgagcaattgagcataaaggcgggcttcaagtcaaacgggtcaaccttggcccaactctcctcctgcctaaactcccaagtccatataatttgggtggttaccttgggaagcgtgtcccctctctagagtttgaaaaagtgttaaaaagaattaacaaaaatgcataaaaaatatagaatttttgtacaaaaacactgaggaaaaatatatatttttgagagaattgattagaataacctataaatttataatccagatatttgcaattagctctggatccttatcgaattagaatagctcattgtttaactgcagaacatattttgcaaagttatagacggcagagaaaaaatattttaaatacgaagttgagtggtaaaattgtagtaaatatatatttttttttttttggtaaacatttgttaaacagtcttgtacatacatttccaaatttataaatatttattacaaatatcatatttcggtaataattttttaatatggtatttttggtaattttctccttgggaaaaatggtggtgtaataaaaaagaaagtgatgaggtgggtttgggtttgaattgaaccccatgagatgaagtcattttcattattttagaattttggtccgaggaaatgtttaatcacaaaaagtataagtaagattattatatatatagaaaagtatatgaaatgtcatatgatagcatagtttcatattagaaagaaagatacatataaacatataacagttacgattcaatgtggtgtagttgctttctcgactaagctaacacaacacttgagctttataaattcgaggtggtttcatttaggaatatagcccttgtctttcagtgcctcacacgaaagaaaatatgctctctttctctctctttttttttttttcaacttgaagtactctcccatatcaatattccatttcacatagttaattttaaggatttaattttaatttaataatcaaatgtgagaatggatattatatattacgttcattaagatttttatttaatggtgttcatctaatttaatttaaagtattttatttatagtacattcgattcggacgtggatttcatattttaaatctaattaaatttttataataattcaaattcaatctaatatgcaaaaatataaattagattgattattttgcattaattattttttaatattaaattannnnntatttattaaaaaaatatattatttttacataactaatattatatgtctcaaacaacaaattaaaacaaaaaacaacaaattcaaaaaagaaaaaagaaaaaaactatatgtatttatatataaaaatgttaaattttattttaaaccatatttttaatataaaaataagaatgaaacatatattttatctagtaagtttgaaatatatttgtattatatatatattatgtattaaatttttaaattattatttattattttaaaatagtaattgtatatataattttttaaaaaaaacatataaatatgtgtgagttagaataaatcggttacttttatttgtcaaacattcaatccgcacttgtgcagattttaaatttttcaattcaatccaattcacacaagtgcagatatctctacactttgcaaattaaattggattggatcgtgcgtattagattggtatattatgagcactatttatttttgcttttctaactttgacatttaccaaaaattgtgatcctcgaactttttaggccattaaaaattctcgttgaactattgagattgttagatttaagaaattctattaaaatttactaacgtacgtctgacgtggatgaaagttcagaaagcacaattaaacaagtatcaaagttcaagggcatgatttagtacatatcaaagtttgggggcacgatttggtacatggacaatcaccacgttagtaaaattgaaaagaattggacaaaaatctttaaattcaataatcttaataatttagaaaaaaaaaaaataagagtctaaaaaattatgtgagtataatttaatacatgttaaaattcacgttaaaaattggaattactaatcatcctatatatgaatgagatgatttactaatcccatatattattgactatgcaaatatgaaagtagttcaagttgattttttttaagttgtaatttggttatagtctttaatttcttatgttcttcatggacccaactttcattatcttgtagtagtaatcagtaaataaatgcagtgccaaagcaaaccatcctctcttgatccacttgtggcttgttccattctctgagtaaatgactctagacatatatatcactatcattctccattgcgatgctataacatgaaatttgcataataggactacttttatttctatcgttaaagacgtttttatttttggcactttaatttttttatatgattgtatatatttaaattaatttataatgtcgaaaaaagagaattcaaatcttcagttgaatacgtgtttgtttatttatttatttttttatactggcacaattaactatcttaaactctattttcattattataagttgaagtttttaaaaactagtaacatgctaactataactattatatagatcgtcatgtaaaaaaaattaaattataaaattttcaaaataacatatattcctaccgatagaaacaaattaatacctatataaagtatttttatctaaatctactagaccgttcttgcaatctttaaacgagaaaatctctttagttctgattgaaacgagttggatgggatcaggaacttgcaaaaaatgcaattttttgcaaattcctgaccgatttcccacaaccacaaagctaggatcataagtttcaatgtagcattgttcttcttctttaaatttcaaccaatgtagaggaagatatttaaaaggacaacttccgaatatttttgcttacttcacatcaagacttgatttaaatcaatcaatttcatttgggtggtatttcattttcaaaaggaattatagaatgaagatgatgatgataatgatgatgaattagtcatatcaacttcatttttattctcattccataacttcttcataacattatgatatgtatatatttggggttcagaaatgggatatgtggcacataatccacatacatattgctattggtgttctttttgattaaaagcaaagagaaagagaagataaatggaatggaatggagggcataagttgatggaactattgggcaatggatttaagacacatggacctaaaataaaaagaggtaaatttacagtacctttaacttttttgtcatatgatataattatttaaaactatttgtaaactttcaggagatttcaagtgatttccactgcaaaaataagatttaaatattttattatatgtgcgattattttctataagtaactgtttgaactttattttcgacattgtaaactattcagaattatataaaaaatttacaggtgattctaaaaaactataacatacgcaattataaaaaaattgaatgatttttttatataaataccaaaagataagaaagtctaccaaaacttttagctttttattagaaaaatgctaaagggtacccatagtgtttagtactattgtgagatgtaatatcgtaattgatagaatttaatattgggtactgcttgttttactttaataaatattnnnnnaaattattaactaattataaaacgacactttatcgtggtgctaaacacctatagcaatatttttttattatgagcattgctattataatttatacaccagtggtgtctaatacctctaaacatatcgttttgcaattagcaagtgatacttttttaaaagttattatattaaactatatgagacccgatatttaattgaaccaataataatattaacacataaaagaataaaaaatactactaatcccttttagcatttctcttttatta

SEQ ID NO: 17479 - DNA, 2389 bp, Cannabis sativa
tactattttagaaaatacagagttcattttgccatttaacaaaacagaaagtttaattggtaacttttgcaaaacacggggtctaaatttacccttatattttcttacaataaagattaatctaccttgatattggaagaaaccaagtgtataccaaactaatatgtacataacgataacagagcctttatatcaggcagtgaactgagttgcacaaattttgtgtacagttccaaacataagtaattggttttagctttctgagaattatgggcctcattttggtatgactagaaggggaggccttagactataattagttactataccatttttttttcttcaatttttcccctggatcaacaatagagagatattccattatttttcaatgtttattgcattgttaaatgttaactacatgatgtaattaatgtagttattattttcaattctatcatctgcctcatatctaagctatttttcagttatttcactagtatctttgctggaaacttcggttttcatttggttcaagtaattgataagcagagaactctgggattggctgttgataagagtaagatgtctctgttattaattatttgacacattagatatcacaaagataaagtttttatgttattcttctcttgatggaagaacaagagcagtccctaacaatagtaatatggaaacattactatgtattgttagcagtgaacctctatccttgcaacaaatatttacaaaacatatatataaatattctcagtatttaacttattgcaaaatagaaagttctgacaggttgccccatctcatattctcatttgcccaactgctaagttcattccaagtatgagtcccaccattagagcttgacctgtagctccctcttgaaatagaattactgaaacttagcattttaaggaaagagtttaatgtagaaaggggtgcaatattacttattacttaataagaaaattaaagtacagattttcactaccaaaaatggtggtaggaagtaactggtgtgtatgctgacttggtatctatattgaacaagacactcggtaagtagtatcaggaaacagtgtccaatgtccattggcagaaattagagacaaattttttaagttctgtatcttctctaaggctattcaatagtaaaaaagttcattatatttccaaaaaattattaataagcaagctattattactgcattcaactcttgtaaccagctctgcatcaccacataaatacattggacaaactttgttttgcatggattcaaatgagatggtctctattccatccttgagtactcctcatatatcttattcttcgatcctgtaatatgtattagaatatgaaagctagtttagttttctaaaattaacataaacacaaaatttatactagaaaaagagactgttctttacatgaaaaatgtgtcaaattaagtagaattcatttattactgaccttgaccagtgaccaatggatatgtgaggaatgtgagaaatcttatgccaatcttcccctctccttggttggtacctattttcaagaataggacatccactgatgaacaaagagcgtagagaagtacccatgaacacttgctctgacagaacttgcagattcttgcaactttgcagtgacaacttatgaagagatgcaacgtgttgaaaggcattgtcgttaagtttttgtaagtttggaatataactcaatgacaattcagttaaagagatgggaagcaacccctccagaaatgattcgagtacttcttcatcatcatcatcatatccaccaatgcttagtttgttgagagagcttagtccttgcagaccccattgtttgtgttgtgccaccagttgactgcaattacagagatgaagctcttttagattagatggcaatccttcttgaggaaataactttatatcttgacaatggtagatttttaatgtagtaagagatggaagaagcttttgcatgtgttgaggcaatgccgtgacatttctacaattgtaaagttccaaaacaatgagcgaacgaaggtctgaaatgccattttcttctgaaaaggtaaccgattccaagcttgaacaatcgaaaaagatcagcttcttcagacttgggaagtagtctaaagggaatgatttaaccgagtcacagtattgaattcttaactctgtaacagaaacataacaatggctccctgggaattctagtttcttgcacaacaacttgtggagacttgagtaggagcgtggttctggaaaataactgccatatatacctgaaatatggaggctttctaatgtgtaaagatcaggtaagctcccactcaagtttgggcaaccatttaagctaagc

SEQ ID NO: 17480 - DNA, 2029 bp, Cannabis sativa
ataataatttttaagaaatatcactagccactaaccaatcacgacatatcgagaaagtattaagatggtgtgcctaataacaatgctcgaccaataaatagttaatttagagcatttgcgtctccccattctccaccgatattccactattcatttctctctcttttctttgaacaatggatttcttcaagtccgtcttcgcagatgagccttcctcctcgtcggaaccttcttcccatcccgaagacgatcacaaataccgacaccaaagcgacgccgatgattccaacgacagcaacaatgcttggagctttggcggtcttatcaagaccttggccaccaaatctgagtccgtgatccacaattaccgccgcgatctcgaggagttcggctctgagttaaagaaggagacctccgtcatccgtgaagtggcctcacgcgccgtcaaggacctccctacttcatttgaagtaggcgcctctgtcgctcaggagtcgctcgagtcggttggccaagccatcgatgacatcggcactactgtctggaaatctacggccgagattatcacccacggtagggatactcttttagccgttgatgctgctgatgatgatgatgttgattctgattatgcctcagacaataatcaacaacacagaaagagcttggattcgagaccttacagtaggttcgaagcacaagtgcgttcaattcagagcagtataggtacttacttggaggaacccgaggatttggaaaattatgaggagtggaaattgagtattatgttagatgaaaagagggaagagattgataatttgatcaatgaaaatggggatattggcgtgatttatcggactattgttcctgaaaagattgagagcgagatcttttggcttaggtacttttacaaggttcataagttgaaagaagttgaggaagccagagtaaatctcgtgaggagagcgatttcaggggaagaagaggatttgagttgggattttgatgatgatgaagaagaagaagaagaagaagaaggtgaacaaaagggcaattcgagtgtgaaaatcgcagataaaggaaatgataaggtcattagtagcaattctactattgcaagtggtagtgacagtggtgataattcagaggagggtttgaaaaaagatgagaaagtaggaggagttgaactagtgtctgagagtaagactagtgatcaaagcagtgattcctgcaaagaaagtgatgtttcaattgtgtcaaaacctgaggaagaagaagatattggttgggatgagattgaagatattaggagcaacgatgagtttaaaccaatggggagctccagtagggttgatttgcagaagcggttgtgtaatgcggctgaagaagatgaagatctgagttgggatgttgaagatgatgaggatgaacccacaaaatcttgatgagtatggcatcttcaaaaggttggatctttcctttccccctagccattataattcttcattgataattctcaaatttagatgaaaaaagattatatatgtttaatatatatttcttttacttcattttaggtttagaatattcttgtttcttatgtaaatatttggctttaatactcaaaagcttttcttttttgattttttcccctttattcttatgaatgaataaaagtatgcatcgatgagattaatgttaatatttaataattgattatttgctattttggattttttgtttcatgaattattatttattacccttactaaattatattttctgaatttttttacttgtaaaaatttttccaaacctattttctcaaatattcatatatattttttttttattattttataaaatatattaataataactaaaaattaataattttttttatgtcacatgatcccatagaagttacaaattgggaaaactttatttacatcttaaaattttttaaaactttattttttatattattaattttttattttttttgtcttccaattcatattcttaaaaa

SEQ ID NO: 17481 - DNA, 3670 bp, Cannabis sativa
aaaaataacatttactaactttatttttaaaattaagatcattttcttacaaaattgtatccaaataggatacctaacacacccttatgctctttacaagtaaggaatgggcccacgttttagaataaccaatggatcgtcagcctatatgagtcaaacctcatcttcatctgcatttccgaactccaaaacccaaacccaaacccgaaaatggttgtcactctcagactaccgtctcttacctcgctcttctctccatccatctccgtccgctacccggctcttctccgtcctcaccgccagctccggcctcttccttcttccgcaagattctcagcccagagcacggcctcagagacgggcaacagagccgacagccaaaaaagccgagtccaggaccgagccgtcacgcctcgatcgaagaacttcaacgcatggtatcttgacgtcattgaatctgccgagctcgccgattatggtcctgttcgagggacaatggtcattcgtccgtacgggtatgccatttgggaagcaattcaggtgatcgaagttttacctactgttactgaacataaaatgaagtacactttccattttcttgtgattaataattccaaaattcacgtgggctatttgttttgcaggattatttgaatgcgaagttcaaagagactggtcatagtaatatgtacttcccacaagtgagtgttctctttatcccgtgttaatttaatctcatagttaatgcggctgttgcataatggcttttatttaaacttatacttacaataatgtattgtaatttgtaattttaagcatggaaacttagtgggcactagttaaatttaagttgtttgatgttttgattgtgcagtttataccatactcgtttatagagaaagaagccagccatgttgaaggttttagtccagaattagcagtagtgacaattggaggaggaaaagaacttgaagaaaagcttgtggtatgcaaacctccttattagctactgtcatttaaattattgattgcttaactgttagagatttttttttttttttttcatagtgctgttgagtagataaggtgatgtattttaattaactgagaaaactatgacctaaggtttggctttgattgttgcacttcctgaggctctggcaggttcgacctacaagtgaaacaatagtaaatcacatgtttactcagtggattcatagttaccgtgatcttcctctgatgattaaccaggttcatttttttgttatcctatttattttacttacagttttgaggaagtatggaattaaaccaacctttttcttttctttttgtatgcttcatttggtttagtgggcaaatgtcacaagatgggagatgcgcacgaaaccctttgtgaggactcttgaatttctctggcaagaggggcatactgctcatgccacaccagaagaggcagaaaaagaggtttgtgttttattgtcttgcctagctcaatagttgcagttatattcttgctttcttaatgtgtttctattgctgaaattgcaggctcttcagatgattgaggtctatataaaatttgcttatgagcagactgcaattcctgttattgcaggtcgaaaatcaaaagttgaaacatttgctggtgctgataggacatatacaattgaggctatgatgggtgatcggaaggcactacaggctggaactagccataatcttgggcagaacttttctcgtgcctttagtacacaggtatatggattataaatctggttctctagattgacttgtttctctgggtatattcatttatgatatttatcattttaagttgaaatgttttgacatttgtgcttatacagttcactgatgagaatggacaaagagaacatgtatggcagacgtcatgggctataagtactcgttttgttggtggtatcatcatgacccatggagatgatacagggttaatgcttccgccaaggattgctcctgtacaggtgaaattggaactgttgttatgtttattactgtgctagccaataatagttgagacccttaatttttagcctaaccaatttaactaagtaattttaggttagatgcaacagagaaaaataaactattctgttgtaacaatacagtttttgactattatcagatgtagtactaaccataagattcatcggttactctgtaaatttctgaattgataatttaactacgtaattgtaggttagatgcaacagagaaaaatgaaatatgatgcatcgattattctgtgtaaatttttgaattgatatttactgtttcccatgcaatgtaacatttaatttaatcttggtgctgctcatgagatgtattgccaatccaatgagatatatctggacagcattttttgtgaaggtcaagcatggcatgcgtatacagtttaacctaacatagctgtgtattggatgtttttatttaggtggtgattgtaccaatttggaagtcagacacagatagacaaggagttatcagtgctgcatcatctgtaaaagaagttctgcaaattgcaggaattagagttaaacttgatgacaccgaacaaaaaactccaggatggaaatttaatttctgggagatgaaggttggtcgtccttatccttgaaaataaccataagtcagtgttggttttgtttccttgtaagttgtaactcacattttgattaagaaaaagcaaaatgttacactgctctgtttttgtgatgcttttgttttgtacaaacgtatttcatactggtatcatcaatcacctcaaaatcagactttgctcttctagggagtccctttaaggattgaaattggtccacgtgatgtttcaagtcggagtgtggtcatatccaggcgagatgttcctggaaagcaaggaaaagttttcggaatttctatggagcctgaaatattgacggcatatgtcaaagacaaattggatgaggtccagtcatctctcttggaacgagctacatcattccgagataggtctgtccttttacactaatgtcgtattaattataaataataatgtatgattatgaggttatgaatgtgctgtttctttgggggcttatagattcaaaaattctgactgtttaaccaggtctaatggcagaatctatgacactgttttacaaaacttcagcaaacacatgttgacaatattttttttttcatggcagtaatattgttgatgttacatcctatgatgaacttaaagtggcaatatctgagggcaaatgggcgaggggtccttggtccgccaggtaaatctaatcttaactcgtactatttatgtaaaatttgatgcctttcggacgatttattctggtctgtgcttttataaagcaagtttaatgatgaaataaaaacgtgcaagtgcaatgattttaatagggaaacctttgatcatatttgatacagtgacgcagatgagttgaaagtgaaagaagaaacaggtgcaactattaggtgttttccttttgatcaacctcaaggtggtgtccaaacatgcttgatgactggtagtcccgccgaggaggttgccatttttgcaaaatcttactaaagacgttgagtcaaggctttctttacacatcaaaaatgagtatctgtttctggctgc

SEQ ID NO: 17482 - DNA, 3440 bp, Cannabis sativa
aattccgtaaaaatgcgaaaaaaaaaaactatcttgaagtgtaaaaatgaaaagacccttttaaattatgtatagaataaatatatattgtataattaactatacatagtccttaaagaaaaagaaaaaagaactatacatacttgttgaaataagattaagtggatgaaattgaattcatattttttttttccgtcaaatacataaatagtatacatcatttatacatagatttcccactggtagctattaaaatctaaaaaagaaacattacaaaaaaattactatatagttaactacaagtaagaggtgactgttatcttaatcaattacaattgtagaaatggtcaacctcttattattataatcttttagttaacttttgtgttcaaaaacacatgttggaatactttttttaaatattttttcatgatagtgtttgttatgcttgcaacatcatctttataaatttttaaaaaatttcaaatagtttacagtatcgaaaatatgtttgaaagttttttgaatgcgcgtggtaaacagtatcaagaactcaattttcggcattataaactattcataatttttataaaatttacaaagataatactgtaactataacaaatactgctatgaaaaaatttaaaaagaaatatttcggcatgtaacttttggttctaaattttgagtggagatactctatatttatataagaataaatagtttctctcaacaatgacttatacggaatatttgttttcttaaaacaaatatcccaaactataaaacgtattgcaaatattctccttacattatgttttttaaatatattttttattttgagtgttatgtttattttatttaaaccgatttgttggtataacactagtgtaatactaatctaagtacaattcaagagtttaagtgagaaatacaagtataaatacaaggacaaattctaagaatatgtgtctacattttaagaattaatttttaaaaaaaataacaaaaacacacatgaaacaattacgacaagtgaaatttagtcctgacgaaatgactaaaatagaaatcatggttaagaatttgatggggctattaaaattgctaaggtgttgtgtattgaactttggtagttaaagttagttagtaagctgtcatgatttgctgttagaagttagttatgtaacaactttatttttcttggtctgaacgtgtaatgctctgtatgtaagtgctatgttttcattcaataaagtgtaatgaacatttcactttgtactctctacttttgttatggtatcagagctacgagatccgtgagctacttgttcatcgtttcttttcttcttctttgttttgcttctctgttatccatggcgagaagaggaagcactcaaactcgaagcaatgttcaaagaacttctgacaattccaatcgattctctgcactcgagcaagatcacaaattatcccccaatactgatccatgtagcccatacttcttatccaatgattataatccatcagctactcttgtgccaaagattcttacaggaccttagaattacagttcatggaggcgttcgatgatggtggctcttctagcaaggaataaagtcaagttcattaatggtaaacttccagctcctgaggaagacgatgaagattatgatgcgtggagtcgttgcaatggattagtgatatcgtggctcctgcattcagtgtctcccacgattgctgatagcatcatgtatatggacgatgcatcatgcatctggtctgaattgtagaagcattttcatcaaaagaatgcaccaagaatttttgaggttaagcgatcgatgcagactatgacttaaggtatgaatgatgttacttcatactacactagactcaaaagactttaggattttttttttttttttgaaagaactgtgaaaagttcattgaaaaagataatttggaatcacaaagggggatccctccctacacaaaaaaccattgcagtgagcattgatcctggcccatctagccatagcatcacatgccgaattgtctactcgcttaacataaaaaacgttacataaattaaaactgttacacaaatttagaacctccaaagccaacgatttcagcttccacaaaggaggacattggcgagccaccaaagcttcgattagcaccttagcatccgaggctcccgcaaaagactggcaccccctctcagcagccaactccatggcccatttgatagccaataattccgcttcagctggcgaggaagactgcagaaattttgcaaaccaaaaagtttttccttgccttcgatccagaaggccaatcgctattcctgctctgccatctttccacgaagcatctgtcatacaaaatacatctgtggcgttatcccagccacttccgttcgtaaccgctgggcgaatcgacactctcttaatctctgtgatttcctttgtagttgccagcaaaagatactcattatatcttctcaagattgattctctaaccgtagcaatgtcaactagcttccctttaaagaggaggttatttcttgccttccatataccttcaaacaaacaccccgtgaaacataggaattgatcatttagctccattggaattcgctccagtgcccaaactaaccactcctttaccgagatttcactcccattctcacaacagatagggaatggactactgaaccataaagctcttgcgcaatgacactcccaaaaaatatgaatggccgattcacaagcaccatcacacagggggcactttttttctgtaatgaaactaagtctatctctagtaggaatgcatcccataattactctccaaatcatcactgaatgtctaaaatggatctctttcccccaaacctttttccacagcttaccatcttcgcaagagctgtctccaagattggcttcgtagcctcttttaacagtgaaccttccatcactcgcctccttccacacgatagtatcatttgtgcgaaaaggaagccgagtgatgttgccaattctagttcctagcatgtccccaaacatatcttggagaagctccatgttccaacttccatcaggattagacacatcagccaatgtagagatgaatgggaaccggggctgcactctgttcataagatcagtaaattcctcataggacagccatggaatccatggttgcttccagatatccaccgaatcaccttttcccactagagtcatactacctttgcagataatatctctagtattcaaaatacccctccaaaaggctgagtctctgtcccgagttttaacactccaaaatgattcttttctgcaatatttgttggagaaacaagtcacccacggtctgtcctccttggagacaaattgccaagccagcttcgctaagagtgccttattcat

SEQ ID NO: 17483 - DNA, 7286 bp, Cannabis sativa
  modified_base (33)..(47): a, c, t, g, unknown or other
  modified_base (7228)..(7245): a, c, t, g, unknown or other
agaagttcaattttaggttgttaaatcaacatnnnnnnnnnnnnnnntaagttcctggtaaaatatatttccaacatataactacttgattcaatactttttaaaccttcatttagccttttttccagaagcagagccattagacctcgaactattccacccccagtctaacaaaagcttcgacattcaagctgactacgatcacataatcgactaggtcaaacactattggatgaatttccacaaaaacctctcattccccactcaaataccaagtaagtatcctgaggatttgttgaatatttgctattttatatttaggatagaaatgcttaactcaagctaggtataggatgtctagtttgtttgagtggtgaaatatttcctgtaaagtttcatttctagagtaggattatgtagaaattttttgtgctatggaagtgttgattctgtgtggatagttagggtatggtcgtctgtattccgtagacacttgcatgttactaggattttagaattaggggttgaaccaggcctgacaaacttttgaatgaacactaggaaagtttattttttcatacctatttggagtgattaggacttcgaatggctttaatttcttgaatttttctttagactttgttctggtaattttccttgggttactgatctattgttccaggttatttggtgaaggtaggcttctgggagtgattggtctgataggaacctctccatgtaatcttaggggaggccttcgccgatgcccattttgtcatttggatagtgggtgtctaattgcttggctcttcctttcctttcatttttctagtgatggatttgaaccaagagttccatctttaagcggttgaaattaaagaaaacacaacaatttcccctattgaaggaatagtgactcagggaactcaggaggaagttcctataggggaacttcacttggatgtcgctcttaaaaatattccggaggccactctatccgagacatgcataaggtccaaagggaaagggaaggcaaaaatcttgcctcctgcttaaaaattcaacaactctatttaggagatggaccagaaggaaaactgcttctgttcatgcaggatactagaaacgtatgccactgaagctgaactacgcaacataccaaaactgatgtggcataggttggctatcgcggaggaatcaacatctgtgagcacggactgattcattgcatggagctagtcccatatctcaagcggagcacacctcaccctgagggcttacttcacagagtttattgtgccaattgggattgctctatttcgactgatacctctagcttataagctcttagctggatggtacatttttttgtaagattcataagtttgaggtggtgtgaagcctcaaccaatgagaaccaactgtaagaaattaggattctacaaactcgagaggtattctggtgctcactgccccaccagctacactaaatgttcccctgatctcaaaaagtattagttcttctccactagtttcccagtaaagatggcacctgctctccaccgcaatttctagatcctaggtaaacactcttacacttgcaattttgatcttctcctttcaaaatttcctctgtctcagttaaagtgttgattgggcttccatatgtcttcgtgtattttgatagaccttgtacctcagagtgctaaaaatgaggaactggcaaataaattattccagtacaaggctttcaccgaagcccaattaaaagtcgagggattggtcaccaaaaaattgatttgtaaacatgagttgattgcttgtttccaaagcatttacaatgtcagcaacaggggccaaagtcaggcttcaaaagaggccaatgagatcatagccaatgacttggccaaaattattatagatgcaactaaggaggacaagctcctacaagctagttggatgcttcgccacccaaatcccttaatagaagcagaggagatcttgcagagatatgttgtagcgtacccgaatgaaggtgctctgagagttagcactttgggaagaggtaataggcccttctacgtagtccgtacccccaacttccatcccatatcctggatggatcaagggggattcgataattacttcttgaatttagaccacactatgtacctcattagtgacttcataaatagagtagatgagatcattaggattcctagcaatccagagttgtctctagataccattagggtgaatcttttacaaccatgtctttcccacatttcagagaatatggcagcttcattggctgggatgacatggtcctttttgctcgtggaaaaccttatagttgttcactaaatggtttgcacactttttagaacatgttgctgtatgctaattatgattctgattttgctgctgagagctggcttgctattcatttggttgttgtgtttgcagatactcttgaagaaaagatgtctttaagcgaaaagatcatgaggagcctttccaagatggaaggctttagaggaaaagggaaagacaaggtcagggctcacaggtcccacaaattgaggaatttatctatttcttcctcattagatgtctgggaagttcctcctcctgcaaaggtgaacaccaaaaattccatttcccaagctcccgccagggtagaaaaactcctaccgccactagagaggctttgaaggaattgaatgtgtccgggagtggcaaaatccatacaagccatctcgaaccactagcccatgtttaggctttgccaaaatgagttggggaggggaccgtccaggaggacttggtgggcatcaatgctttcgatgagagtctaaacggacttgtcttccactggaaggacatttttgcgactcccatgtgcaagactccaccccaacattcgatagggacactaaaaaagccaagtttactgcggacatgcatagctcgcccagaggagaggggatatctgcagatccaccactccacccccaaatccatcatcatcaaacacaactaaccaataatagcaacaaaaccaacataaacaccaacaactgcaacaagattaataacaacaataacaacaacaacaataaaaacaacaacaacaacaataacaataagaacaacaacaacaacaacaccaccactaacaacaacaacaaccatcaaaacatcaaccatcacaggaacacctttagtcagcagccatcactccttcgaggggcctacattctgcttctagccaaccacttggacttgtcagttgcttgcccagtattccaccttcgagtttcaaggaggagaggcagacaaaattttgaggaagcatcattagaatgaaaggattattctccaaaagagggctaacaacctttcagcagtgaaaagggctgagatctctgagggcattcacaaaacgttcaaggagggccaatgataaacactgagcccctggagaggtgaatggtgcccaaggttgggagagaagtagctccttttactgcaaagctcttggatcaagtggcaggcagtgcgattgaactgacctcatatttactttggctcaggcttcaaaacataaagtcataggggtaagttttgacttctttgtctttgcttttgttgttgtgtattgctttctcacgttatttagtttcaccaaatggccttgattgcgaagaaggctttaaatgaagtaggggccctgattatagagcttgagcaagccagcaccaggatccaaactttgcataataacaatagggccctacttgctgagcttgagaagaccatagcgaggtcagtccgatgcactacaaactatatgaagaatataaggccaaagctgaccaagacaatcaggtagagttggacctgcttaagtctcaagtgtcatctcttcaaagcaatcttctccgagtgacaagggaaagagacagcaaggacgctcgattggtgatccaaggtgatgatttgaagaccacactttaagaggtcaacaatttgcaaaataagatcaatgagaaagattaggtgatcaaaggtgcactaggcgatgttgaaggcctaaagaacaagcttaaggttttaaagaaggaaaaagacttgctgaatgtcaaatataatcaataaaatatagtcctgcagggtatccacataaccaataatacttgcaatgacactataaagaagctacatagggaaggtgctcaccaaccagccaatggtgggaagacttttatagccttgacagccatgtaaaaggctagggagaacattctgcaatctatctaggatgttgtcaaggtggaggctaaggttgaaaggctccgtctttgatccatggagatgtcatattctctacttcttcacagtctatggaagaaagacccttccattctcaagaatcttgcaacagatgaggattaatacactcggagggtgcttgccattgatgacgacacttatcttgagaaatatgacctccatggtgatggtgatgagtctagcgagaaattatctggagaattagagcccaaactttctgctaaagtggtggtttcttcaaggaatgatgcccaggacctccaggacccttctaaggacaaacccaaagaccttttggcttcaacccaagatgcacctatagctcatacctaggaccaaacccaagagtcatcctcaatgctagcctaagatcaaactcaagaccaagtccaggagtagctctaccttgaaactttcttttttcctttttattactttaaacctttcttttgcagagacaatttaactataccttaaccacgaggccctatctaatagactagaaaactgctgctttggtttatgtatgtttgtttttcttgccatgcttgcttttgctttattccttctgctattacttgttcacttaggccatttgataaattgcgttaggatttttttgaagcttttggttccaacgaccaaagcttgatgcccttagactttccaactttgaagccccttatttatgaaaactaaaaaattcttctctttggatgtcaaccttttcaaagtcctcgttgatgggacttgtaaactttagtgagttaatcttactcggaggaagtgtaagctttttcccaaatcaccatatgagtcacggagcatgactcctgtctacgtgcttcccaattagccgccttaagcaaattactgtaccaattttcgttaattaaatttagtgagggaagggggccaagtgtgtaacagaatccaggcgaagttccttacggggagacaaggctggatgcatattaacacttaggtcatgcttcctcaatcgaaagtaacaaagccagcttagcatcagataagtttttcccaaatatgtgataagagagcttctagaaatacaaaggacttcaggcatgcttctttttctcactccttgtaggaaacctattgacacagtcaccagactgaatcgactacaatagaattcaggcaatgttcccttttcagggaaaaggcaaaaagcgtattggttgtgctttttatgggaataaagttgaatgtacaatagacttcaagcaatacctccttccaagaagaggggttaaagatgtattgaaatttaagaaatattcccactcaagactaaaggtgaaaaccaagttgaacatgtaatagacttcaagcaatacgtccttccaagaaggggggctgaagacgtataaaaattcaagtaatattttcaactagtagtttaaaattttaaaaataagatacaagggagaaattaaatgcaaataaagattaaatacaagatataagtgagcgctgtatgctttttagggcacatagctaagtatggtacctcaagtgagctaggaagtttggatgtcttcaaattcttggtcacttgtttaaagcttgtgtaggagaaaaaaagtgtgaattcatgtgtaaattttttctatttttatttcattgtacctgaagaattatatcaagagaaagaattacatataactttgaggaatgtttagatctagacacccccagcctattggtagtaacatcacaaattttttgcattccaggcacgagggatctctgatctgtccattctctttagttgaaatgttctatttcccactttatgttgtatctcgttggttctttcccaattaggtcctaagacccccactcccggttcttgtaaagttgggaaaactctcctcaagacaagatgtccaacatcaaatgtatgactcttgactttagaattgaagtgcatggtaatcttgccttggtacaatttgagttgagcttgtgactgttcctagagctctttaattaaatctaatgattcttggagtaaagagtggttttgagctgggtcgtaagtgtcttgtttgtgagagggaattatggtttctactgggatgaccgcttcacacccataagtcatcgaatatggtgtgttccctattaaaattctctcagtggttctgtatgcttaaaggacttgcagaagttcctcctgccaatgggctttacatgcttagaaatttttttcaatgttgtcttcaggagcttctccacaactttgacttgtccatttgtctgtggtttggccacagctgaaaagctcttcacgattctgtgttggtaacaaaagttggtgaagtgatcactgtcaaactgcttctcgttatttgagacaatcttgtgtggaagtctgaagcgatgcacaatgtttttaacgatgaagtacagggccttctttgaggtaatcatgttcataggcttcgcttctacctatttaatcaagtaataaacaacaactatggcatatttgactcctcctttctcggtgaggagggatcccactaggtcaattcctcaaacagggaagggccacagactactcatgagcgtgattttagttggtggtgctcgtggaaccttggcgtatatttggcattgatcacacttttagacatactctttgcagtccttcatagtgggccaaaagtacccctaaagaaggatcttcttggaaagactcagtttggatgtatgatctccatgaacttcatggatgacatcactgattttaattccaacaatacaccttaggtatggcacagacaaccccctccgataaagcttcccatccagtaccatgttggaaattattttaccnnnnnnnnnnnnnnnnnnacaagtatgttgattaacaccataaatatgaacttctaaaa

SEQ ID NO: 17484 - DNA, 5010 bp, Cannabis sativa
atggcacacattttgctcccaaaaatatttactttctcacaggcacagctatgcaatctttccattcaactaaggtaaacactgttaaccataatgaaaactttggcctctccccttggcttgccttgagctgttatcactagttttcaatgaactatggtgccaattgtaactaacatgagtcttagaagtactctggcctaactcattagaaccaacaccagaccgagtattctggcgccaatttgactgtgaagtactctggctcgacacattgttcctagatggccagaaatttcggttgctaggttgaccaatactgttatgttgggtcaagggtgttccccatggtgttgttgctttcttccacttttcacatgaaccagatgtttgaatattctgagcttttgaataacaatcagatcttataggccttcccctaccattactagaccatccagtgccagagcttttgtacacaacatgatcatgagatacagatttttgagggttctccatggcaaaagatccattgtacccgagtttcgcccttcctcttccagctgatgatccccactttgaagagccaaaaccattgttcatatggttctgagtgtaattgttgtatctgcagatgacacactatctgttatgttcaccaacatttatatagagaatacaaacagacttgaattggagaaagacctcttgtttggcctcattccgcgatattcgtgccacatttctgtgtcctcaaggtctctttttccaatcatctacaaacacaagtgctatattatcacatattttcggttttggatcaaaatgagaacaaacaacactgcataactttaactctaatgataccttttcgggttgttttacaccatcaagtaggcgaggaacgtgtgcaccacaatcgggagggtcataatcagcacatctacaacaagaaaaaacacagttttaagaactaggcgaggcaggcgaaaatgaaaatcacattctgtttcagcttacaggacaaagtcattattgctatcttgaacttctcctttatccatgataatgtacttttggctaagccttaaaaaaccaccaatttcttcactgaaaagaatagagaaaattatgagaaaagaaccaaccacattgtcaacaataacatattaatcccaaattacaaggctatggaatgttcataacaaatacaagaacacattcacaaacaaaaattatattatttacctcaaacaagtgcctcctgtaatcccattgagctgtgtagaaaccgaaagcatgtgtgatcctaaattgtgtgtggatcgcacgagaagctggtcgcacttctgtgtgttcctgtcactttcttcaacctgaattatgcaacatagcttaagaaactagacaatcataccataaaatttaacatccatgtttcatgtcaaatgtactttcataccccgagatccttcactaacttcatcgtttcacaaagaagtcggctttcatcaatcaatggaagcttacaaacaccctaatggaaagaacatgagagtaaaacattgtcatgttaaaaaaatgtagtcttataaagcttcttctctactttaacaaaaaggaattagcagacctgccatgaaaatcgttttccctccacatcaatctcaaaatctacacatagaacaaaatataagctaataatttcacaaacaaaagagagcactaatagcacacactacaaaatctgaaatgttagatcataccggttggataaaaatcaataattgggctatcatcattcattagtgtctgataagcagcaggaagtgcatgagcactgcaaagaagaaaaccatgttctaaaatgtactttcacatcacataaacaaatgaagccaatgttatatgttacctccttgggggaaggacactcaatagttgatcaaaaggtttaaagggagagccttttacaaactttgctttgacttgagataaacccttgaagtctgaaacaaatggtccatagtggtagggataaaacctgatattctttcacattacactttagtatagtttccctttataaagatagataagtaaataaataatgtcttaccaagtccatgatggagtatcagagaaatagtacaaaagaacccaaattaaaccttcagtgtagtgtcttacctagaaatatatggaagatgaaattaacacaaaatatattagcacattcaatataacaaactatgtaatgtattagcatatgttataccaatgaaatatgataaaaatgcaactagacttactacttttttccttgtactttcaatctcatatgcattacatgcacaaaacttctctttataatacctctctttataaccatgagagccaagtttgacctgtaacagaaacaagtaaaacaagttctaatcattctccaaagatagaacaaaacaagaaaatatttcactacttattgaactttcaaataaagatgaaattgtactctgtcaatcagaaaatctccattcttgaacaagtcagatttccttcgaagattatctttcactgtttgcttaagctcctttgtattatttaaaatctgcatatcattgcaaaacatacataattatgattcaaaaagtataatctttaataaaaggagaaaactaataacttacttcagaataatcacaaggtttactttccaatgacacaattgcagaacctttagatgagggtgatccatcaactaccatagaattgttactttcagcattatacgaatcataatctgcctcatcatgtacctgtattgaaatctagtgaagataaggccaccaaatagttttgatcaaacaataatggtgttaaatttcagcctgaaggaactcacagcttgtaagcaaagttgtttaagctttcgctcgcgtaattctgatcttttcttgaaaattttctcttcatgtgtcccaaccaagagaatgaacttctcaactctagatagtttgataaaccccgctttcttatcctccacctgatttttgaacatatttagttcttgaaaatttattgcaaaaataaatacaactaactacattgaggttaaagttgtttacccggatcatatcaacaagatagccaccaatatttttcatctctttcttataaacagccattaacaaatcaattgcaccctgttagaagtaacaattgatatgcaatgtcaaattagagcaataaaaggatttagcataaaatataattataatgcaaagtgaatagtattagtgaacctcatggattgataaagagggtatgtgaggaagaaaatcatttccaacaaagaaacacatgaagataaagtcatctactattcgctcaatatcgaatttaaagctctcaggaggattagaaatttgcatgtcaagttccaaatactccctcaatatccaaacatgcagaaactgagaatcagatcataaaaacaattagtgagatataaaactcataaagttgaaataatataagatacccaacaagaacaatcacctgatacggtttcaatctaacaatggggtatccatgtttttcttctgagtttaatacattattatgaggaaattgtttgtaactaaaatggttctgctgattttgaacaatcacatcctgtgaaaatgtgaaaatggttctgtaaactttttcatcaacatagctaatttactactttaattatagagttattgataagttttcaaagaattgtaaatttgaacctctctcaaaattgaaaaatgaatttcatgaacagccaatgccagcataatgagatcagcatcctgcataacatcatggtaaatgtaaagagaaaacaagaacatacataacataacatgagattagaatcattaattttataccaatccgtataagcagtgacgagtgttgggattgtaagaaggaagtttacgctgttgccttatgaaagacatgattttgtgctctccttccccaggaacattagcatcagaaagaatcacctaataatgaaaaatgacagttcaagtttatcaattctgttctttttcaacttaggactatattaaatattaacatgtgtgtgatgatagttatatataccttaatgtccctccaccccaaatcactacttaatcgtaagttaatgtagtttttaagtgcttttgacaaatcttgcatgaactttgttccaggagtgataatgttagaatcagatagttcagtttcctgctttggaagtacttgtttgccttccatttcaaactgtctcctcactctaaactcttcctcttcctacaatatatatataaacaaataaatcatgttttgcaataacaaaacaaagtaaaaaaaaaattgagaggaaaacaaaaactcacagcaatttctctgtctttggccgtacgaaaacgcctagctcgttgctgattcatcttagctcttggagcaactccatctatacataacaactttgatcatgagaaaccataaagttacttcctttttagtgattcagtaaagggtaagactaaccgatggccatgtataaaagtttccgaggtctaacgatgttgaagagacgatcaatgtatttaaacatgttctcaaacacttgttcaaatgttagtggagatggaaactaaaataacataaaaaccaatagaaaagaagttaataaagggtacaaaaaagaaagtggggtaatataaaatataagatagatgtatatatacttcttgtgcatcatcatcatcatcatcttcaggatgaaaacaggggtgaataatgttattcaagtcaagataaaggttatcaaactcaatcccatttgggtttgttgagcttgtatctaagtaattgttctcccctttagcttctatggcatttgccactacttttggatacttgttcactaaccaacgataaaatgaaggcactcccatgtttctctttttacaagct

SEQ ID NO: 17485 - DNA, 6253 bp, Cannabis sativa
  modified_base (4480)..(4489): a, c, t, g, unknown or other
gcgtctgtgataggcccttcaagtatccgtttgggtatcacttgggaagtctttgagcttggatcacttcgggtcccagagtggtaataagtctttcgtgtccgagaagctgaagtaagggaaggtggaccttcgcatacctctcggtcttgacttattcccagatcagtgaaacttcttcatgacttggtttaattgaggggttttaattagtgagataatgagattatctcttccattttatgccacgtgtcacccgtccagaaatacatataacaattagattctcaaaatagaagttgtaagaatatcttttttgaaaaactttaacaagtgaatcaaagaaacttataacattaacacaagttcatgattaattatttaggattcatgccgatctactattgatcatctttatgatatgaattagatctttatagtaaccgatacttttgatatcagttattatatcttttattacttattaacttttgtaaaatatttattactataaaagactatttaattttagttaacgaaaatctacgttaacatataaatatatataaaaaaatttctttgtgttaagtgtgtgcacaacatctattgaaagatcaagattttttggagaataagcataaagctgagtgcaactagtcttagtgaaagctatgctatgtattagagatatttctgcaaagaatgatgttcttgcagcaagttctattgggaggttcaagcctggaaaaaattgtaacaccacatgaactggtagagtataaaaactttatttggcgtcgactctcatccctaatagtatagatctattctttgaaaggtgatcaaaaactagctcctaattaactcaagataatctttttatttatcgggtacgtattgatacatcttatgttctactgtggtgtggccaatgagagtcaccactatttattctttgagtgcccttttttgggtgattctattagaatccaattggtgatatatacataattcacttaataaagtgaggataatcttctcttaataaactagttttgttaaggagagttacacctaataacttttctaacatggtatcagagagggtataatttggtaatgttggatgtcgccaatgtcgatttattcataattgtttgacaatatggttcatgttgtgcgggagggaacgtattagagtccacatttactggtgatatatactcgatctatttaataaagtgagaaattctcttttaacaagccagttttgttaaggtgagttagatccaataattttcttagtagactcaaggttctttttcttggctttggcttggaacctctgtttggcatcttgattttggtggctggtgtacttggattaacagcagaaagaggagcattctcactgatatttttgcgaccatgttgttgttgctattgtgtacagtgtttgaaggaataaaaacacaattgtgtttacaataggttatcctttatagcttttatagaaattactgaagtgaagagtggagagtgttttgcaatataattaagaagctatctcaaagtgagcttaaattacataatacccttactcacatgtaattagttggttttggtctgcttgttgtatagggatgtatgttgttgtgtttggttatttgattttattttagattaaaattgaatttgtgttaaattacttgtttatatttatttggcttaagaaagttattgtaagatgtggaggtagacactcaatttgttttgtaccatatattatttttcaatatttgggggatgtgagtaatcgatctattatgtggcgccatactattatgtttttaggatgccataatattttattttggctcgaaaaatggcagttgtccgcttctgcttgacactttcttgctatttacgaattttttgtcgattactatatctcctctatgccaagtcatcatgatcacatgaaatataaggtacatatacagtactgcagtacgtatttttagagcttacatatattatacattgctatacataaaaaaaaatatacatatgatcaattatttagtataaagtgcttcaatgtatatgtcgcttgaaattatagattactttattgcttgggagagagagagaaaacgaatgagacaagcgatatgaggtcaatatattcggacagacgacagactcacgagccgagcagtgaccaacgttaaaaagagagtaatattaaacctagactcgtggttcataacaaaaacgataatataataacaacaataaattcacaaaaaaagaggaaggtcacgacataatcaaatttgtaatgatcaagatttattaattagaattagctagcataaactagaaacattaacaaacaaacgatagaatatctccttattagtaagaagtaaatctcttgatttcattacctctttggtagctacacacgatttccaaggtaaggtacaaaacaaacaccaaaaacaatattaataacgggaacattatttatacatttattctgaattttcttaattaacttttttttttcttccttacactgtcctgaaaagtaattaaccaaacaactttcactctcaagtcgattaaattaatcaactatgacgatgatgatgacgacaacgattctaagccggacactggaaacctgacggaggagtcttcccacagtcaacgaggacctgaagagcaatagggatgataatgttgatgttaagaagcttagccttaatggtggtgcagaggcaaatggccgcgtccaggtctactagaccctgaagcacaggacaacacttctccttggcactttcgccgatacctatgtgaatcaatccacccaacacgtccacgcaagccccgagctttagagtgtcgatgggacaagtctgctgtgctgggggcggaggaggacagggagtttctacaggtggactcggcttaggtactactggcgatggtgttgaaggaggtggttttacaaccggcggcggtgtcaccactggtggatttggagtgtacggaggtggttgaacgacaggaggtggctgcacgaccggaggcttaggtacgtaaggagggggtagcacgaccggtggcttggggacgtagggtggtggttttactgcaggtggtttaggggtgtagggtggaggttttacgatgggtggcttggggacgtagggtgggggtttgatgtgtggaggtttgtaaggtggtttgacgtgtggtggttttggtgtgtatggtggtttgacgtgaggagggttgggagggtgcaccactggtggttttggtacatatggtggtttgacatgaggagggtgttttggtggtttagggtggaatggtggcttcacctttggtgggtgtttgggtggaatttttggagggtattccggtggtggacagtatgagttagcaaaggcagtgagtaaggtacccaagttcagcaagaggaggaaggtggttgctacagcatacttccccatttttgctataatccactgtaccctctctggagagagagagagagagagaaaaggtagtgaaatgtttgagaaactctgtactaaaatgacctttttataggaaagcttgatagagatttttcggtaggtatggttatttggattgcatatgtgcgtggtggcaaagtgggctgctaaatcactgtattttgattattgactatattaaaaactgtaatgtacagctgttgttcaataatagtttgttccaatttatgtagtcatagatattatacgaaggaactatatatgtgatggtttagaaaatatattggatttggcagtgtgtttataataatgtaacgttaaatcttattatattaagatatgagaataattagtaagccaagagacaccactctagtatactatatattgggtgaaaccattaatcattatcatagctatcgtttaattatttaatagtttttttattgaaaaaaattataatttgaacggtgcgtttgataatatttttttgattagttttttatttttaaaattaaaaaagtaaaaataatttctaaaattatgttttataaaactatttttaatttttcaattaagaatctaaatttaaaaacaaaagtattatcaaattccatccatataatccattaattcgcttgtgccaataatactacagagagtggttatatctttcaacactggtaaataagtattatattgttattagttttaattagaatattcatggtaaaactactaaaattttattattagtaacacttaaccatattaacactacataattttttactttaaaacacaataatatttgtgactaaaagtaaaaaagttcttactaattataaatcataattcatatgttgccattaagaagttcgtggctaaaggtattagtcataaaaattacaatttgttgnnnnnnnnnntatttttagtcacaatacttgttgtgactaaaattaaaatagtgacaacttgtgtctaaatactatgttttagtcacaagtaactttttgttgtgactaattaaagtcacattaatcacaaaaaaattatgttgtcacgaaaagtagctattttttgtagtgtaaactgatttttcagtggtaaaactctcaaaatctcacttctgttagctatttatcccttccgatcaaaatgttctatgttaagttgcacagtggacataccacagtgtacatgtggtaaattttagtggaggatatattggctaaaaaaattacctgaactctatataatagtgacacttaattacataaattgattttttagtgttaaaaccctccaaacctcatttctgttagctatttacccctttcgttcaaaaaattctgttaagtgtcacagtggacatgctatagtgtactcaagtgtacacgtgacaaattttagtggggaacattagtaggtagggatgttcataaaataacaaatctaatccaatctgcacgatccaatccattcaaatccgtaaagcgcaaattggatgttgattgacatataaaaataaccactatctaattcaatctccatatatttataaaaaattatacataatgttatcattttaatgtaaaaaaatagtaatttaaaaatctaatacatataatacaaatatatttcaaaacttaatatatcaaatatatattcaattcttatatatataatttttctacatacaatttaaaacaaaattaaacatttctttatacatatatattttttttctttgaatttatcattttatttattttaatttattgttggagacataaaatagtaataatttattttattttgttgctgttattatgtgaaaagaaattatttttcataaatattaagtaatttaatattgaaagtaaccaatccaaaataatcgattcaatctgcatttttacgtattggattagattgaatttgcactattaagcagattgatattgatccaaaatataaaatccgcagttagtgcgaatctcggatgcactcagagcatgcggattggattggatgaataaccctactaacggaaaaactacctgaactctatgattagtgacacttaattaatgacataaaccgatattttggttgtaaaattctccaaacctcattttgttagctatttacccctttcggccaaaagactctgttaagtgccatggtagacatgccacagtatacacaagtatacacgtggcaaattttaattagttcacctaattttaattaattagatattttaaaatttataaaaaataattagaaatatatttttttttcttttttcttttttttttctcttttactttttcttttacgtttctctcactgtaaccctaatttccactcgcactccctctctctttcattctccttcttgcatagttccagaaagtcaccttcggccaccttcaaacgaaacgaaccccaaaactgacttcttaacctcacaaacccaatccttcaacctccctctaagcctcgagacccaactcttctttgaagtttctctttctcgccagaactgaattcgccctctcctgtaattcttcgccaataccaccgcagttgaaggagttcgctagttcatccttgagttcgtcgcaaaagaagaagaaagaagaaggaaatgagaaatccgatatcactaatcatagagttta

SEQ ID NO: 17486 - DNA, 7705 bp, Cannabis sativa
actttatgtgaaaatttaataatagaccataattatggtgatattaatttgattattaaacatgtaattgtagcttttttttaagccctttaggtccatttgttaaatatgagtcaatcatttcataaaaaacgaactggcccttttagagccagcacgagtttaacccaacacgaataatctgtacttatgagccgggctgaacttactttgaaaatatgggtcaagcccgacccctattttataaaataagtcggaccgaactcacataaaaaaaaaataggcttctataaaaacgagtcaagccagataggaagcccgaatgtacagctttacttgtaacataaattatacatacgtatatctaacaaaaattacaaatgtaattcagctattatcagaaaatacaaagctcaacatcaaatgcaagtgtagcaaataagtaaatatgtcagattttgtattaaattgaactcaaaatgtcctgtggcgctataacatttgtgaataaaatttatttgatgtaaaaaaaatttgctcaatggccatcttctacaatgttatgggcaaggcaatgatcctagactacaactcaagagtatagagaggggaaaaaacaatgtcagagaagaaaatggtagtagatgtatgtttagagagataccctgcctgctgctgcatagagccttggaaaccaaatcacaagaactttcttccatcaaaagcagccgtgtagtcgaattcgacgggacaaaaattggtttgccccatatttttcggtttgcataaggttaccaaaaaaaaaaaaaaagacccagatctgagatgtacagtaaatctgaaaaatctggatcgtatttacagagttaagagcagccatgaacaggtagattctggaacctgaggaggctgaactgtaaccaaatcatcttggacgattgttaatctcttcattaagcagtcgagtcatcaagccaatactagctgtgttttgattatcgtttagcattttatacagtgagtttagttcttctaggttagccttcttcaaaagtccctcaactatggtatccattccaataggcaagaggtgattaccagggggtactccttgatcacttccttgctcttgcattcttccactagcttctttggatctacaagcttgtggaatctgtatttgaggccgtgagtagggtcgagaatcccaatactcagaacagactcgattccgatccattgcctctatcacctattgtatttagtaaatgatcatttggttataagtattttccatagattacagagagagaaacaaagctttaaagaaggaaaaaatggttttatctcacagaaagaaaaaactcaatttctttccataatcaagacaaccatttcactcatatttatatgacaaagctcgtgaactaatcaaaattttcagcacaacaactaaataaagaaaaggggctctaaatttgaaactccaagcttccagaccagttgaagattgaaaaaaatggaaggggaaagcaaaagtatgctgtctaaaataaaggaaactcagaccaatagtaaaaatcaagtgaaaatatgcaaacaatttgaatagcctctctagaattttacctgcacgatagctggagaagtaaacccaaacatttcaaagccatcaagactcccaggaggctgtatgggaggaaggttcaatcttcccattttatgctgtctagtgatctcttgattgactctatctcttaccaattcccaacacctgacaactgaaccatggatgaacatctcacttggagaattctccaaggaaacctaaggcaatacataaagaattttctacaattagtggcacaaaattaccccaacttttgatcaacatcaaatctcttgtagaattgctacaaaatatgagacaaatatgcaggctatgaatcttagaaagtcacccccagctattatatatctactattcagaatcattttgccctaccccatgaaagaatagaatcttattttcttccctgatatgaacacataatataaaaattttaaaactcatgtccaatagatcttctgaacgccaccatagaagttttattttatcagatattgtttcattaaagggtgcaatatcaaaattcactgaaagccacaaccaactctaatatgccaggtaattcttggtgaaaaagttatcaacatagaaagcctaggagaaacagccaaaccttaaaaaatatatgcaagagataattttcagttgacacataataacataaataaaaatggcagtataactagattgtgcgaaaaaactaaaaaaaaaaaatcaaataccatgaatagaggtccatcccgcccagcatcaagcacttctgagatgtaatgacacatatttgatggatctaacacacttatgtacttaaccctgctcctaaaccctgaatcaagaagaatatgtataaatgacacattcaagagttcttatttatttaacacagtaattgcatatatttcttttcaacagagtattgatatggtcgcataccctttggaaaaatggcctggctgttacaccaggactttccagagagcacagcaccatattccagaggctcaaccatgcagttgatccttcgcactactttcgctattcgaggacctttctgacggtagtgtctgtccaaattgttttggctggatgatgcgtttccgttgaaagatcttgcaatttctgcagagcttgtcacaccatcggattttccactgctagtaggcaaagggttctgagaatgattcctcacaattgtgatgttatgagctttactttcacaaatatttgaaggagccaaaatactcccacattctgggcccaaagaacctatatctaaattcagtcggctagatttcacttggttactatttccttggggttcatccttcccctggatagagcaagatgaaaaattgctcccttttccatgaggtaatgaacagtccactttttcaacctttacaactgcatcagttactggtgtagatagttttggatcattacttaaatcacaagagttcattttcattttctcatcagcaacaatcaatccctcaaaatgttttggatgcttagtagcacaagtctctttttctctatctgaactaggcttttttacatcatcacattcatcatcactaagaagtataacaccgtcatgtttcaaaaccaaattcttcttcactgatgatttcccttcaacaaggtgtgtggcatatgacgtgtcttcttgagacagctgacaaacagaagtttttccattggatgtcaaatcaatagttacttctttctttagccgagaactactattacttggcaacgtaatttcatgtgcagaactagaaactgtggatgacaactgtgtatcttttgaaggctttgaagacaatgtggctccttttactatcttattcctatcactggaaatatggctcattacaggcattgccagtatgatctgtcgatctttaagggaaacgactgggcgctgtgaatttaatacttcaagaacagctccaccatcagaattagatttactaacctgcatgttgtccttgttgacagcagaactcaaggccagtccaagatctagtctggcccatctgtatattgcacttaattttccctccaaagcctcaactaggatatttaattcactgatgtcatagcgaaaaagaaaaaatttatcaccccaagcacagggacataactgtttcgtgtgattcaagcatgcatatttatctggtgaacaatgacaacctgctgcagagagatgcaaatcaaaaaagcaaatactgcattccctctcactgtcagcatcaaaactactctccattttcactgcttgtgaagaactgcatagaaactccctcctcattcgttccatttcaactcgtgtctattcaagaaagataaaatgtcaaaagtcaaataacttaaaagtaatacgaacatgaataccagtgtaatggaaagttgtataattaatggagttcataataaaaaaaatatgttatttcccataactatctcctttaaatattctactaaaatagtaaggtcaatccacatccactgtttgacttttaaaatcaagtccaaacaggattaacatagtgaacacgtcctggcaatttattctgttctacatacatccaaattataatagatttctgcccacacaattgggggaagcagtttgagttatagattgagccaaatctatcccttcaaattcattaaactctaccaatataacaactacctagcaacccactgttgttcagtacaatactctttgccttttgcaaaccgctaaaatatctaacaaaaaatgtatccgtataaaacttccattgccaagcaaattaatagtccaagccttgatactgaatcattacctaacaaaccaaaaaccatgaattcttttttgtaaattatcatgaccaacatatgaataagaaagtaaaataccttgagagactttgctaagatcccatccttcccacaaacatctttccatcttaagttatcagaagtgttcttctttaataagtttaactcccaatgcgctcttactgcttcccttgctgcaccaagtaataatttatcatgggaaatagaagtctttcttccctgatcagagtaaagctctattgcaatctgcccatgtggcagccagtccacaggagctacattgactgcctcagcacaattgaatccacagttaaaccctgagtggtatgctcgagggaatgttagaacaaaatctccagcattctgaacacatctgtagacaggaactccctcagatttcagaatggagggagagagctgtgtgacctgtatttatttattagaaataatgtcaggaaaggttgaagaaaagtcagggattaaaaaaagagaggcattctttcttgcttcaacattctccgttcaatataaaatcatatccctatttttctaaaataccagaacaaaggttataaaggttgcattagcttcctgttctaggtcattcgcttagtttataagatcagaggacatttggagttaattattcgagaccacgattttccaaattatgcagtaccataaataattgtcttactcaccaacttatgaagcaagtcaggttgttcttcaaaaaggtcaggcaaatgctttttcatagcctcctctagtttagaggcatctctcccagggacaccataccacatcttaggagcaccccaatgcaaatagtttaaggagtataaatggtgatcttcaacatgctgctcacgaaaaatatatatatatatatatatatataaccaaataaaaaatcagacactcttctacacataaaagagagtatgaaagccaatgtaagcaaaaaagttgcagataattagaaatttttattactattattattattattttctttaatgagtattgtaataaaaattggaaatcgcacctcgccaggcccttctctcactcattaaaaaaaaatgaaatagcaggagggaaaattcactaaggcagacaagctctccaacaataaaagaagacatgattatggaatgaaatgcaataatccactgtaatatttagtcttacccaacagaacgaggaaaagcacatgcctacatacagccaaggcaccagaactccagatatgtcactgctttcgtaagaaaggacagatccaggaagcctaggaaagttgttcaggttccaaccagatttgatatatggttgttctgaagcggaaacatcatgtttggacatcttgggaaagccactaccaaaagatccagtttctagatcagccccatataccacctaaaagagaaatcatccttagctctattaaatggttctttagtcaatggctaagcttccaattcacagaaaggaagattgttgaatgaggcaatggtggaaaatattttaaacaaaagcttaataaacatagatgatgtcaatatttgtatcaacccctatgtgatacctcaatttcttctgtaggcttctctaccattcgccaatactccccttcaatattttccacagatggttcactgtgttctttaagagtacttgagctacctccaacatcaacggcatctgcctttttgctgaagtattgactcttgaaatcatctgcatgcttttcaaatgtttcaagagtaaactctggaccaggttcaaacccaaatgtttctgcttcctgataaccagcatcaccaggtgccttattaccaggtgcgctatcagcccccattcttgagcatctcctccttttcctcttcatttgattttggtttactgacatttttctcagagaatatctattttgaagtttgtcaattttctggacacgagtagcaaattttgaatttccccaaatctttttctcctttagtggacaaggaggtttccaagaagaaggaggaacaattcgacatattccaaagggttcagctttagtgcgaatgctcgctatatatcttaaagtgtctttaaactcctaaaacacacaaaataactggctcagttatctaaattcaccaaaacattttatattcaacaaaataaaatgtgcaggtaagggtgtgagaatagtggcattttaatataaaatagtaaataattacctcttcagtcgggtagaagacaggagcatcctggatgtcgggtcttcgagcatccccaggacgccatcttgcaacaacctgttccaagtgattattgtaaaactagcaaggtgaaggatattatgtttaaggctaaaactaatcagataaatgaatataagaaatgaaccttttggcaactactacattcagcacatccacggaatacacccttggggaggtgatacctctacaaattagacaaagtatgagacattgtgttagtatcacattttggtgcaggaaatgataaatgatccaaacgctcataaataattaagaacaaaaactagtggggaaagcaaaaacaccaacttgattaatacgctcagaatcacactcatcctcgggactgtaatcatatcgcccatgatttatccatggtttacgccggacggacctggtgacctttgcagtggtatcactagcatcagtattagtttctatcttaattaaatgtggctcagaagcaccagtagaggatgaacaaccaggcatgtttttactctcttggctttcagtatcatctaccctttttaagttgaaagaagtaaatgactcaaaacctggtggaactggagggaagtcatcattgtcttctttgatgcaaactctcatgagttctgtccccattggactataaaactaaattctcaatgtttaatcaatgaatatctacaggagcacaatgacttctgttttggcatatgaacttcactttacaaacaatagttaagaagccacaagtgaaccttgcaaagcactgaacagctaagcagcctagctccaaaaagttactccagatttctgagcatagtggtgcagaaatgtgaaggaagttgttctacctgcaaggagaaaatgtaatatttaaggggacaataatgctggaaacctggaatgatggcattaccacaaaaaaggtagtttgatcgataatagttaa

SEQ ID NO: 17487 - DNA, 5307 bp, Cannabis sativa
  modified_base (5232)..(5258): a, c, t, g, unknown or other
ttttttttttttttaaatcaacaataatttacaacaatagcaaaaataaagataagaaatttctctcatctaataaaaattttgatccaacttctaaagattttgatccaactctaaagcatattttgctaaatcatgagaagcttggttaacattcttctgtacataagaaacaacaacttcaaggaaaaaaaataaaagacaacgaacatcgaatattaaattcgagaaacaagatacaacctttgatgtaaagttcaaagcatcagagacgctcaatgcatccattttaatatgtgtaatttgcaattgcttccgaaacacccaattaaggctatgaaaaagggctttagcttcaatttcatcagattgaaagcaatcttgtattggctttgaaagagcagcgatcacatgaccattatgatctcgaacaatcgcaccaatacccagtattttttatgcaaagtttaaggcaacatctatatttagtttaagccccctgttatttggaggcttccaagatgtttctcctgttatattactggtggcagttcttgttatatgcacagaagcagaaataatcacagaatgtccttttcggatgcggttagaaactgagtgaaactttttcatgtaattcatagcataagcataaatacgggcaccattagttctatttccacaatgaacaactttgtttctttccgtccatatcacccacatgacatagatgataagttcaaatttagcttaggaatgtaatgtggaaagatggactatgtaatcaccattatacatgtgttgagatttttgataattaatagtgaaatttgaattttttttaaactgactttgcttgtgaacaacagaaaatagcatgcccaattgattcttaagcattttgtgcatatcgagcaagctatcgagtcgatgacttttcttcggtgaaggattattgttgttgaaagggcattgtgcagtgctttccatgcgaaaattttaatttttaaaggtagatttatactccaaaaagcttttaatcaattcttgtggttgtccgaagagaaagattgttgttattcttctaaatttgcagtcaaatagaaacttgatttgacagtataaattctagatgtgttaccaaattaatttgtcattaaacaaatgcaaaaactttaaaaaggctatatatattatttatttgaaatagaaagctatattaggttttaaaaaaccaaattaagctaaaacttataaagggaattatatttacatcaaaaaataaaaccttaaaattaagtttaccctattttatattttaaaatattattttttataactatactctatattgcctatttgaaaaagaaagtgcaccccaagttttttttttataccaccattaactttaacagatactctaccttcacgtgtgtaaatattcatccgatttaattataactgatcgattcaattacaatacatcaaatagaattggatatccaattataatttaaatatatcaaatataaattctaaaagtctaattgaattagatcgattgttagatggaacatccaaattcgatccaataaaaatcaaactaaaccaattcaattgttatccagttatcattccattatatttataaatttttaaaatatatttacttattaagaaaatatattaagaaatataataaaatgattaatctttgatttgtgaaagatacacatcaaatatattaaaatgattcattacacagtcaatataatttctcgtgtatatttagaccatctctaatggttacatcaatttgatataaaaatatttcatgataactaatggttaccatctcttgtgtaatatagaatcttttatttttggtgtaataactctaaaaattcacaccaaatgtcccactaaataaatatattttacttgaaaaatcttgcatttaatattatttacattaataacccaaaatagacaatttatgatataattatatcatgattactggaatcacttgaggctagctcaagtggtcataaaagtacgtgtgtgttaaaggtcctggttcaagtctcaagttatgcattgttgtaatatataaaggcttaaagcaaaaaaagaaaaaaaaaaaaaatcatgactactaagggtgtatgtcaatcggtttagacagtttattcgactactagtaagaatttaatatcttaaaataattgagtaaaataaaatatttattaaaccaattaaacattacacattctttttttttttaaatgaaaaacttaactaaaatcacacctaatatttattaaatagttattttacatattaaaaataataataattaaattacttaacttttatttttatttatgttgttctttttagtttcataattagtgtgttttttttttatttaatattaatattttcgtaattgttattatatattttctactatgttagtattttaatttattttttttttatgaaaatgagcttttattgataaataaaattagacctcccggtcatattagtattttaaatcaattactatttttgtgataaattttaatttgaagactaaaatataagattaattttgaaaataaagattagaatacaaaaaaaatatatcaaattagtgcagactcaaaattgtagaatttggtaaacacaatttagtgcataatttagtgtgtgattgcatggaccagctaaatctcctgcactgttcccagatgttgatctccacgcaggaatgagaaaataacactcatgttggacagagacgacaataatagaaaagaaaaatataactttaattccactttttatatcattgcaacaaaacaccaaccactataatttgcttagtgaaaagtaaaatgaatgagaaaataacaaaatcgactgttgagtgagagacactttacaacgacaccttggattgggtttgaagcaaagtggtatgctgttcaacatacatgataatattattacagttaatgttatcaaaatttaataaattgttacagatggtatcattacttgtttgaccacaagaaatgatgaatctgacaaggtaaagttctaatttatagcttcaaatgtgaatgtatacattttttacaatcaaaaacaaactacacatacatttgttatgatagaaaatcctgagttagtactagtaaagaatccccattaaaaagatcagtctctagtaaaattaaatgctagtaagtaagcttatatataagaaagtgaactgctataattaatctatgagtatgagcacaagtaatgaaaataacacactaaattgagagtttgagacaataccagataatgcttatcttttgaaacgagttacgaaatgcaatgatccattaataaaatttctgtgacaagcagaatagtcttcactcaaaatttgccaaaaaaatccaactgaacaaccattttgaaggttgaaagatgagaacaaagtcatcaagataaatacaagttgccacaccgaaaaagggcaatagttgctgaagtgtaaacagatgaaacaaagacaacccaccaagccatgaataaacccacttctttcacaaaggcagaacaaggcagtaggctgcacatgaattggtaattatcaaaatagtgaccatcaacttgagaaaatccaacaaagagaagtatcaacattggtggtgcaaagaactgaataactacaaggcacaagtagtgattgtgcaagaaaacctttgctctactataatccaaatcaggaaccttgctagcatgcaatcgttgataccatgagagaagtgcctcatttaggtacatttgcaagttggggcgtaatgcaacaagttgcaagacacctgaaagaaccaacaaccaaattctgagtttatcaaactcagaaggcgaaaacccgatattccctgccaatctttctgcatttcgaatactatttttcgagttattattaataacaagcaactcagataagggcttgatccataatagccctgataatgtcatcaacaaatagtttgcatacaacacaaatctaccataccattcacatgtcatcactgataaattagacctaatttgatctgtcccaagccaaaacgatctggcaatcttcatggagggcatgaacaatattgtggatgtgcagctcataaaaacagcaatgaacattcttccaaacccatcaattgaaccaaaatcaaaatctaaaaccaaggaagtaaatctacaacaagtcacactccctaatatcaatcctaaaatcccaaaaacaacacataatagcttctccgagcgcctcgaagcagatttttcaaacgaaagtttagccagcaatatcagtaacttaaaaacggcaacggaacctaaaagaaccggaaccaaaatcccaaacccagattcttctgatgcactactactcaagtatacatgaagtaaaaaacaagaaatagcaacgaatgagattgtaaaagcgttacgatagtcatcggaaaagaggcgtgattgaagatgggcttcgtcgagcttgagtctgaagatctgggcattgttttcatcgaactcaaacttgtccttggacttgttcctttttctgagctcagtgttgtttttggaagtggaatcggaggtgtcgggtctccgaatagcggctttgacgccattacttaggttgtctgggtgaatgtaagtgaagagaccgtggaggaagaagatggggattttgaggaagacgagaaaaagggtgagtgagagtgagagaagggcttggagtaacaaattcttgtaggtaaggaagaattcgatcatggtgtttgtttcagtgttgggattgagattaaagcccccaaaacagagcagtttgagttgagagaaaagagaaacatgagaatgagaaacgaatgaggctatgagtccctttcttttcttctaattaaaaatatagcttttttctttttggccatcccgcaggtagaaggttttttttttctttttttttttactaagaacataaccaatttatgtaagataatattagatgtaaatattattttacatcttgtgttttgtaaaattattaattgaattttctattttgttaaatgaaaaaatagattttgtattttttaaaatgttaaaaataggattctgaactcaaattttaacaattttattttttaatannnnnnnnnnnnnnnnnnnnnnnnnnncgaacagatacagaaaatgtaactggttttatcataacatctttagatc

SEQ ID NO: 17488 - DNA, 2735 bp, Cannabis sativa
tataattatcctattttcatcataactatcatatgttgattaacaagcttttgataaaaccagccaaacttattcattcaataagggaagggggatacaacctgggtggtgacaaaaagaggttattcacttccatgatcgcaatttaattacgagtttttctagtgctttaatttgaaaagaaatttgttccacaatcaataattcattctcaagaagataagaaaattaaaaaatttgcaacacgataacatacagctgaccagccttcaatatttgtgctcttcaatatctgaacaggcctgcaagagatataatgaagtacatattaataggcagaatagcatagcttcttatattttggtatttaaagcagtcaattaagatatgttacttacatgtcagctggacatagcaacatacaatcatcccctcgcgaacttttaaatatcctccttataacacactccaaaggataattattggtaggatccacctgttcacaatttctttagactttttcaaagttcatataaagattaaaaaaaaaaaacaatattccaaaatcaccaggaagtcaaaaaaaaaaataagcataaaatcaaatttataataatagtttatgttcacacactatacatatagatgttaactttgataacccctcaattaagtgggtttaattaacgagagtcaagaaagcaactgaggttgagtctagtggctgaagttgatctgaaccgcattgacacggctaggttgttagggagtgatgttttaaggttggataaagaagaatgatctaagcaagacttcagtaaattctgttttctcatttggaggcaggcagattctcatattttcctaaacttcttctttcatcctttcttgctctgcacaaggaattctaagattttcagtaaaacagaagacttccctcaatcaaaacatgtcctatttcctgttcagcattctgtacttgtgtgctagtttttcactacacgattgggtgtctgtcagagttatacagataatgcttcacagtaagatttttttagtcaacctaccagataatagaatacattgcattggagagggaataattattttctagagcaacataaataatgactttctagtttcaccaatataaaactaaagctgaaaacaaacagttcttaaaagtattgggaaactgacaagagtagggtggataggtttgctaaatcttgtggagggagaggcagaagggctaagaactttcaaagcattcttcatcaactttagaaatacaacaacatattcttctcatttgacttctttttttccatttttcatttgtttaatttattattttctatttgctcctggttccataacttaaattgtacaagagattataacctacaacaacgtctagtttattataattattacaatttttcctagtgaaaaatattacttttgcaatataccctatatgaacttaaagccaggtgcttactgcactttaccaattcagaatacatttcctaataacaatgattccatcgagcagtacaataaacaccctatggcctattctataaacattattatattttaaataataataataataataataaagaagaaggaaagaaaatatatatatatgacatctctgttgcaccatttaacccatataatattttcaaactcaatctctcacatccctacctgctcaaatccagagaaggcctaattaaaacaaaaccacatgcaaaatctcatttcagcaagttctggtaactctttctcttcatgggcaaccttaaaggggtaagaaaaaggtttttccattcttttgagtgacagataagtgggggacgtcgaacttataaagtacaatttgatcacagtaaggaaactaacttgtcagagatgaagataaccatgttggtatccttcatgctgggctaataaacaataaccatcttgcaaattatttcctagctttgatcaatcctatagaatctacagacaaactacacgggaaagtaaaggaagaatcatgtttgtaataccattaacttctctctttgtatgagtatggttagtaaccattgtgaatttttttatggaaaggaaaacaagttattccaaccaatcatgactaaagcaaacttatcaatcaaaagttgagcataagtgaaataactcacaatggtagcgattcgcttatgggaagccattagaacctttccatggtcatccaccaagaacccagctggtggtttcggcattggcgtagcatagttacccaaagagcgagaatccgagccggaaatcgaggcctcaaccccaggcgaaacagactcagacttgacaatttcaacctcactgaagctcaacccctcggaatcgtcgatgtggtcgcgttggtcaatgggtcgcttgggctttttcttcctcttcttattggcggaagaggaatggcggttcttctcgactggaccagtttgggacttggcggcggcgcaacagagaatgggatagtggtggagttgattgatatggagtgaggaagggatagtgcgttcatggcggaaagagagggagcaagtagtgtagtagggtgtggtaggggtgacagagagagccatttctgatactcaacagtcaacactgtcggaggggtttaagtttaactgaagaataattaccatttttagactaactttttacattctttc

SEQ ID NO: 17489 - DNA, 2654 bp, Cannabis sativa
  modified_base (271)..(272): a, c, t, g, unknown or other
  modified_base (2087)..(2103): a, c, t, g, unknown or other
tttaccaacgaaatgtcctcattgatgaggaatactgacgaaaacaggggtttttaccaacgaaatttgtcctcattaatactcatttttcttgtagtgtcaaagaggccttaagctgaataaaggcgtctaatttgtcggagtgtatcaccattgagactgattgtctcacggctgtccaagctttgcactgtcagcttgataggccttctttatttggagttatcgttcaagactgcagagttattctttctcttttgtctaatgtttnnatttgtcatgttaagcgatctgctaacaaggccgtccactgtttggctcgtgactcttgttattggtctggtcataattttttggagagtaatcttcctagtactcttaaatgttttgtaattgcggatttggtttgctaataaattatccattcccattcaaaaaaaaaaatatatcttagttatgtaagagtgtgaagctaattgtatacaatacttataaaaagttatatatttaaattaaattcttcaacttctccttatatttttttttaaaatataaatattgccacatgtgatattattcatgatagtttatgaagatgtataacattgttcaataaagaaaataaaaacaaatgaatgaatgaattagaaatattaatgatacactatatccatttaataaaaataaaaaacaaaaaaaaaaaaatacaatttattatacaaagaaggttaaactaaaaaatgaataactaattatatattaatattggaaagtacatataaattatgactaaatgtctaaatgtagtttattaatttcaacaaagccattaatataattaattgcacccctcataaaatataacggggtagtttattggacagtagtgtttagcacatgtcatcgcgattagttagtaatgttctctaaaaattattacattaagtaatttataactcgatacttaattagtgagtatgtttagaagtgaaactcttgtctggatcaaacgcctgattatactctccaactctacctcaatacattcaatagttatcttcacagctaccaatctcttattagcactatgaagctccatagaatcataaatatcttcactactgtaattactcacacgtttgaacttggagttataaccaagaaaggacgacgctttagccgatttgatctggtcaagccaaggcttgtcaataagggaaaacaaagactcaacaatagagatagtggtcactctaacttctttcaacacatcaacgacaatagaaagattgtcgtttaaagatgataatgatgatggaacgagtagtacaaccttatttaatgatcccttgagagagttcaagcaattgatagtctctttcttcaatttcttcctgtaacaattgtagtctgagattttgttttcgatatcggttgttaattccccaatgcttaatcgtctcaacgtgaattgaaggtcttggagatgttctttcacaagtaaaagaacatcttttgaaacaccacacacatccaacattttcaaacatgcttctgaaacttcgtaaacccttttctgatcttgtcgtttgttataatcaaccacaactgagtatcgtaataagtcgtttgctgtgttttgtaagtttctcaatccctcaaaattcaatcgtcccatattatatatatatatacgtttctttcttttcctttttttttataatgagaacgagaaaaagggtatgaatatgtatgtatgtgtgtatatatatgtagtggtttttagaaatatagaagtagatggattgaaaggttgaaacctggtctagcttttggtgtttctacatgtaatgtttgaagcttatatataatgctgatcataatattcgtatatatatattcagatctgagatcttgatcatttagaaataaaggataaggaaaggaaggatcgtttgtagtacggacgaggataccagctaagattatgagaccatgtttgtctcgggggaaggttcgtacgtatatacgtatatatatagtcatataatatatatttaggatttgatatatcatatatatatatnnnnnnnnnnnnnnnnngagagagagagagagggggagagagaaagaattagaatcctcgtgtgtatagttgtttggatacgttatacaaaataaatatatatttataaattttgttgttgatatgtatggcgactgatacatgcacgaagaagagtgtaacagcttaattaagtaattaattgattttaaatcacctgaaacagacaagaaatttaaatgaaaatatttaagtaagggttagaaaataataaacgagagttttgtctggcagttacagctgttcatgcagggttttgttttggttgtgtgtacgacatagaatctgagattaagatttcaagatctctaataaacaaaagggctggtttgcatgcatataaataaggatagacatatggacttttattatatcaacaagttcgtgtaaggttcccatttacaaattattagggtgactattcaatggttacatttttattatttttattgtaattatatttttctttaagctgtaatagcaggttactaatagtagactttctttttttaaatttaattaattataa

SEQ ID NO: 17490 - DNA, 9575 bp, Cannabis sativa
taatatttgaattcaggatatacaattccagctggttggcttgtcatggttgttccatcggttcttcatgtgaatcctgatatatatgatgatcctctcacttttaatccatggcgatggaaggtataattagtttattagagagagcatatgataccatagactttttaattctatcgatatcattattataatatcttatttatattataataagctccacttttatcgacggcgtctatcgtatcttatcaagttttcaaaaaaaaaaatcattactacaatatatatatttttaatcataaagtttttggatagtgtatttattggatcataaaatatagtgagtcacgcaattaaaaattatatatatacatttcctttttaccattggaagacatactaggggacgtgaattctaaaaaataatattatattatgggtcatgaaatgtacctctttaatattatatatatcttgtgagtatgttatcactcaaatcgaatcagatgaattcagaacaagatccaacaagaatgaataatcaacgaactaatatgaaagtaaaagataaataaaacaaaactggataaatgaaccacaaactaggtgaatgagaacagtcataatactaaagatctttattgaataaccagtgttcaaacaccaagagattacaagcaaagctaaaagattttaagtaaaaattcctcacatgagagttataggaccaaatacatctatattctatacaaccctcctctctctcaatttctcttagctctggattttttttatctctaaagttctcaacaaacttagactaagagttagtgagttgttaaagaaaaaattaactaacataactgactcctgtctaaggggtcctcagtcataactggacaatactaggggttgagttaagcaacaattctatcttaaaccagttactaatattgaaagataacatgttctgaatgagccaggcaggctcaacaacatttttcaatgttgagtaaacttagacaatgtctaagttttggtaagctaacactttaggtgagtatattagctggattttcttcaatttggatcttcttggcttgaacatcacctctggatacaatttctctgataaaatgaaacttaatgtctatgtgcttggatctctcatgcagcattaaagcactttgattgtcacagtagacatagatttcatttgagttcagaccaaattcctttgtcaatcctttcaaccaaactacttctttgaaagactctgtagcagccatgtgttctgcttcagttgttgaaagagctaccactttctacaaatttgatttccagctaatagctccacctaggacagtgaaaaccagcccttcaaagatcttttggtatccaaattagctacataattgctatccacatacccaacaacctctccattagaccttgcatctccattaaagactaggcctaggttaatagtacatttgatgtgcctaagaatccatctaactactgtccaatggtagtcaccaggatctgccatgtatctgctaacaacacttagagcatgggccaaatctagccttatacaaaccgtggcatacgttagacttcccactagacttgtgtaaggtactttttccatgaggttcctttcttttttattattgggacattggttttgggaaaacttgaagtgagcagccagaggtgtagtcacagcttttgaactgagcaagttgaacttttctaatgccttcttcagatagcgggcttgagataacctgataaaaccattagtatttttgtcaatgtcaattcctaggatcctgtttgtcttaccaagatctttcatatcaaaccccatgctcagtttctgtttcaactcaaaaatatcatttttgtcatttcatactattaaattatcatcaacatattgaaggagataaatttttttattaaagtaaacataggggtcatatttacttttgctgaaacctattttagtaataaaatcatcaaatttgatgttctattgacctctttaggaggcacacttgatctagattcccatagctaaatccctcatgttgctccatatacatatatatcttcttctaatagaccatgtaagaatgctattttcacatccatttgatccacctttagcttgtctcttgttgctctagccaatattactctgattgaagtttgtttcaccacaggtgcaaggatttcattaaagtcagtctataattctttctttctttctgtgtgaaacctttggctacaagtctagccgtatatctttccattttaacacctgaaatcccatctttgtgcgtaaatatccatttgcaccccactggccttataccctttggctttctcaccactatccaggttttgtttttcaccaatgagtccatctcatcatccatttcccctttccatttgtagccatcaagtctattgagagtttcctgcactgtaagaggttcaacactgatttcttcttcagctacagctagagcatatccaatgaagtctgcatagcctatccttttaggagccttgatttctcttctctccctgtcccttgctaactggtagtcatttaattcactttgttgagtgtgctcatcttgaccagtatcaccagtttattcctgaacatggactggtttttcaacttcaaatcgagttgtggtttgctcttggctggtgactgtagttgccttatgtttcataggcatctcatcttctctaaaaaccacatccctactaatgatgcacttcttgaaacccttttctaaacaccatagcttgtatcccttcactccattaagatatccaatgaatatgcacttgacagctctaggctcaagcttatcttgcctgttatgtgcatatgttgtgcaattaaacacttttaagtgttcatagctgggtttctttcctatcaaaacttgttgaggagttttgatattgaaagctaccgatggacacctatttatcaaatattaggctacagaaacaacttctccccaaaattttctttcaagattggctcccgttaacatgcatctaactctttccaatagagttctattcattctctcagccactccatttttttgaggagtttttctaacggcgttatgcccaaaaatacctatattattgtagaatttaacaaatttccttgagcaaaattctagcccattgtcagttcttagtttatttactttcactccaatttgattctctgtaagaattttccaagtaatgaaactatcaagagcttgattcttagatttcaagagtattacccataccttacttgagtaatcatctataatactcatgaaataatctacttcacctaaagatggaactctagatgctcaagggagttgtagtggtgtgagcatcagtaccaaatttcactctacaatattttccataaatgcattctcaaaaaaactcaacctttccactcagtttgccactgagaactccctacttcaacagttctacaatactcttttcactgatgtggccaagccttttatgccataactgagtttgatctgcatccttactagtggccactgctatagttccaactataaccttccttgttagaaaataaaggccatttctgaattcaccctttattacaggtgtagatccatttagaaccttcatggaacaaccttcaatctgtattttgtaaccatttgttgctaggatacccacagatagtaaattccttctcaattcaggaacatacctgacatttgctattgtcctattgacatcatcatgcatattgatgcgtatagatctaatcccttgaaccttgcaggctttgttgttccccaagagaactgatccacctaaaatatcttcaaaactactaaacaaatctttgttaggacacatataaaaagaacaccctgagtttaatatccactcattaccagatttctcagttgacacaacaagaacatcagatgaatcataaccatttgacactaactccgcttctcccttttcattattaatatctttttttttgtcttaagaatgtagcattcatttttatagtgtgcctctttcttgcagtagttacagaatttacctagtttgaactttgattttgacttgtgatggctatttcctttgtgactgtgggacttcttgtgattcttgaaaattttcttatcaccttttccatgagccataaatcattcttcattgatttctcccttttcttcatatttcatctgaatctccttcgagtttagagcagcctttacctctgccatgttagagtatctttgccataaaaaataatatctacaaagtactcatatgatttaggaagagaactaaggagaagtataccttagtcttcatcttcgatcttcactccaatgtttgacatctcaagaataatccttttcatctagatattttcttaaatcatttgtgtcatccattctgagtgtatatagattcttcttcttcagaaaaaacttgttggccaaggatttcttaagatagatcgaagccaatttgttccataatccagttgttgtttcttcatgagaaatttctctcatcacttcatctcccaaactcagtagaattgcactattgtgccttactttctatgtccttcttcaaccttacttcttttgatttcaccaagttcctctgtgtttaatgcctttgaaattccctggtgtacatgaagggctctcattttgatcctctacagactgaagtcattttcaccagtgaatttatccaccttaaatcaagccgaggaaattgttggattcttgatctttcaataacttctttcttcttctcagcctcgagtcaaatagttcttaatcatagaatctaacccgagctcagataccacttgttgtgattatgttatcactcgaatcgaaccaaatgaaatcagaacaagatccaacatgaatgaataatcaacgaactaatatgaaagtaaaagataaatgaaacagaactcgataaatgaagcacaaaccagatgaaagagaacattcataatgatgaggatcttattgaataatcaatgttcaaacaccaagagattacaagcaaagctaagagatttcaatattcctcacatgagagttataggatcagatacacctatactatgcataaccctcattctcgctcttagcttctcttagctttgaaatgttttttatctctaaagttctcaatagacttagactaggagctgaatatatatacaatttaatagttagtgagttgttaaagaaaataatcaactaacataactgactcttgtttaagggttctcagtcataagtagacaatactaagaattgagttacacaacaatatatatatataagtctcatatcattttaaacaacaaattctcaattaaaaaaataacaaattctctttctccattcaaacgttcaacctataaaataaaaactaattatttgattataaaataaataattaattttaattatttaattataaaaataaataattaatactaattattaacttttttgatgcttgaggacttagggatgattactttttagaaatattttgaatgatattataaataaaaattctaaataattaatattatattagtattacaaattatatttaaaccttgttatccacataacattaatattaaaaatttccatacaaaaaacttggtatgactacaattaaaactggagtcataacttttatttatataaaaactaacttattggtataataaagaaatgtacaacaaagttagatacggtaaactttatttatgaaaatgaaaatttaaatctcatttaacttttctttttggtggtgttccattcaaacttaaatgtacctctagggaaaggaattgcatttaggaaccaagactttcatgggattcggaggaggtgttagattgtgcgtgggagctgacttcgcaaaagtacaattggccatatttattcatcatttggttttaaatctaaggtatatttttttattattatttatacttcatcgatcaataatttgaagtttattttgtattatgtactattatgacataatatttacacattttgacgtgtttttataaaaatggtaggtggtcagtagtcaaaggaggagatattgttcgcaaacctacattgacatttccaaatggcttacatattaaaatctcagaaaaaaattgtgcagttgaataaaaaaaacgatatagcataatatattaagtatatgcatgcatgcatatgtgttgtgcatatagtgtttgtagaatatgtataaagtattatgtactattttctttgggaaaaaatattaatcatgtactatcttttaaacgaataaataataaataaatgaatccttgtcaatctatattaggcaattacttattcatataatattacttaattagagcacttctagcaacttcccaactctattttttaaaatacactagtaaaactctattttttttttttattttacaacacattttacagctcttgagttatatccctcttgtagcaacattgaaaaaatatatggacatttatttctatagcattttcacatattggacatctatcttcaaaagtgattcgaaatcgaacaagtcggtctctagtctgtaatctcccccaagtagtcattcaaacaataaattggtgttttggctcacttaatctattccatataatggcattccacttctttttttcttaaagccacaattttatatacaaattacccactccatatttcatttgggctacttctctttcacttattttctcttttacgatgtctttaaccaatactagcttcttccaaaaccagctccctctgggtggagcctcatagctccaccaatccttatcttttatatacaccaagtgaatccacctaacccataagttgtctttctttaaagccatatcccacacatacctacccactgcagtaatgttccatctctctatgcacctaaaacccaaacctccttcatttttggtcttacaaatctcccccaagctatctgacttggtctagtagcctctactaaccccagccaaagaatggtcttgcatatgctatttattttttgtaaaatagacttatgaagaataattatttgagcccaataggaatgcatggatatcaatacagaatttattaaagtacacatgtcaacataggagattataacgccctaacccataagggcgccacgtgtgtgcctttataatttagtttataataatagactaacaatttaaggatgagaatgtgctttaattaaaacttttaaaaaaaatcaatttaagtataacttaaactctttttcaaaatattattggatttggggtccccttagttacaaaagaaccactaaaccagtttgttacaaaatattactacatattcaaaagattacaaaaggtagatcctgtccactgagaaccaaaagacggtgacgctgatatgtacattgttgagagacctctgactcatcgttggtccatttttcttttacctttagttgcaccacaacacacccgtgagtcacaaaaactcagcaagaaaagcacgtaaaacacaaacatcacatatagcaaaacatttttaaagacacagagcatacattgcaacatatagtttaagaagttattcaaagcgtaatcaaatgctaataaccaactatttatcttattaagataagccaaaactcaatactttataaagcatccttaaccctcgttaccaacgagtttctaatgtcactatcgttgcttaattaagcaaccgataagtaagaaaccaatcaatggtttcaaaagagagtaataactctttcttaataacagtaattaccgtatcttatttttgacatgctaagtagtacaattgactttttttacctaaagtcctaagttaggtgtgcatgctaacctgagtagaattatactcgacaatcttaggccctatgtcacaacaacgccaatcgataaaaaatcttaatcgatctcgaaccaaaacctaaactcaaaactggatgaaccactatcaataaaacacaaaatctagttgctaaaaataccctaaaacggtccaccatttcctaaaagtagactgtcattttccaagattttttttctataaaaacggtccaccatttttacagtacactgtaaaaaatggtaagccatttttcatacagaatagcccaaacttgagtttttcacacaaaatcccaccaaaacttctccaaacctattgaaactttccagaatagtttaacgacataatattaacattgatcatcattcaaaacacagaaaagcatcaaaattgcaaactcaccattgttgagtgagtttttttcttgaactcaactcacccaactcaaagcataatagccctagaatcataaaattaaagcttaaacaaccttaatttacatccaaaaacaaactctagcaaataaaaacattcacagaacctaattatcaaaagatcccatccaaaacaaaaccttagaaccctataaccttcaagaacaccaagaaaacttacctcaaggttgtacaactcctagaattgattaacttgaccaagattgagatgaaaagagcttgggttttgctggtgtcttcttaagcctaaaagagggagagagaaagagttgagtgatttcttaggtttttgatttaactcttaattatctaaactaataaaaactaactaataaatcaaatatacaacttagggtttactagattatcaaataaaacaaaataataaatcttagtaaaatgactattttatcctcaattaaacacttaagctagttgatattctaggggtattttggtcaatgctatctaccccaaatgatttgacaactcaagaatacaaaaataatccagtacaaacccaataaaactcattctattatcgtccttacatccttggccaattcatcgagttttcatggtcgctgaatccaaaaatattttaaaaatagtatatataatactcacatattccaataaaatcttcgtaattaataaattacactcaattattcacttactcagaagtcactaattatctcataattgactcgagtaagactataatcttactctaatatttatataattacatatttaataaaatatgtccaattaaatataattatatttttttgggatatcacaactatcctctccttatagaaaatttgtcctcaaaatttacctgaacaactctgggtactattcccacatctgcgactctaactctcaagttgcttcttcaaacttactatttctccatagtaccttaactagcagaatggtcttgttcggcaatactttttcttttctatgtaaaatctgaccaggttgttcctcgtatgataagtctgtctgaagctcaatgtcctcataactcagaatatg

SEQ ID NO: 17491 - DNA, 3012 bp, Cannabis sativa
ttttttcagggtgtatcaattacttggtgaatctgggacttactatggagtaagatttgggaagaagattccatgggtgacagaattcccatttgggtatatacaagatcctcagtatgtaggaagcattatgagtttattggcttgttcatcttgggtgccctttcaatacattcttctgtggacactaggatatgtgttcatgataatcatagaatcaaaggaagatcctaacactcgtgccaatccaatctcttaagctgcaacaaaacaactgtagttcaataagaataaagccatatgatatcactttttttttgtttttatgttgtatggataggctaacactttattattttcaaagtttagtttattaattacttttcttctcaaaaagctatatttatgagatattttagtcaatttctatgatggaaatcatatgtcggaatattttttttaatattttttcatttcgacaaatttttaaaaagttctaaataatttatagtataaaaaacacagtgatattttagtatatcatgttttttcaaaatattttaaatttatttttggcactgtaaactattaaaaaaatttaaaaaatttataagaatgatgttttaattataacaaataacgttatgtgctcatttataatatttggaggagaaaattataacaattaccatgtaagtattgaagaagaggacttgaacttagagatgttatgagagtaaaccaccaaaaccccttttaggtaatattggcttgacaaatgtaagtaatgaagcattgatatctgaaaatgaaaactattacagcaatttactctgttatttatataattggattgtactggtggtggtggctttctattcttgtgtacaaactaaggtggtcaaacattgcaactcaaaggagaaagaaattgttgtgtccttatactagagctaaggacatattgaagagtggaagtgcttgctttacatcttcaacattgatatctattagttttcctgtcttagatgaaactacaacacaattcttctcttcagcattgggaataaacagtttccctttctcttctgaacaaaacaatgctatactgaaaaattaaaaaataaaaggttttgagttaggatttcaataaactagacaattgatcagatgtattattgttattgttagtaccttggtttatctcttgcatttgctaattggattgctgctgtgtttgtggctattactccagctgaatcattgataagagcagccaactaaaaaggacatagccaatcaagctcaatatatttgtcttgtaaacaattcttcacaaacttttgaaaaaaaattcagataatttaagatgtttaaacaagtatttaacgaacatggtgtttgaatcgtgattctaatctaacattatacgctcatgtatagtttatctatgtactaaaaatactaaaataactaacaatttatacgcgcagttacgagtaatgatatgtgcactcaaaatattacactcagacactgttttttttaaacagtggattctaatttagataaatgcaattggttaaaaaacttggcacattactatatgttatgtttttgtgcatattttaggtacacgtatcattacaaacctgtccaggggttgtgattaatataatgctagcatcatctccaacaacatactcaacatcttccctttctttctcatgaggaataacaaaaattggtctaaattccctgtgttgaaataatgatgaaaactaatgaatcaaacataggattagacataagatgagaagaactaactaactatcatcataaagagattcaacataacaaacctcaaaccacttgttatttctgcccacacattgataggtagcaaactatcagtatcacccatagattgcattgaggcctttgaatctgatttaatgccatgaatcactacatatttccctctctgtgcacctgttttcttatatttctcttccacaacctctttcagcttccttgaaagtgaaactctaagtgggagaacttgttcccttggcacatttctaaatggtgttcccaaccaatcagccatcttatgatacctacacattataatcaaacacaccaatatgagtgattgagtttgtttacacaaatcacttactcttttcatttttacatacatgtggtaccctccatcagagagattcaaagtgtctgctttgaatgttttggagagaaacaatgaagctccggcggcattaacatccgggtaggtgtagctaactctgtctcttgctgttgtcataaacatgaaggctccatggccaaaccctgctagctttgttgataacaccatatcgtagtacctattctacaatagacaacaacaatactttgccttagaatattttgtactagttttcccccttatggaaatggacattttaaaggttgttttgtactttggttttgttttgaatgttctttgcaaaatgaccttcatcatcttaagatatttaagacaaaatgtctctaatttatgacaatgaccaacagtgaacacttacaacaattactttattttagagaaatctccatattttgatgaatcacccacaaaattgatgccccaaatgaagcttcattttacatatacaaatactacgtctccatatctaaagcaaactatttatttgaatattttttattagtttgtcactcctatcttaatatagagaagaattttgatgatttattttgaaaatgtatagagtagtgagaagctattaggaattctctaaaatagttttcttttgataatattgagcaaagtatacctttcatagttgctaacataacacaaatgtttgattgtaaaaattagaaaaaaagagaaatgctaagacaatctcaagctgccaaacaatacaaaacgtagtataatgttatcgatgtattttaatattagattctacacattttaatatatta

SEQ ID NO: 17492 - DNA, 4049 bp, Cannabis sativa
ttagtatattttattaattacaacttggaaaagatttttctttttcaacacatatgcatgcccttgtttggatagctagcaaagaaaaaacactcagaaaaaaagataataataaaaaaaattaggcaatgaattaaagaagctttcaactgctataattttcaggtacactaatataattattaattgctaatcaataagtagcaaacattattagttggtaggattagatatataaatagtaaccaacatatcacatttgttagatattgtttatatagtacaataggtcccagagatatatatacattaggatatatcgatcatgaattatacataagcttgtttagcattatcatttaattaaatatatatatatatatttgaataatataaatagtactgttcgttagaaaatgtcggcagtttgaaatagaaaatttcactaattaaaaggttttgttataactttcaaattttgtttaatttacttatttaatgccaacaagttgatcgtactacatatatttataaatgacttagctaaacacacatttgaaattttaagtcaagtccacactttaattaatttgattcatatatatatgcatatatgttgagtataatgtgtacatatatttaatcgatacttaccaagggttggtacaaattcaaaaaccattttatacacgccacttgctcaatttctagaaatacaatatacaaaaattaaatgtgtgtgtctatgtgttatgcaaattattacctatatataccagaaaatattattaattatatatatttagtatcatcatggcaaccatattattattttctcaaaataattataattactccacgatttcaaaatgtgtatatatacattggagtagagtgtagctaacactagttacataataataataactacaaccatatataataaaatcaaattattaatcatgtgaatgataaaggggatagatcgaaattgtgtaatgaaagaaaagaagaaaaaaagggtttaaagatgtgaatgattatattgatgataagatacatataaaagaagaagaagaagaaagctatgggtaagtactccaacgacttttgttgggtagtattaattagagaagggtattagggggggcaagagtgacctaacttgttatccattctttcaatggctccaaagaataataggaatgcattagagggtatagctaggaaataccacaaacgccattggtggtccactccaattccacgctttgttaggctataggcctaaaagtgtgaatcacgtgccattgttgtgccactacacatcactatgtattggtccctatagctttattgccatatgaactaaatatacatatggtctcttcttctacaatcttattcctattgatgtgtttcaagaactttatctttttcatcatttttttaaggtggaagagattatgtaggtgtattcctccaatattaatttgacttatatagggttgttgtatgtacatgtgtgtatataagttgttatattatttataaataatataatatatagattaaatatgtgtaacaaattaataaatatgtgtatgataatttatattagtatacaataggtaaaagggtatttatatagctggacacaattctcaaatgaatattctaacaaccctaattctataaggattacacaatcacaaattataacagaattgtacatgttagcaatcctggccaatcatttacgtgagttggtgcaaagtagaaggcaggggacgaccgcaaataatacatgactaatttgctattccttaacacctctcctcaaacgaaagggtgaacttttcacaccaagtttgtcaataaagaatgcaaatcgagaatgagtgaggtctttagtcaaacaatctgccacttgatcatgtgaagagatgtatctcactttaagctgcctttaatgtactttgcctctaacatagtgcatatctatttcaatatgatttgttcttgtatggaaaaatggcttagaagccaaagcacttggttgtcacaccaggtcacagaaggaacagcccgaggaaattcaattttcttgagaagagactcaatccatgatatttcagcagcaatatgtgcaagtgtcttgtactcggattcaatacttgatcttgataccacatgttgcttcttcaatgactaagataccggagtttcacctagatacacacaatggccaattattaaccttctattgtctaggtaacatgcccaatctgcatctgagaagccattgatagttagcttgttacaacaactgatgtgcaaacccagatgtttggagccttgtagatatcttagctcccgtttcatccactctagtgagtggttgttggctgctgtagaaactggctaagttcattcacagcataggcaatgttaggcctagtgtgacataggtattgtaaggtccaaattgtgcttctatagatggtagaattctgcattggttctccatccttcatcgacatgagcttccccagagtcatgggagttgagcatggcttcaagttccccatgttaactctttttaagacatcttcaatgtactttgtttggaaggtggagacccgactcatctctgaaaacttttatgctaaggaagtagtgtaatggtttcaagtcctttaatgtgaactgtgtgttcaattctaaaataaaggttttcatcttgataggttcacttcctgtaatgatgatatcgtcaacataaattagtgcaagtagaataagttttcctaatttgtaaaagaataatgaagtgtcagatttaaaatttttaaaaccccatttcagcaaggcatctttaagtttatcaaaccatgctctaggtgcttgtttcaatagagagatttgttcaatttgcacacataatcttctttgcctttctcttcaaaaccttaagctcgtaccataaacacatcctcttctaactccccattcggaaaaacattgttgatatctaatttccttatgtcctaacctctcaatgtggccaaagtgagaacaattctgacagtgacaacctttataatcggactaaaagtcttcccataaataacacttggtctttggtagaatcctttagctacaattcttgctttgtacctttgaaaggagttgtcatcaattcttttttatccaatacacccacttattacccaccagcttcatgtaactagagtatagaactaacacccatgtcttgtttcttttgagagcaataatctcacaatccaaagcattggaccaacctgaatgttgaagagctgcttccacactgtcaggttcaatattatcaagaggatgtggtacatgatttaagagaattcaagggttaaatataccatatttagctcgggtcactatgtgatgagtgatatgtgtaggtggataagtaggctgctagaaaaattcagtggctgctagagagggaatttcaagtgcatgagcttgaatatcaaactaatcaaggttgagatcagaaccattgtcatcagtggtgaggtttctttcccctccaatacctgattcaattctggatgcaggtgagtgaggttcctgtgaatgtgacaaaggaatggttggatgtgcttcatgtagtgcttgagtttcaataatagctgcagaagaaaaagagccatgatctgtaatagaagtggaaagaagagaccaggaagaggcgtgaatcacaaaaggttggggaggttaaaaattgttgaggaaaccattttcaaaaggggactccagttcattaaagacaacatcacgagagatgtaattatttcctgttggggttaggcatttgaatcttttgtgagaagtgttgtaaccaagatttacacatttaagggagtgaaattgaaacttgtgggagtggtatggcctaatacaaggaaaacatgcagaaccaaaaaccttgagaaacttgtaatcatgtttgtgttgggttttgtgccctaaataaaacccattac

SEQ ID NO: 17493 - DNA, 7494 bp, Cannabis sativa
ttttttaaaaaaaaaatttatcaaaacacaagttaatgagtatttactctattttgtgtccatatcattattttaatattgttattgctatatttttgcttatatatttgagtaatttgcggcataaatacttaagtttaactcttagttataaataaatacctaaatttaattttggcggtaataatacttaagttatatttctgtaactctgtaggtacctcaacgttaaatatcaagtcattatccacgtgttattttcttagtggtacacacaaattattttttttaaaaaaaattaaaaatttatgacttggaccaatcagggatggccacgtggcattttacttaatatttaaaaaacaggtacctacagagttctagaagtataacttaggtattattgccgcaaaaaattaaacttagttatttatttgcaaccgaaagttaaacttaaatatttataccgcaaattactctatatagtttaacaatttcgctgatatataaaatactcttgagatacaaatatacaaaatgaagtattaatatttgcggacagttattatcacaaatataatgcattagtttcacacattttttcagaaagaataaagcttctaaatttgaattctccactccaatctcacaaataaacgaacttattacataatcctattatggacaatgagaaatgctttattttatatattcttttttagaacaaacttatatgtttgaaagagaagagtgcacaaaaaagtgtaaaatagaatttggttatcacatctctttgaaaaattttgtggttattagaaaagctccgttattttcagtgtatatactatatataattaaaatatgcctttcacaaattatatatcttacacaaaaaatatataaaatgatgtgaagttgaaatgaatgaatcctccaaactgtcttattcgtgtcatataaaacaaagttgacccaaccaaaatttgttgcttcatatagaattcatcaagtcatgtacaattagaattattcatcattacgtggaattaggtgtgtatagtaaagccttatatttctttttccccacactttgacgacttttgtaaccagatctataatcttttattgccaaaataaacaagagaatagatgatcgagggatgaagtaacctgcccagcattagcatatggtttctaaacgactcatatatggacaccttttccagtttccactatatatcacactttttatcaagctcgatcttaagcatagcagggctaagcttgtacttacgaaaaatttaattttattttaaaattacacaatttttttattaattttgaaaaataccataatttttctaaataagagctaaaaaataattttttttttctattgcctattgaattttagggccagtctgctttttacaagacatttatgtgaattaatacaaatagaaatatatatgtatgtatatgtatgttaataattttgctttttgaaaatgaaactacaactaagtaggctatgaaactttttcagctaattaggtagtttgactaaggtatatgcttaataattttttttccagacgagattttatatataaaaatatgtgtgtgtctgaaactgaagctccctctgttttgattgttggttcaattttgggaaagagaatatctttagtgtttggtaacattattacccaaatctctctaactagaacccatcccacatgcaaatatctcctatgttcaattcaatagttcttatccacgattatgagatcaacttatttgtttattaatagtattggctttaaataattcccaattatgtatacacatgtcaacttagaagctcataatggcaatagcttcatatgacaattcttgacatgaacgttgaaaaacgaattgaggtaatattaccatttaatttgtgatgtgcaatctaaatatagtgtcacattagctttgagaaaataatatcaacgaacgcatatatagacaactttgttcgtgaagactacacaggtcaatttttactattggcaccatatttctattctgatatcgatcgaaagagattgaatatgcaatgaggtcccaagtggtgttgttttatttcaacattgaacttgttttcaactttcaacaaacacaagttttctcgttatggcttatatgcaaacatataaagtgcatatatttcaatgtgtatttgagaaggcacaacacacaactctaataataataaaatatatcattttcgttttttttttttttttttggtttttcttcaaagattaaacttcaaggttgtgaaacaaactatctttgattttttcttgtttgtctggacttttcaatagacgtcacgaaaggttcaaatgccatggatcattaattgttcatttaataatggaataatgcaataaaagcataactgaatgaatgaataatacactggatatagaaatcgaaacatttgacattgcttgttttaatcagaccagaatttaatgttttaacatttcaagtttggcttcagcaaattttatagctacaatagtacatcaatgttttaaatttaaaccttactctagtctagcctaataaaaagagctaaacccccaatttaaatgaagatgtttgatataacgaactccaacatttattttacatataaacttgattttggcctacggctacaggtctgactttaggatacattaaagaactctatagtttgacattagtaataataatactaaatatttatttgttaattttttttttttgaacaaaatgatgagttaatatcattttggattttatgctttgtaaaaattattaattagtaattagattcctaattttgttaaattacaaaataaatactatattttttaatataatataaataagattctaagcttaatttttgaccatttttattaatatagccaatttgaaaataattactaaaattatattaaatttgtgctagattcgtgagttaaaaatttgattattaacatataattatttgaattcacaaattctgattgtgtaaagtatttgcaaaaaaatatataaaaatattaagtatacttttataagagcaatcacaagacgatatgtctaaaggtgttagacactatgagagtccaatagcaatgctcacaaagagaaatgctaaaagataccaatagtgcctagtaccctcctatgtgtcaatatcgctattggtccaataagtatcgattctcatatgattttataataacttttagagagtcactaaccaaccaatcgtaaaatgacatgtctagagatattaaacaccgtaagtgtccgatagccatgctcgaaaacaaaatgtgcccaaatatgagctcaaataaaaacacaactagccaatttaataaatatgggttaacttgcttataaattgagaccatcccaaatgagttggatgatctcaattttgtacttttcttagaagattagattcaatagctaagcatctgaatcttgtggtttgcagaataaattcaagtactattctgaaccagattttgatcaaaataatttcgaacctagttgcttgtatgatctttctgaactcttaatgattttttttagaacccaacaaaatttatgtccagaaggcacagcagttacagatagagaaaggaacaaaataaatttcattgttgcttgttcatgttgtggtccttgtggaatagaaactatgcatatagatcagcgaagacgattatgcaaaaacattcatcaacttactgatgacataggaaaaaaagaaaatcattttggttacatttttcgtcgaactaaaattatgactgccgttactttttgtaaacctaaaacagcagggctctcatttcatctttgcacttaaacaagatttcaaccccatggtcaactgatgatatagcaagcaggacaaaaaaactataaaactgtaccacttgggaaacgccaagatgaactcttggcatcaaaatgggataaataagaagaataagaacactatacctacataaaataaaacgaagggtgtagtatcagtgagaagctgatggcagcttccaaaagttcttggttgcaacgagaatcttttccctcccgttggattcgggttctttctggtgtatggtagctgtccaccttacagcacgagctatgcgagccaccttgtcaatgacgtcgggagaatctctgaccaaaactgttccttctggacgcaacattcggtccatctccaccatcaaatccacgaggttacacctggagcaaagccaagataacagaggcaaggtaatttaaaatccgctgcttttccaaataagttaagaaattgaagctatctatttgagttacaggaaacgatgctcgaacttcttagtttgcagagctatggatagcaatggcatcttaagttcactcatttgggaacaatatacatttaaacatactaaatgagaacttatcactgcacaaatgatgatcaaatgacaaaactttacatgctttctgttgtacactgaaattcatggctaaaatataagtttaagaattagaaataccttttcttgcctgaacctggatgtttgatgagtgattcaataccagtcacatggataaaatcgtaactacgaggatatgttgagaaaggctcacacctgtcagtttgaagcatgcatcaaacttctagcaattaaaatttttttacgaaaatggaatttacacggataatattacattactacatgatcaaatagaaaggtcacaattcggagaagtatctgacagatgagagattacagcaatctaaaggactgttattctatattaaatggaaggcttcgatcaaatacaaataatagaatttataagcactccttaatacctggtagtatgtaaattgacaaccatttcaaatgtgcagagagcaggtttacgatttttatggaaatgccattggacaaatgtttttaaaaaatggtgcagtagcaatgagataattgtaaaaaaccagacaacaatggtgattaggctgtagattgcatgatagggctatttatttcaagaccactagattacatagctaaatgctttcaaatataatggacgatcaaataccacagcaagattagctagtgccagtcaacagtcaaaatgattagttgctagtgctaacaaagttaagcaaaaaattgagcacattcctaaattcaggtaatatgcattctaaaattgagcacattcttgaaggtgctgtgatttgaaattacagtgttacgataaccttataatatgcattttggccttgtaatatttttacaaaaacacaaattaaacaaaataatatgggatactttagaatcttaccaatcatggtacgctccaataaggcctctatcataaatgaccgacagagtcgagggcttgcgagcaggaacaacattcattacccacacagggtcagatttaagagctgctgcaaaacctccaaaaaatgcattcatatccatgacattgcgtactgctgaacttcccagcttcaagtttaaggaattcttatagtaagagactctcctttcccaccgctttgtgtcagcctcaaacacatcaataccatttttcatgaccatggcccttgaaggagcttttttcactctatctggccactttggaatctgtccaacagcaagttctcccttgacagaagacatcctactgacacatttctttaacttatagtacctgtagaacagttataattaaataatagtttcagccaggcaaatttcatattcgtaactgcttttccacaaattctaacaataatgtttactcgacattattgtttaagcaaacattatcaaatgtagcactatataatcaaagaaaagggagaaagtaaagaaatctgtaatccacgatcaatgatagttaccatgcatcacttggatcatctgtttccttgcacaactcaagaccaaattcattctgatttggaagacatggtcctgaagcaggttttttccaaacagcggtgtttccatccacagcaatcagttcataacacaatgctctagccacagcctggaggtctgcccattccttgtcttgattagcccactctacaggggggccagagattaccaagtatcctcccggacgaagtaatcggtctacttcaatgaaatatgttgcatctgaaaaatgcagtgtaaattttaagtactataaacaagaggtgaaaaaagtatgatttgtacttgatgaatcaaagactacaggggtgacaaagaactcactataggcagtgaaaggaataagacatcgagagcaatgaaccaaatcaaacgagaaagcaggaaatggtagccggcgagtgccaagcatggcaacaaatgcaggaactcctctttcaagggcaaattgtatctgtgatttgtgtgagtctcttggagcaaatgacatagttacaattccttcattcaaaagatacccaccaaagctggcaacctacaagaaaatttaatcttattactattcaaaagcaaaagcttaattagagtctgagataaaagaaagaggaggaaagcacctaccccacaacccatatcaagagcagtcctcagattgcctccacttatagggatgtactgtccaagcttttcaatgtattgcacagcaccatcaggaaacatagtgccaccaccagggaaaatgaagtatggaccttccagcttcatccatccttgatgacctttcctctccgcaattttattgtgtggcatgttgtcgtgccatatctgttaccatttaagataaacgattaatggaccaaaacttccctgtttctgaagtctcgcattaaaacgaatgattcctaaaatcccatggctatagattgtatgtggttaaattaaatttcaaagtttcactcaaaggtattaagagtaaattctatataaggactcattgagaagtattaagtacaaattacatattcaaatgtttacacggttataattagctcgatattaaactaaacatactcatcttggatctctggaaaaactaattacgtacccacaacataaatgctatagattacaaagaaccccaatcatgaacaaacactataccttgttgaatttattggaacaataataaaataaggaaatgaaacaaacagccaaaagtaacagagtgatggttccaaatcactgaccttgtgcaagctctcaggccactggacgggaatcttgtagccaccagggggtgggatcaagcagagtggagtgtcctcaggcaaagggcaatggcgctccctatagaagttcatctcccgactgagctggctgttgcgtctggggtcctcgcaaggcatgtggtcgacagcgtcagccgggcatgcatcgataggctgtggatgttggccca

SEQ ID NO: 17494 - DNA, 7148 bp, Cannabis sativa
  modified_base (7081)..(7083): a, c, t, g, unknown or other
tccggccagaatcagaacaattatagcaacatgccattgttctcgaacaaattacaacactatgaggaaacttcattaactgtgttaatgttttgttgcatcttttatttatttactattatctgtattagaaaaatgttatacagagcaaaataaaacaagaacaattactcaataaagttccattcccttcataaactagagaatggaaaatcaactcctttacattatgcagcctaatagccacccataacctggtcttatttcatagactatttacatggctggataacccttcaaaagaccttttatttctttccagccaaattccccccaaaaaaagctgacacagaagtagctcaaagaatctccatctccttgcctcccataataagaaatcaaagttcttcacatggagcaggaataccccaaaacaggctaaattcgtttagcaatttgtaccatctgcataacacaccccaatttggagaggttgccagaaaaggctttctctttttgaataacataatgcacattctatttccccagagcagcagcaattaaaaaacaaaatctaaatgtgggtcggattgagatttttcaaagaaaatcagcccaattcacctgctgaatggagtcatggactcatcagttcttaacaatcaaaagctgatttgcttgaaaagatttttaactgatctccccttccatatttgcaatcttcaagcatttcagtattttcacaggtcccccaaatctgtccaaaagctgaattatatctggtagttccctgttattaatattcttgaaaaactttcaggttccaagtctctgaagaaccaatatcattccgaactacaaatatcctctgagccaagccaaatattctccaaaaatctaatccaatttccattccccaccttgaaacagctcatgtgcactaactcatcatataagaggcaagaatacctttccaaggacactcataagtccatctagaacttgttttggtatcccatcatgatgcaatccatacttgctttgaattactctatggcacaatgagtgtagttctagagaaaatctccacaagcatttcataaataaagcatttcttgatcttacattcccaattcttgtgtcacctttaccatttgttctagaaaccacttctcaagagttaagtggtcactccctactaaatctccttcctcacaaaagaaacttctcatcaacctttccaacggctcaaatcattattattggagctttaaaaagagactagtgaattggaagggaagataccactgaattgattagcgttagtttacctctagataagtagcaattcttccatccttgtctctttctaaccttcttgataaccagatcctagacaacaactttctaggattgttacctaatgtcaatctgagatatttcgttggccactttcctacaacacaatcaatcttgtttgctttatgttgaagccaagctatatccatgtgcaagcgcagaaaactaccattttcatattgatgtttaagccctaaaaagcacaaaagaccttcaaaatcttaatcgacctctcaaagaacaaagtttcatcaatgtgcgcctcatgcacctcaatatgcattgcctcagaggcgtgcctcaaccccttgaatgttcaaagttccctctaggcctcctgttgatgaaacttgaataagatacagattgcagacagcccataattcatttcatctacttcctcccgaagttttgttatgtaatctcttgtttgaattatctctttcagacctcttttaatacatcataattaacacaagttttgtttcttttctagaaaaaagaaaaataaattgtccaactttaggtggaattttagattgcacttctacaatcacacctagtctttttcatgtttcttctctagttctatgtatactagaccatggaattcatctttctagacaaagcaaactaactggtgtttctttaccatttttaatttctactattatttaaagcaaatatgttgatagtgagaatctggaactaatatgcagatgaaatgaaaagctaactgtatagctatatagtgttttggtgtttattataatatcaaatcacatggcaagcccttatgtttattggaaattggaatcactactcaatgatgttttgtattcatatgctatactactttccctttgggattattaaaatatatatttatttatttttaatctgtcattttattttgttaccctctgagtacactaattggttaaattttctccatccatttttcatcatagcattaagaacatttcatatgaataactgaactgacatttagctattgatggcagactatgggtgttcagctgactgagaacaatgtcgaaaatgggttgcatcagggtcttcctaattcatcaaattatttccttagtggcatcaaacaacgattgctttcatttatatttcgaggaatatggagtgaagaaacaaatcatgctttggttggtcatttgtcctttcaatttaaatatgctttatggttcttagaaatacttcaatctttattgccttgtgtgtgcacatttgagaaatgagttttagttctactcaatcggaagttgctggttcctagatagctttagtgtggaagattctttgtcaaagataatcataataaaataccatgaatatcccagttctcgaatgaaatacccactttattttgttaaaatgacagagatatctcatttatttattcaattggatcaaaagtatcccttagcaattttactgatgaatatcattgaactatcgaaaaatgcctttttactaaactatactggaaaaagagtagattgtatccaaaaagataatcaccgaaagtacccttaattatacctcttctttttgttctttaattatatcttttctcaaagtattattcactcaattagcaaaattttaacgttttgttttcttaattttcagggaattattgcttctgattagttatttatattgctttcagaattattttcttctttcttgatattatgattatttgtgtatctgctgatttctttgaaatggagttctgtgatgaataatatagtgtcccttaaaatcatttgcttagtagacactgaagtgatatttcccgggtgttagaagttttatgcaattgtatatggataaaatggaaagtaatgggctctggtttatgccattttgataaggaagagcatactttgagattggtcagttgcttaagtagcatttacatttgtttttcttttctttatataaagtgcatttacatttgttaatttgaaatgtctctatttttagcacctagagaaattataactaatttttttatatgactgtaaattgttattatagtagacattctacctgtttctgaaaaaattaaaataatttttagtgtcaaaaataaggttcaatctttcagctgcatgcgtgtaaaaagaaataagtatgtgtgcaactaaatcgttgaactctattttcgatattgtaaattattcagaattacctactataactataatgttgactggcagataaacaagataaattataatatcttgaaatgccaaaaactaaaatgtccctaccaggacaaaaatggtgtcccttctaagttttgtcctataaatatatatatatgttagtttatttatttattcatgtgtgtttgtttgtatttatttattagctaggacctgagaatttctttttggttttaataattgatttactttgctttttactgcttcagagggcccaaaacctaaagaggatgttttatttccacttccaagactatgttgacttgattatatggaaggtatggtctcaagaagttgtacttcagctgtagccttgtgatattgcctctccatgtttgagagcattgcttgcaaattcttcttattgacatatcaattttgtagtgcgtgcatgtgcatttttcactctaaatgaccaattgacaagtttttttgtgttcaatacttcaataggtacaattcttggaccgccatcacctgctaatcaagttcggaagtgttgatggagcagtgagatattctttctagcatttttattgtattgtagtagattgagtatagataaactgcagggacccactttttttatcacaacccacccttcctcctctattgggcataaaacttgaggattgaatactgttgaccacacaacacgatgctttctggaatgaatctccccattcaatgcagttggacttttactgattagatgtgagctccattatatctaggcttgacgacgagtagacattaaatatggatatgattctagtagaacgcttattacgtaaattccttgagcattttgaagctgtgggtagctcattatgctctgaggagtctgaactagtcagctgtgagaaacaaagtcctttatcaaagtacagggtgattgtggttacttgatgagtgacaaataatttttgaaaatctggctgtctattttgcatcttctctgtaaattaacttccataaataggaagttctaaattataatctgctcttgtgctttctcagaatcttcaatatttttttccattctcattatataaatttttgaaacttcaggtatcacgaactccagatcagcacccacctttttttgctgtatataacatggagacaactgagtttgtagctttttatcaggtaaaaaaccttaaaacgtaatttctgaaagaattatttcttaaacctgactctgacacatttattgcctgcagcaaaattctgcagatgagctatatcttttgtttgagcagtttagtgaccacttccatgcaacatctaaaaattcgttatatttgaatttcatatcttctcactcaaataatgttcatgccagagaacaattgagatcacttaaaaataaagcaagtagttcttcacaggtgagtttttgcaaatgctattttttcatgttcgttttatatcttctactctatgacttaagaaatgatttacttgttttggatttagaagcaaggttttgtatgtggtttataggtctgctttttcctttattaacaaccacatgtttaattggctgatgatttccagtttgtgaagaagatgctgagctccttgcctattaattgtcagtcgctgagcccttctccctattttgatcaatctctctatcgcttcgatgaaaaggtttgaccaagaaacttatgattttcttaaccttattatgaggctgtaagttgagtaagcattcaatttgcgaaggtctcttcatgacacactagtgagaattgggccccccttgtaatctttgaaatgcatggactggttaggaaattatggtagacactatgtacttacattttgtttcctatgaagaaataataggattactatgtacatgtgcatttgtggtttagcaaaaatggcagaattgagtcagttcaggaatttataaaatgattttcatggttctctattgttttccaataaataaatggagaagtggtaagcttcatcttatgatttgattaatgtatgtatgatgttttagataaaatcgagttattattcaaaaaaaaaaaaaaaaagaatgtaaagaattaagtgagtttgttactttgtgtgaaaattatcaaagaattattgtgataaagaacgcataacttgtataccggccaaagcttttatatggatcgtagagatatcctagaacatatcccctgatcttgtatggtgcacaattttaggttgggatacttgaataggatccattagaaaatcttcaactagaatattgacaggagatatatcgtaggttattatttagtattagtttctatcacatttgtttgtgctagggttgaatgcaggaaatttgctgattaatcccatgtaggctaactgtttgaaactcttttgtcagtttctgtaactaattaattaatatatctttgttcttgcagcttatttctgcagcggaccggcatagacaatcaacagaccatcccataaagttcatcttaagaaggcaaccacatgcgctcagatttaagattaaaccaggtgtgctaatagttgtttgaaactctgtcaaacttggttatgacttatgaatatgaaacaagagaaaatgggaagaatcagtggtaaaagtgaatcaagtttacctttctatttcagtagatgattttggtttatcaattgaatggtcatttcaggcagatatctcattttcttttttcaaagaagcctttttcattttcattttaaaggttttgtataaaattatgctatagaacatcaaaggctacattcatccacattctctgcttagttgacttgtaaaatttaaattaagcatgtgataaatggtttcaaattaggtccggaaggtggaaacgcagatagtcgagccaaaaagatatcttccttcttgtttcatccatttctgccacttgctctttccattcagcacactatgttcttgcaaccttcagctgtgaatattcacttccggagataaagtgttgtgtaagcatccatttacataaggttatagttgaatctgagaaaattgtattcaagtgtagcggtttctgatgtttagatttaatgtatatttttctttgtagaatacagtttaactattgacagtaattttgtaatgattattatgtattttagttttggtaatagatattggcttacctttttttctctagatgagtaatttaaagactttccctttgagtaatttgcacgattcaatgtcttttaagtgtgcatgtttgtagtttattccaaaaaataaagtggtcgtatatttaatagtcactacgggtaggggtgttcatttaatataatccgtactattttgctcattgtacatatgatccgcactaagtgcggattttatttttttttggatccaatccaattcataaaagtgcaattggatttgttactttttaatattaaannntttaatatttatgaaaaaaatattttttttgttcacataactagtaacaaaataaaacaaattat

SEQ ID NO: 17495 - DNA, 5937 bp, Cannabis sativa
aattgagcctacaaaaatctccaaaactattttttggactataatcggacacaccaatcggaccaatcggacaacatcggggatcccacaaattaaacaaaaaaaccaatttttggggccccatcaaaccctaatcagacccaatcggacaccaatcagacacccatccaatcgggcctaaaaaatccccaaaactatttttcggactataatcggacccccattggacccatcggacacaatcaggcccgaccccacaaaataaacaaaaaactaatttttttggtacccatcggacccaatcgggcccccattgggctttcacccctgtcagctattttttacatagcatcggaccccaatcgggcatgcatcagatcccattgggccagacgaaaaaattacagaaactaggaaaattgcaatattcacaggtagcaagcattttaacacacaaaacagcaaaataacagcaaaaatccacagatcaagcatcaaaacaacattataaactaattataacaacaacaaacaagattacacaaacaaaaaaaaaattacccattacttgcatatgttgctctgtgtatgatgctccgtccaaaattgaaagaaaataggtagtataacttgtagtgtagtagattatagtgtagtgaattgaagataatgagtagagaatgagtgaagaaattttttttttgttcatttagtggggagctcgacagtgaagaacaaagagagaagaagagagaggggaggggtaatgtaaatattggtaatttaggaatattctaaaatgtgtcatatcttataaatattaaatgttacctgttgaggaaaaaaatattaaatatgtgtaaatataaaaaatgagagaaattaaattttattagagataaatttaattaatatataaaaaaaaagaagaatactctttaacttctcctctccgaaggaaaaatgatttgaagtccaaacttcgaagtgacatgtcaaaggaacaatagagaattggaaaaacaactgtgatttacagaactgactgacatttttcataatttcataaatacaagacaaaaatcattagcttttcaaacgcaaaaacaaaaggacaaaaatcattggggcacacacaccttctcacccaatctaatccttctcttttcccatcaccgaaaaaaaaagtttacatttttaccatttccctttccttttctccgaacaatccaaaccaaagcaacaaacaaaccaatttttattgttgttggttttatttattaatttttttttaccacttccatttccatccccactttcctttttgacactgaatttggaggtctctgtcctctgcccagataccaaacctcacaggtcacatgcccccataatcaataaccagacccatcaatcccaccataccataaaaccacaaagctcccaaaagagacagtacaacttcttcttccatggccgattctagaactagttttagtaatggatcgcccataactaagattgcccaagaccatctttttaccatccttcttcttctacctatagattcaattgtggcctttgcaatgagttgtaagaagttcagggttttggctacttctgatgcactatgggaatcgatttgcagaagggattggggacccacttcggttgatgccctcaagtcttcaaatcattatcaaaatcagatgccatggatgaggctctacaagcaattttctcagctagattcggtttcttgttataaattgtctgacacagatgccaaaatagagtttccagacccaagagcctctcattcactcaactttgtttctgattgtttggtcttgtttggtggtggatatgagggaggtcagtcactcttcttgttttatttattgctgtaacatatccatttttttctctacatcaatttttttaatgtttttttagtcataattaattggtaggtttggactgtgaaattccttttgtttagttttagtattaaatactgtctgagatactatttagctttattttattattttattgtattcttgatcaggatgtcattagttcattgctttcttttcttcattgccctggttgaaagttgaaagtgtgctgcttttctgtttaatatgatacttttaagtcatgggttagcttggtttttttggctaaagtcatttatggatcttgaacttcatagtgctaatccgtacgagaatgagataaaagagaagtgaaaaatgattgatgaattataatcatgctcgtaaacataagatttgatcagttgttttatttgaacggagcatttccttattataatgtttccttttcgttcctttatctttgatataggattatatatcattgttttgtgttactactagtttacgttcataaaagtatggctgcgtagggccatgtgtgtgagatacttactatttataactaatgtccattttacatttttcttagtatctatatatttctttctataaattgctagaactttttttcttttgtcaggataaattgctagaactttaatatatatttcggtaacgaatagtttctgggaacccatccttctctatttctgttttattgcaattgctgtaacaaaatcatgaatagctaaatctggaaaaacatttggccaaaaaaatgagtagttgaacatttatttgtctagcccaccacctaactttgtggaggagtctcttaatatttaatgcatagaatctttaatgactaatctcatcacttctaatttctaaattttaattcattttattaattccaccttagacccctcccggaagaactgtccttacactttagtaatttgagtatttatcaataattgcaccattttaatgaccagtcaatcactataataggatctgttggcacatagtgcattaaacatgagacttgtggctttggaaacttctggtttttactacttggtaaccttttctcttattgttaggtttaagaaaatattaattgataccccaaagggttagctcaaatggttacaaaatgtggttaactctgatgtttgagtcccttgcgagtaagtacatagcaattgtcaaatattgcaaggttaggtgggtaacctagttttgtaaaatattaattgatggattacagaggtttttatgataacaatttaagccacgttgaggtcttcaaggtgtctttgatgaaagaaaatccataaggttgcttcctgttcataatatgatgtttgtcaccctaatgtttctatgaatcaccaacctggcagttataagatttagtgaaacacaactctattgtttaggatttagttttctttccttaaatttgttattatgttagttgaggacagacatggaagagtcttcggcagcttgcaaaatcgagtaacctcagttttcacctttcactttgttgcttggcagacatatctcatcttaggaattcacttgtacatttcatgtcctttcatgaacactgaaccttttttaggttgttgcctaaatttgcagacagtcgttgattaaagaggtgtttgaagtgctattcatttgagaactgtgaaggagatgcccttcatgtcgatttttcaaaaaaattcaaaatcttttcagaagtgacagcaaaaaaagaaagaagtaaaaaaaaactgtaatgtgacagtatttagatgcttaaaccatcaatcaccatagaaatgaaaaatccttgtttgttgatattaagctaaaaatcatattagctttcttcattatgctcttaattttctttttgttatgcattgattttgtttctcttttctcttttactgtttaggacgccatcttgatgacacatgggtggcatatattggtaatgattgtcaaagaaagttgaagtggcagaagcttaattcaggcattccaagtgggagatttggacattcatgtgttgtaattggtgaacttctagttgtctttggaggaattgatgatcatgggaaccgtatgaatgacacatggattggacaattatcatgccacgagactctcggtataacattgtcatggaagctgcttgatgtgggatccattgtcccgccccaccgtggggctcatgcagcatgctgcactggtgctcggaaaatggcagtccatggaggcattgggctaaatggcttcagattgggcgacatgtgggttttagaactctctgaaaattcatgttttggaacatggcatgaggtagcagcagatccgtctcctccagctcgtgcaggacacacgctgacatgtattagtgaatctcagacagttctatttggagggagaggatcaggttatgatgtgctcaatgatatttgggtgttcaatggggacgagtgtcacaagtgggtccaaatactatatgaactacaaaacattcccggaggagggtcactccctcgagttggtcactcagctactcatatcctaggtggtcgagtgctaatatatggaggggaagattcttctagacaccggaaagacgatttctgggtgttagacttgagtgcagttccatccattggagtgcagccagatacggtgacctccaaacgaattttggcaaaaatgtggaaatgtttaagggcaaaaggttataaacccaagagtcgatcattccatcgtgcctgtgtagatcattctgggtgtcatttgtatgtctttggaggaatggtggatggggtgcttcagcctgctgagccatctggcctaaggtttgatggggagctctttatggtagaacttttgcttcagctgtaaaaatgaattagaatgacgctctaagatgggttatgtcatgactacagttacatataatggtggggtccttgtacataagtagatcagcttgtagttaattgcttatatatttttcattagtttaagattgtcattgttaatttgggttcttaggtctatttaaacatttgggattgtgagatgagccgatgaagatgacaatagaaacaactcaagctcaattatgctctcttttgctgttctactaggtattaaactggtatacaaaattaggaacaaagagaaattggcatactataatttcttgaaccttacaaatgagatagttgtttcaaaatatgtgacaagagaacttacaacatcactctactttattctttaaaatatttatcaaagcactatattatatattttatatcaaatttgtacatcataccatatattaaacaatattatcacaaagaaaaatcttcattaatcaccaaacaatattacaaatcaaccaaaaacaaaagggctgctacaaaaacacccaaaacaaaaactccccactatacagttatcattcacacatgtatatatatggctttgcatactatctttcctgtaatacattatgatatctttagctatgtgcaaattagaattagaaaaaccatcaaaaacacaattgttcctgctaaatgctaatccatagctacagtgcttgccatagaagcattgagaattgaggcaataatccctgttcgctttatgttacaccaattctttacttccaagggtatggcaaaccgaactagcaaatcccccgtgagtaaatgagaattaacggcctgccaaattagaaatttgtgtttaggaatactaagtctacaccaaacaacactttagtacagaatcgaagaccattgtacaatttggctgctctaaatttaccactagaaccgtctgctatcactaggactgagcataaaatttagaaaaccaaaaaaattgtttaaactgacctaccaaactccgtaggaaccgaaaccgacataatcaaaaaccgaaaaaaccgctaacggttaaaaccaccattgaacggtcggtttttttgggtaataaa

SEQ ID NO: 17496 - DNA, 3442 bp, Cannabis sativa
tgactgttatgtaatttgttttcacattaatataatagtttttctcaaaaaaaaaatctaataaagaaggtaattaaaaaattaccaaaaaatactaaaaacattacagtatatttcgctaccaaaggtaataaattaatatatatatatatgtaataaattattaattaagataataaagataacaaaatgaagaaaattctaacaataaaggtacataaaaaattaccaaaaaattgctaaaaagcttcctgtaaatcgtgaccaccctcgtcaacggaacaaaagagctcctccaccatctttttaccaaaatcggtaaaccgaaggctttgaaacctcagtcaccaaagcaatttgtaaatgttactattcattttgaattattacccaaaaagtaggaatctcaaaaaataagagttaaaattgtaacgattaataatcagaattaaaatatattaagtgttgaatttgatttcagatttaccaaaaagatgaaacactactacagccataaaataaggcgttgttcaccgtgtcttattttttttaagagacatgttttttacatgtctaatatatattaataatcagaaaattaaaactggaaaattgaaaaatatgaaaagtacggttcatccaatttttctctctggctgaaaattaaaagatgttctctgccacgacaacattctattattccaaggagacgccaccgagttttggccggagaataactgactcgtcttttccgatacatcggcgatactccgcaagaggaggcccataaactttgaattttataagaactaaaaagatatatatagattattaggtaaaatttgactattggcggagggagatgacggagttaccgaaggcgtcaaagagcaaacgctggtcgtggaaactgaaaacagagcctttgaccttaaacataacagcgccgttaacatccgtaacggcaaaggaaccttccttatcgcgattaggaaattcagatattgtttaaaagaaaaaataatttttccaaataaaattggtaaatatatatgttgtccaatgtataacaaaagtttttacacagttatataacttaattatactaaataaaaaacaacccacgcgacataattgagtgacgagtggtgggtgggagccgaagccagattagaggcaacgtggctgattctaaagcgatgctttctccagctttgtgggcgttggctcttgaataattttactctctcaaatcgaaattccacgccatggaagccaccatctcttcctccatgctcccaccaagttcaacagctactccctttaaggactgttcattatcatcatcacatcttattaatcttattactccaagagttaatcatcctcacaaccgtttgataataaaaaacaagacctcaaaactgaagaaggttgcagtcattactgagttctcggccgcagctgatcctgcccctgatggcttcacctggcagattgttgttggagctttaggtatgttaatgtaatcatttatgcatgattccatatctctgtttggatgctgagaaaactgagtttcgtttgtgtaaattagactggagcttttttgggactttatctaacccagaaaaaaaaaagggaagaatcatacgtatatgtagtgaaacttcttttggtttcagtatatataaatacataggcgaagccacgtagggggcgattgcaccacctgaaatttagctgggtaactgagttctaaattctttggggcatatgtataaacaaaaaattttggacatttatacaaatattagtcagtaaaatattgaatagtgatgttgtttgttgtattggtaaaagtattcttgaagtttaaagatgacacaagttcaaaattccatatccttacaaaacaaaaaaagttttaaatcaaaactccatatcttccttttatatacatatatttttttatgatagttggaatttaaatttagctattaatataaaaatgccttttatgaatccttatatgagaaattataaatgtgattccatattaaattttatgaatccttatatgagaaattataaggatactaggcaacaaaaatgcctttttgcattttactataaaattagataaatagctccactaaattttatttctgacttttatttgtatgtatgtatatatatatatatatgaaatctttaatgtatatgtattataattatgctgcagctggagtgactccttttgtggtggctgggattgaattcagcaaaagaatcgtatgtgacattatatataatgcatttgacatgattataatataatgtatgtttgtttatttatttttctgatttatttactttaattgggcagattgctcaaagaagttgtgaggtgtgtggagggtcagggttggttttgaaaaaagaaaactatgtacgctgccctggatgtggtactcacctttttattaattaatttatttattttgtcataaaatgagtgatgaaatgtaaagttttatttttccttcttcttttaataagagaatatatagtatttaataatttattatttcaaaatatttcaacttaattggtatgctcttattaattaataatattatttagtactttatatatagtaattaaatcagtttaaaaaaatgctttggacagttctttttttctaatgatatgttttctttttaggtggatttctaccttggcagtcatggaagagatttttctcaggataaattagtcctgtttgaagtattatcacatttctccaatgatttaaactaaaatgaattgggttgaactgtcaatactcactatttggttgaatctttccatatcttttggtaatagtgtatactcattaagtgtagatatgtatgtattttttataagtttgtgagtacagggtactctttttgtttggtagaatgagatgttttgagtcttaattatattgtaattaagtccttttcttttgtatataactaaaatgtttactcccttttcgctataaagacatctttttgggctatatctaagcacccttttgttacttgatttgaggtagtcgtgcaccacaacacatgcgcacctcttgtacatatttacctgatttttcttttaattagtacgtgcctcttatttattttgaagtattatggtcttgtgagttgtgaccaataaacataccgcttttgatactttgtgcgcgagcgtgcttattattttatgttgagaagcctcatatttgttattgatattatagtattatacaacttgttgtgctaaaattagatatacgtaactgcacgtagtcacaaacaagtaatacaatgataagtaaaagagtatcgtctctacagggattgaatagaaattaattatgcaaaaactaatactaaac

SEQ ID NO: 17497 - DNA, 3269 bp, Cannabis sativa
  modified_base (163)..(168): a, c, t, g, unknown or other
aaaataatttttaataaaataataaacaatatgaacaaatttattattaattgcattaattatatttaggttcaactaaatgcatgttgaccctttacgtgaaaacatctaataatttgttattttttattattaaaaagaaaaagtcacccaataatttctnnnnnnccaagaattctgttatatagccacgttttatatagaataaatatagaaaaattaattttggcaaatactatacttgtccatctttttcacaaaattccaataataatattttattttacaatactaactccctgtctgattttgattggaaaaaaaaaaatcatacccttgtttcattacaattaataaatattacttacataaaaaaatttatcttttgagaccaaaactaaaatattaaacacaatgccatatgaaatttctttaaaaagtcaagtttcgaaaaataaaatataataagtcaattaaaattatattaatagtaaaaaaaaaaagattaaagaatttgaccagaatcaagtagaaggttaattttggtagactttgtaaatcaaaaattgtattttgctaaactcagtacactactcaaatagtactctttctcaaaagtttatatttgttttgagaacataaatttttcatttgggggaatatgtttgagaagtggaagtatgcttgtttcctacctttggatgtgcaagcaatacatgtacgagatcttgccactgtgaagatataaatcctgttagcagatgtagactgcacgccaccaaagcagaatgcataaggggcagtgtaccaaaatcatggtttttctgcatcatgagagcaaatctcaggggtaaacaaataagatggggcataaaacctaaaattcaggattcggaagaacctgttcaactctgccagaaacaattagcaaatagaacaccatatcaagaagctgctctgacaattttacatcatctagcaaaatctgtacccaaaattgagtagaaatatcagaaaataaaaaatgcatgtttcttatccatacaacaactagaagaattttaaatatcattaaaaatatcaacaaggcaacaataaaaacaaatagaaacattcacgcataaagaggcaatatgatcacaatgaacccaagtgccatagcaaagcttgaaacaccttacagagagaagaaaagtgaacccagaagaaaaaaaccaatataaataaatatgtttgtgaataccctgttataatcaagagaagatcaaattatttttctttctttttcttcatttgacaagagaaagatggaattcttaaaatggaacaaattaagaaataaaatctgctgatacagaggctttctttcctctagaaaggaacacggttactcatattgtacctgtcctcgctagattcttctaagtttaaagttatcaatcaaaagtgaaggacaattatattgcttgaagttcatgaaacaagatgagaaatgaaaacaatatagcaaaaactgcctcccaaatattcagattcagtggaaggacctactaggatacagaagacaaaaaaatcaagtaaaggacaatataacacttaagaaaactcttacctgttcaagcttagcatgccgaggagctaactcacacaaagagtgcaagagccggaggccacttagcaagtatctgaacacggcttcttccctgcttgatgacattagcacagcaataaggtgcaaaggaagaaaccccactagtttttccatttcgatctgaaatattaaatataataagcaatttaaagatgtgacatttatttatatagcaattataacaacctaacagaaagctaatgtcaatagaacagaacgatatctaaccttcacatctaatcctgcttcagtaacatggtgaataataaaattttcagagtccctcaataatttattaagctcctgagaacttaatccgtgtaattcattcactgctgaaattaagtcaattacctgtttataaaaaaatttaaatgtctaaattaaatttgatttgactttaaaagaaaaagagctattaataaattaaaataaatgaaattttaacgtagacaacgttttagtttttgagaatatacgaggatacttacttgtgtagcactactaggttgctcttccttggtatatctcattcttcaatatctaagcccagataaatagaagaagaaacccaagaaaattttgaaagtagaataattaacggctgaatagataagtataatttgaaaactgtgagaaaaacattgtttgcgacaagagcatcagaaactctatgagcttcaatacaacaatgcgactcttctacctgcaaaatatgtaagaaatggattatcaagaatgagattagtatctacggatacatgcaaactcactaaaaactaaagtatctttatgtgaagctcatgaagagggggggaaataacagaagaactgtttcaaataattattaacatttggaaaagttatttcaaataattaccattaccaagtacacaaaaagccaatagaagcgacaccattgtaggaaggaagcatgaatcgatacaactattattcatattaaaatggaaataagatattaaacctgatgaaattgcttctcccatgaatgcaccagatatacgttcaaactaccatatctaaacaagaggacaatgcttttttaaaaacaagagaacaggaaaggattcgaatgaataaaaaaaaaaaaaaaaaaaaagatgagcccccatccccaaactcatctactcagaaaatgagacccaatgaaacaccataaatattgaacagaaaaattagggtttgtgtaggtgaaaagggaacctgttgaattgaggtcattggcgttgagggagaggaattgagtggatctggagttggaggtggtaatgaggtgagcttgtcgtagtcgcaattccatgtattctctctgtctatatatcgaaaatgaaagagaagagaagagagtagtggaaaagtcagaggaggaagggagtgaagtgaatgaatgaaatatatgtgtatttgatttttattattaattattgattattgattgattattacttttatatggtttttacaatgtttccttttgaattcaccactgctgcatggaggaggagaggagctactattgggcctggccataaaatcccttcttttaggaagttagtagaaactagacaataaaattataaaagtttacttgtttttt

SEQ ID NO: 17498 - DNA, 2839 bp, Cannabis sativa
aatgtttgaggaaacatgcgaaccaagttgcatgtcaacttaggcatgggggcaacctgggggatagggccctgttcaggctccctaaaaatctcgttagctccacaagatcacttgtatcttcgttatttctaatgatggaaaaagtacctggactggaacactttttcaggaaagtgattggaaacagcccacgttgacaaaatgtcaacctgggtgctaagcttagtgccaggggtcaacctgggcactgggtccagtttctagccaccagatgactccatttgattcccaaaaatacttgtatctaaatctttgatgaaaacggagaatattcacggaagacttctcggaaaaactccttggagatggcctaggttgacaaagtgtcaatttgggtgttgggtcccaattctgacccccagacgactctggttgtttctcaaaagtactcaaatcttaatttttgttgaaaacaaagaatatgcccggaagacttcatctgaactgttgatataagtggcccaagttgacaaagtgtcaacttgggcactgagtccccgttttggccgccaagtcgatcagtttctcccccaaaaagcatgtgtttgtttttgatgaacacaaagaaaatactctggatagttcttcaatattgtagttggaagtgtcccaggtcaacaatatgtcaacttggacactgggtgcttggggcacctagtgctccgagtgttcaaaactaaaagtgctataattctaattttgttgcctcaaatatgttcttcagtatttattctatatgttaacaccaaacacaaataaaattaagtcttatctaatatttattacttttctaattactcaaatcgcttaagcattaaatttgcaaccagagtctagatattttggatttctatagaaaaacataaaaaattataattttgtatcataaatacatttgacataattttaaatttacttaaaaagaaaaaataaagagcaagtataatttttttagggtaaatactattttggactttatattttataaaagttatctattattagaccctttattttggtaaataataaatcgaacctgtattttctaaaagagtatcttgagcttaattttcccaaaataaaactcaataatattttgaactagaggtgttataactatattaattatatgttttgcatctgttcatgctagaaattagctttaaattggttatgttaaagaaaaaacatgagagcatgtctcctaaacaatcatagtacgtctgctcatctaatatcaaatcaatcggtaggtctcacttcccttccccatatcatagccagagggataacctttgatagtgaagctcattagtctggttcaaacgagtttcgttccttgacatgcttaatctcgcatgagaagagagaaaaagtttctaaaatgggacacacttttttcctacgttaataaatatattttgagaaatgctaatctcactcaaattattcataactttttataatagtgatacacattttattttagccttagattttaaatggagtccacatcactttaaattatatgattaagattaattattattattgtatgtaaaaaacatgtataatgtaataattccatcacaattattactcatatattttacaaaaattgtcatggaagttaaaggttggtgaagagatgtacttttgtttttactcactcaagaaaaagtgaaacttcataaaacagaaggagaactttggtgaccacatgtggttggacctcccataagttcagtaaacaaaaaacattattagaaggtaaagcacaaagagaagagatgatacttaacagtgccatagttgaaaaaggcatgagtttgggcaaacagatccataattaaggtgcaagtcctcaaaaaaggcaatgaaagtgaaatttgggtacgacactacacatgcacaccaaatttgggtacaacactgcacatgcatacatcaacataacccaatagtactctttgcttgctggtaacaccttaatctgtacatatcacccaccccactttttcttttcctccctcaaaatttattatcaaacaaatatcataaacagctctaaagcttaacctcaacgcacgtggtcggtccatatagtgtttctgttggccaatggctacctcagatcactacctcctattaatttgcatatattattaattggggaatctacactactatttattttggtaactaaaataatttttttttagtcaatttttttatatgattatatattttgtagttattcgaaatcctataaattttttatcaaattcttagtatcactggaatggacattacatatacaaaaatataattctccgtacaagtaattctctccgtacaagttttgattccgttgtgatttcgtgtgctacgcaggccatgtacggtgggccgttggccatgggtagtggcctgctgcccactgacactgtacgttgtgtcgtagggtattgcatcccttttttccatgttaggaaaaacaatccttccatccttgatcctgttgatcacagcccatccatttctctgagtttccccctcaaacctaaatctactccctctgtcctggaaccccaactcctttactcctctttcagtatctccacttctctggggctagtgattatggcctcttcgaacgattcgctggtgaatgagatgattgcagaaactgagaactgctgcctggaggatttctctattcaggtggccccggacctggaatcggcccaggagacgattgctaagacggttgtgg

SEQ ID NO: 17499 - DNA, 3645 bp, Cannabis sativa
accggtgatgtacaatactatcacaagatacaaaatgttatatagttaccgatataattaatataattaagtattgaatattacatattttaatttaataattattttaaaaaaattgttaattatttataagattttaataactatgccctattaaaccatctcaaagaattgagcctacttttttttggttcatttcttaaagagaaaaatcaactaaaattggaccttatatgtatataaaatacatttttattttatttatttattaataaatttattatttataattattgtggtaggaaagataggttcaataaatctcctactaacctattgagccttaattaggccaaacctctgaatagaacatgtccttggattttgaccttgtaatagaaaatggatcgatttcatttcatggcaacttcataatacattcctttattaaaaaataaaataaatacattccttattaacttattgaaaaatattgtgttattgataatgacttgtaaaaaaaagtgcatataacatcaaaaattaaagttggataattgctattagagcttgaagctaaattttgttatcattattactagctcgcttttttggaaccctaggcattccactatgagcacaaaacatcaatcttaaaaacaaaaaacaacaaaaatagagtaataatgtaatataatatattacgtaataggtcttaaataaatgttgattaaacgtgtttgaatgtaattatcgtatagtgtttaggtacacacataacatgatattatttactagaagaaacacattaattataaacaaatagctacctacttaaatagtactaacatattcttttaatttgaaggccctaaaagtgtttatagagagtaaaaaaagagagacatggtgagaaaagataaaaagttggactaattaaacaacggatgcttaaattcattataggaaaggtcacatgaatcaaatgtaatacaattaaagtcataacaaaatgttttagtcatttatttatttactttttctatgtagaagaaaaataggtcctttttactctagaaatgttatcaaatgtctacaagtagagagagagagagagagagagagagagactagtggaggaggctctttcatacgtgaaattaagaaaagaaggaaagaaaaagtacctcaaagattatatgttagcctgtgataaatattactttttgttattatcttctaagaatctaatcgaaacaaaatgatgggaagggagaaagagagagaagttgaagataggggcaagtcatgagaggcatgatttcttaaagagtccacacaaaacccactaaagattttttgttttcaattttttttttttttttttgggaagagatttgttcttcttttatttatttaatttttatttttcgggcagaaagtggtagagactagtttagcctttacctgttgtcttctttttctttagtggggggggatagataggggagagaagaagattgatggatggtaatgaaaaatgacacttttcagcatctacatcattataatctgtataatacctataaaagaaaaagacccacgaggattttgcttctttgcatgtgatagcactagtgatgttcttttttctttttcttcttttctctttttttttcaggaaaaaataaaaaattctaatatgctctttaataaattaagaacaacacataacaaatgtacatttgtaacgaatatttatgatacataacattgctctaaaacaaaaccctctatcaaatttaaatgctattttagattatttgaaaaaatattgtggtcttttttgacctttataagcatcctcaaaagagttcattcatccaatctaactggataaacctattttcaaccacagaagatgaattcttcgttggtcattttcgattaaaaatggtggtgccgactatgtccttgtatatcatgcttctgttctacctttatgagacctgagaattatctgccaaagatgtcaacttagcttgacatgtttagctacatgctcaagttggctattcaaatagaacttgggccatcaaatttaatttcatgcttcatatttcattacaatgattgtccaacttgcctacttggtattcaatttcatttcaaaagtaattcctaatggtttatgagcatccaatggtaagaaagcataattgttaagagggaaaaacacaatttaaaaaatacaccaactttgactctctcacttactctacttctgagaaaatcctaaacttgcattgccctcgttaattggagtgttgtcgacgtgtggtagtgcgtcggtggtgctttggccgagtgcctcctatattagtcattattggtttgtggcgctcactaatctggttttgggtctagctaagtggcttgttggcttttttggcatgaccagatttccatggtgactaaaagtggctagtttcgctagtcgttaaattgcactcagattttgggcaacgatgtttcccaataggttattgtgtgttccctcgacctccttttagtcagtggtgatctctcggaaggtggatgttgatggtgtcgtgttccccttagcttgtctttgcctgttcaggtcgattaggttgtcaatgctttagtaattttgttgccttctcatttcctcttttggtttgttattttactcttgcgtttagagagtttggatttgttgaggactttggcataggccattttttgatctaatatttccattgtactcgcaagtgtcttaccttctcggtttgccgattcaactaattttgctttgatctttgaaaggaaggtcactaagtaataagtattacttgtgtagagattagattagtaccttctaaagtgttatacctcttgttgtcctactttgtaaacggcttgattcaccattgttagtcatctcctagttatgtgtattggctttttgaaaatttcatacctagattggacttcgctccatgttaatggaattcttcttttccacttaaaaaaaacgagagaatatgatggggataccaacaagagaaatacatgcataaaccttgagctccctaattaacctctccaaaattatgtcttatattcttaattctatagataaagccactactgcaaaaaggcctcccaatgtcaaaccaagggggctcaggtagaaatggagatatcaaaatattagctgtaacaatggccacttgattatgaagactagaaataagaagaaagtatgaagactttagaaagcaaaaccagatttcaaatgaagttcaaaaacaattgctgggaggatttacatcggcatgcaaagtgatggcaaattcagaaatacccggatcaaattatgggaactgtgaaaccaagacctcgtaatcaagaaggcaaagatcaactctcaatcattggttccgggccagatggctctgcgcctgacgacttgttggattggcgaacagagttgaacaagatgtccttgatgacctgaaggaaaatggaaccgcatagttcagtagagtcacagtagactctttgtgggtaggataaatttcaaaacaagaaaaaagatatccagacacactgaacaga

SEQ ID NO: 17500 - DNA, 4876 bp, Cannabis sativa
cggtaccataggtactttgacagcaaaagaggcagaagaagcaatctatagaaagatttggcaccgctcactaaattctgtggttaatgtgtttattttgtctgtaccaaatacgccccatgttaccatgatcaatctttcttactttgaagaagttgcagaatataaagacaaatgaaaccataaatatcacttacaatcatgtttggatcacatcttaaaagcacatagctttcgaactgagacgagtttgttacatcctcaaagagcatgatgagtagtcttcggatcactagtacaaattggacaaaaattgtcgttgagaattccatgtctttaaagattaatctttgtaggaatccaattagacgacaatctccaagcaaaacgttttaccttgggaagtaaatttaagttccataaagtttgccatcaatgggaaacaccattggaagtggaagccatagattccgtaacatcacaaatttcaagctaataaccaattttaatagtgtagaaaccatgcttttggaatctctaaacaaatgtttcaggaatacctcgcaaaggccatggaatagagaggataacgaaagatgcctccacagaatagacctattgaacaagagaagaatagcaacctccattagcataacaaagctctgaaatagaggcaacattaccaatcagactcagagtagaatgaatgaggcttgagttcaaaggaaaccatttgtccttaaaaataaatatagtgttttcattagcaactagtccctctttttgttgagatgactttcctaaattcttgttgcagtgataaaagccttctaatgacacgagctgcaagagaattaagaaaattgtaaaggcgtcttacttgttttgctaataaagctttgaaagagaggaagattgcggaaccccataccaccttcattcttatgtttacaaagttgatcccaggtacactggtgcattttctttttaacatttgaaccaccccaccagaatctatcacacacactatgaatatcattaataaaattcattggatgttggaagagattcatagtatatgtggaaacggattggataacaactttaattaagaattctctaccagccatagagaacaaattaggttttcaattattaagccacttccaaattctatcacaaactaaattaaaaagcccacttttgttatgacctacaaagcttggaagccccaaataattctcatgataactgacctcattcacaccaagaaaagccaccaaatcacacctggcacccaagtccacattagaggtgaaaaaaaccgttggcttgtcaaaattaactaactaagcagaagctttcccataccaattaagaaacatctgaaaatagagacaatgagcaagagaagcttcaaagaagaaaagactatcgtcagcaaataaaagatgagagattttaggacctggccttccacaagataaagcacacaaaatatcattggagcaatctcttttgacaaaagaagaaagacccttggcataaagaagaaaaacatatgaggatacgggatctctttgtctaagacctctttgtggaataatgcacccatgccactcactattaagaagaatagaatactccactgtgaaaatataattgataactttagcaatccaattcgtgtgaaaactgagtttatccataacacaggcaaggaatctccactcaactctgtcatatgccttagacatgtcaagtttgatagcaaaaaactatctttgcctttcttcttcttttttaaagcattgatacagtcaaacctaataagtgcattatcagttttcaaatgacttggaagaaagacacttttctcttcagcaacaatcactcccgaaaattctctcatccaattagtcatgactttagtaataatcttgtaaagcaaattacataagctaataggtctaaacttagaaggcttcgtaggggaattaattttaaaaatcaaatagatgagagtaagattaataccttttagagaaaaatcacaattgagaaaattaagagttgcacttgtaacatcaacaccgaaaatttcccaattcttttcataaaaatcagcattcatccaatcctcaccagtgattttagagggatccatttagaacaaagcatgtttaacatcaatcgtaaaaaaaaggtctcataagttttgaatttatagaacccaaaacgttagcttcaattgatgataacacgtgacttaaatcatcttccaatgcgagattcaaagtaaagacgaaagaaaaatcatggcaaaatacattagttgtctctttcttgtcttgcactaacataccattacaattaatgatagaaaaaatatcatactgagctttctttctagaggcgcacttatggaaataggcgaagttcttgtccttgtgtttgagccaggaacttttaccctgagaagcccaatacatttcttccttttaattaagcacatctaattccttattaatctttctatgctcactacaattagaatgattaagattagaatacacaagagccgattccctcttcttttgattaatggattttttatggcgtttatggatgttttgttccaagaatttagctttgaagccacgacactaatatttgatagatattttggagagggtcagtgtgctttagctgccattcttgcttaattagttgaacacagtattcctcgtcagcccacaaatttccaaaatgaagatgagactagaataacttatcagtggtagcatctatttttggaatagtagacaaaacaagaggatgatgatccaaagcagtaaagccaagatgagatatacacgagtctggaaagagatcaaaccatgaagaaatgcatacaaatttgtctaagctttcttgattgaacgaggcatcataatgtttgtaagaccaagtaaatttgggacaagaaaaacccatatcaagaagaaaaaaatcagacaaagctttatagaaattattcataagatacattggtcagggagaacgcccatcttttttaaaagaagagaaaatcttgttccagtctcctccacaaacccaaggataagagttgctatgagcaatcctactataatatccccaaaatctaattttgataattagggcatatgttataaaatataaaacaataaacttgttataggtataatgggtaagattatgatcttactaatccagttatgtgaaaattaaagtttttaatataaatgaatgaataaatgtaatttattaattacaaagactttattggaatatgtgagtataatatatgctattagtgacataaaatattttcaagtctggcaactgtggagacttcattagtggccagaaatatcacagctgtataagtttatggtgctagtggtttgttaagtttggttggttttagttttatcgaagtatttctgggtaattaattataaccaaatcacccttaggttggagatttcctaagagttaggtacaagagtttaagtgtcatttggctttattttattagtgagattattatataaatctttagttcttttagataaaacttactaaataaagtaagtttttattatctaaaacaaagaaaaataaaaaaataaaaaaagactaaatatatctctttctctccatcttacttcgacttaagaagaacatatagaaaaacaaattttctttcttcaatttgagaccaaactaaagattttcagcaagaaatttcataggtcaagaaagattcagctaaaggtaagctcctctttctttttctctttaattttctaagtgtaaagttaggttaaacatgctttttggggatttacttctgtatagatggctataggttagattatattttgaagctttaatttgagttatagagggtagtttaaggtgctttgttgtaggtttggttgagagcttcaagtttgagttgatggaactcaagcttgagctctaatggtggattttgataggtgattgatgatataggaatgttctatgaagtttggtaggatttggttgagtttggaaaggttggagttgtgtaaaactcaaaacttttgtttcctgcagaagatggtagaccatttatgagaaaacgatctactgtttttcctagcagtgtcccagaaaaatagcctaccatttttagataaatgacctaccattttttagggaattttttcaaagtcttgttttgggtattttctcaatatcttcttcagacacgatggattctggaaaatgaaaaacaacaccaagcagtgaattacccaaactaactaagatagtaagggtattgaaaaatcctccctcaaatttcttggagagttcccaccggacctagcatttggaataaattctcaaagaataattgttccaaataaccagatcaggaacaacatgaatgaggtgaaaggaagatgcaaacatcatctggaaccataagggttccaaacaaagaaggggaaagtttgccagcatatatctgaagtaatttgggcattttcccagaataataaagcaaaaagaagtctagtttttattagatgctaaatctatcctagacagtacctagaacattctattttggcctacaatcatacttcagtcataggccaaaaattcctattcttcaggtagaaagtaaatcacatgcagttcctaaatcaagcactaatctcaaacatgaaacaagatttgagaaatcaaaaaataagaaaaatttacatggtgataaactgggtgataacactagacttgaatgaaaacatggcctaggagtgcacacgccaacgtc

SEQ ID NO: 17501 - DNA, 3226 bp, Cannabis sativa
atgtctggttctccggcagcctctagtacttcgtttcatccagtggtattctctcataagctttttgtcaagctcgacaacaacaattatcttctctagcgcactaacttttaaaattttagccaatcagaagttatttatttatttatttaattaaaaaagacagggcacaatgttgtatatagaacacactatttatatgtttcttttctcatctcatattggccggtagcccactaaattctttcggcaacagttgagggccattgaagttggccttataagctataacactacttcattagtcttgctcatattatataaaatatatagagacaatagaaaattgctaagaaatactttgtataaacaccacctataaaaaaagagagagaattgctagctaaaaagacatccatagtgttcaattaatagccacttaattaatgcatcataatagtttaatatctcgttgaatatatatattttaatataataaatattattataaaaaatattaatcactcatatgattctagtcagtgcccgaaacctactacaaatatatataatgctacaaaaagacgattaatatactttgtttgaattttgaaaatattgctcattagtcgagaccatgtatagatttttatcagggtaaattagccttctttggtttctacacattcattcagtaaaggataaattaatataatttaatattattcacgatgttactaatccacttgaagtattcgaaatttccaaaggtacgtagatttggtgatgatgtattaattagtagacgtacaacttattagaagtgttgatagtgtggcggcgccttgtctttttcatcccttgaatataaaataataataataatgaaaaaactaattaaaacgtttgataaaaggaatattatcataattaattgatcactaatttccacacctggttgttatatatattacttgctcattattggcggcaagcctaccatttattgactcttgacttttgagccacatggatatccccatgcatgcatacaccaaaaattaggtttaatatatatactaggaatattatatgaatatatttacatcgatcgattataggctgctttttcttttaaacgttgaaataattaaattaacccccccaataatataacaaacaataatgtgtatttttcatttggtgaatacgtttttttctaaggcttttcattttcaataagtttaaaatggtagcttatcattaatttaagtaatttcttttactgaaaattaattaaagtattttcagaactaaaatatatcactaaaatgagttaaaatgtataacttttacaatatatatagtattgaaaaaataaagttaattaggccctaaacttttctaaaaaaagttaatatgttggtctttttatttattatttatttttgattttttttttgaaaccaaagttagttctaagataacaaaatgtcactaaaaatataatacaatcaatcagtatattatatttagaaagaaaaataatatgttgaattttggccgaaccatctcgcgcgcattatactctttcatttattgcgtattggtaatctgaacaaatataaaatatacatatatactaaagaattgtgattaaaataaccaaaaaaatatgttgtctagagaatgaaaccatattcacatatatattccataaaagaattataattcacatatatgttaattgctaccaaataacataaacatgctgcagatattaaaattatctaagctaaaggatgataggaattattttaattggttaaggaaaaaaaaaaaactaaaaatgaaagattttgcatctcgatataatatattactccaaaatattaaatgtggttggcgtagggtgaggtcaacttagggttgtgtcattagcgacggctttgagcttagactccacccacccccttcccttcgtatataattaataaagaaattaatatgtatgtgtagaaaaggagggaccccacacgaggattatcgaagcaatatacccaaagtcataacactcatgagttgccacttgttctcttgattttttaaaattaattaatttctaattttctttctaacttttctaatttctgtagccaacaaattaatgaaataatttaccagacaaaaaaaaaaactaataaattaattaaattctcgagtatgatgatacatttttttttaacaatgaagatttgaaacactattcaaattcatgtaatttctactatcaaaaatacaaaaatgtagggtccgacgggtccgatgtatgtgctgaaatgcgagagagatgaagttgagttatgagaggggtatttttgggttttagataaagtggctatatatttttaatggtgatatggattaatttaaggataaaatattagatatatgtaagtatagaaaatcaaatttcttttcaaaaattacaaaaaatatgttaacacggaattctttttattttaatgattttgaacttttttatttacaaaagaatgtacttcaataaaaataataaactattttttgtcataatttattatagttgtattatacttgtaagagataatttttgattgtttaataaattatttataattgtggtgaagttgatttactaattttttatttttttttttactttttgttaaaaaaatatatttttataattttagaactttaaaaatgcatttattataaaataaaaattttagattgtaaaatttttaataaaaactttgggtgagtgatgtagttcaaaatcagattcataatgatcattatgcactcgaaatatataaatttcatatcatacattaaaaatgtatatttacacacctttaaaagtaatctctcccaatatattgtcaatttaattatagacccacacatattttatgttaatttcttagtaaattatttttgatcagcgaacttcactgaccaaaaccaaataagtctccctaatatgcattatatatggcagtgtccacaccacactttgtcaaattgtcaatgtgtgagactctatctaacacccatctcttatatataattcttcaacacgagacaagctacatttctttttcttccattttttttaagaaatctgcagtatgtgaacttatttggccattaagagcttccataaatattcactccgttt

SEQ ID NO: 17502 - DNA, 3589 bp, Cannabis sativa
ttacaacaacaaagagaataacagcaggaattttctcatgccagatacaaacattatcctgcactaaagcttattttactaatctatgagccgcctgattagcagttcgtttaacataaacacaaacttgagaaatattggataaatgtcgtttaatatttatgactaaatcattaaaatatgacctaaaagatgatggattattaaccgcgttagccaataataataatgagtctgtttcaataaaatccacccataaatttagatcttgagtcatttgcaagccatagaacatgaatggtcctatttatatttatggttattggttatgtcataaatttttgtactaaattaaagaatatatattatgggatttgatgaatataacgaacacatgcttcaaattatatctgctcatttcaatagaccccacataataataatttaattatatattatgcatatcaattaaccttaattatattatttcatgtgctttcatttctataaagaaacacgatttgtttccttaataactacattattttacttactaaaatataattaatgtagttgttagaaatattaattaaaataaagacctagcttggtcctgaaacaaatacacctaataaaacaataaaaatatgcctatatatagtaaattagtacaccttgttaattattgttttaatgtaccacattaattataatcatccttgctgtcaacaattaatactccttcatcacgttgtgctttaaactatttctccatcgatctaaaaataacactcacaaattaacccaactacttgagcatgcttccaacactaataacatataatatttgttaaaataatatgcaatgtatgttttctaaaaagaaaattgtaataagtgagctgaacattaatatatattgtacgtatgatatacatttaggacccgtttagtataccgtattatattatattgtattgtattgtgttagtttttgtattatattatattgtattagtattatttaatacaatacaatgtttggtattgaattgcattaatagattgtgtgaaattattataatatattttaaatacactcgaccccaacaccaactacgggtccaggtcccgaattcgggtttgggttggggtcccgagttagggtccgggtcggggtccaggttgggactgggtccgggtttgagtccgggtctgagtctcgggtccgagttccaagtctgggttctggttggggtcccgggttagggtccgtttttgggttcgggtcccaggtccgggtcccggtcccagtcccgattcgggtccagggtcccgggtcctggtcccgatccgtgtctaggtgcgtgtcccaggtccgggtctcggtctacagtcccggttcgggtttgggttcgagttcctgttcgggtttaggtccgggtttcgggtcggagattggtgttgacatcaaatcctttgtaaatagtataatacaagctaatacggatcgtttgttgtgtattaaataatacaacatacattgtattaaaaattttggttgtaataattaacacaatacattgatttatccaaatataatgttatttattatttaatacaatgccacccttatacactgtactaaacgagcccataataatttatattttactaatttaattaacagtgcaaaaatagtatgtatatattaaattggttgggagaaatgaagtagtacactactaaaatattcttttttagtgggtccacgcttgagattgaccaatctcgtagagtattgttattagacactagtggtctctaatgctttttgtaggtggtactccacggttagttagtgatattctttgaaaattatttttttaaaattatatgagacccgatatatacttaattacaccaataacgatatgacactgagcgaaacactaagcacaagtgatacctttagcaactctcatcttgatatgcttggccttttgagaatctgtatgccgagagatatgaggtatatctcgggaggccaggagattggtcagcaaaatataaataaaatttaatatgtatattaaatatattaaaaaaattgaaatattattttcttttattttaaaatagaatattatacaaataaatagaatagttatcatattaaaatagtagaaaattaatttgtttgaataacattccaataatttaaattaatgtaatcaataaaaaaataaaaataaatttttattattttttattttattactcccaaccaaaccacattttcaatatatttttttttttttatatatatatatatatatttccgtctccatgtctctgttaataagaaaaaaaaaaaaaaccaccttggcctcatcaaaatctgagaggaaagagtaccaagaaaatatatatcattgttgaattcaatcaatttagagattactagctaatttcttttttcatttttacattcatatattaaaatgaatcatatatactttttcttgtataaaatataattataagatatatatatatatatatatatatatttatgggagcgattatagaataaggtggcgtatagaatgtaaataaaacaatttttattttattttttttatttagttatattttaaagtatttgaatgtcctttcactgaaataatatttttttatcattttagtaaaataattattatattttacaaagaaatgaaagaccatattaatgcacaataagacaaatttaatatttttttataaatttttgatgcattttaaatttgattctatttctattcttattctcgttcctattcttaaataccgaaattgtgcatatggggtaaagtctaattaatatagaacacccttattgttcatatggtgggttacaaatgtattatttttacaattttttatgatggtattaattgtagtcataatgagttatttacaaattttaaaaaaattgaaataatttattgtataattttttttttctttgctataggttccccaaatatataagagcataagtgtttatttggggctagctcaaatagctatatagaatgtattggagtgtgtgtgaggtcataatatcaaacccttaaattaaaaatatatatatattttgaataaaagtaattcattaaatagcaatatccgctattacaatagactgaacagcagaagaaacattactcttagtaaaaagacgatcataccaaaaacaagcactgcgaattttaattaaaaatatatttcagaagcccatctttaaaaaaaaaaaaaaacaagtgcttactttgttcatttttaaagaatgaaaaacgactatttttatcctaatttgaacactttagattgttttgaaatttatgaaaaataatgtgttgagatcgagatatttctatagctacactaaatacaaccatacaaaataaattaggaagaaaatatattaaaacgcttcaattattagactccacactgcaaggtttttaagccgttttctatttttttttttttttgaataaaagatgcaaaactttattagata

SEQ ID NO: 17503 - DNA, 5781 bp, Cannabis sativa
cgctcttccgatctgagagagagagagagagagagagagaagaccttgtatttggagacggcgttgttaaaggcactgatgagagcagaatcatcccacaaatcaccttgtttcgccataaccacctctctttttatgagctaagctaaaacctctgttctcactttaaacccttctgcgacattattttattttattattattccattatttttttatattataatttgtttttgcgaccactattcacttcataaaaataaatatatccaaacaatcaggactcggcctatcctatcaacgtttcaaatggctacatcattttctgtgagcttattgaaattttcccagaacccaaacactactactactactaccactacaaacactctttcctttctccaacccaatcattatttttcttttagacccacaaatccttatctccctcgcttttttaccaccaatgacaatggcaatgcctctttcgacaattcccaccctcgcttctcccgctcccacggtctctcctcactccctctttccaccaaccattacgaggtaatcatccctcccctctatttggttgcccagaaattttgtagttttagttttttctttgcttgtaaggcaatgtttattgaggagaatgaattgctgaaacttctcgttactttctacagatgtttccaattgacattttatgactcatttcctataatggatcgctttgtttactaaaagaatgtatgaactttattgcttgggtgacaagagtatggaaatgtttttaggatttgtccatgctttttgctcatgtttccaatatgccaactttatctcatcttaacatagagaacatattttaatgatcatgtttcttgttgttgttgtcagaaatctatattttgcttgtacatgtatgaatttcttatgaaaccttatatgtttgattcgtaataacagaattaagatgtaactttccctgtctagttcttatatttcaacaattggcttaaatgttcaaatgtctgtaagtggtttttcttttttaacacttcatgtgtatcaatctgagaaatgacgaggagtgtccaactccttaattgacctatggttttcaactctgctgtaagatcactcaaatcatagctagactgtggaacagttacgtttgggattaagttatgtcccctttgtagttgattattttggtttcatttaatttacaatactattttcttgtaaaaacatatgcagttctttgataattcttctgaggtggaactgagggtacatttaaaggaccaaaatgttcgaagttccaaagatgtttttgtggatgcaaatgaaacctctttaacaatcagagcactgaattctgggtctcctaccacactaattgaaactaatcgtctgtttgacagagtaaagcctgcagaaacaatctggtttgtagaaagttgaaaacctaagttcatgaattgtgtaagttttatagaactcctcatgtttaggatgataattagtattattgacttttttttcaacaggttgatagatgatgatcagctggttgtaatcttgaagaagcaggatccagatttaaaatggcctgacattatggagtcctgggaatccttgacagtgggatcttcacaacttttgaaaggagcttcaatctacattgttggggagtcaacaaatatcaaccagcaagtggctaaggaacttgcagtgggtattgggtaacttctccctttttgatatatgatatctacaccttttgcgttaattggaaaaacgaggatgctagtaagttgtaattatcctactatgtgcagtataatgttccatttaattatctatgttcctcattaccagtccattgttggttgtctgtaatccttcacgagcattcaaattaattagtcaagtcattattatttattaataactacttcttatgagagaagtaagtcgtcgtgccttcagtatctgtatttggttgaaaaaaagaaaaactcaagtgtccaacatgcatttattgtagtattgtatcatcagtaagtgcccttttactgttaaaacccagtacttagcaagtacacccgctacaagttaagcctaggtattttcacactttaattacctttgttgaagattgaattggttttcaggtatacaccatttagtacgaaggagctgttggaaaatttttccaagcaaactattgattcatgtgagtacatattctcttcccacaattgatcatcgattatggccttttcacctcaattgaaatcagttcaataacaggtatgaagctaagtgaccaagtctggctgtagaactactgaacttttatggtgcataaagggactaactattagttatctacatgttatagatagtcaagtagataattggtggatataacaatgaacatgtagatagccactcagcaataatcttctacagttttgcatatcttttttagcattgtcattcgatgaactacaactatggagctaatactgacatatccttatgatatgttgacataaatgatattaacctaaccagtgtaatgtaattaatatcaggggttctttctgaaggcagtgactctgtagctgaagcagaaagtgctatattagaaagtttaagcaggtactgcctaataaattgtttatttgtttgtttgttgtacgattgatttgctattgaaaatgtaaccatttctttgttttgcctacagccatgttcggactgttgttgcaacactgggaggacagcagggaacatctcgaagggctgataaatggcgacatttgcatgcaggatttactgtgtggttgtcgcaaactgaagctataggtaacttgccttattttctcagataagggacatctagctgtgcttattattccttcttcctgaattttttttatagactcgtgatacactttacatatgctaggagggccaaaaaggattaatcaaataccaggggtaatctgggtagtttgctagtgacatgataaggaatgctttgggaattgtgagtgagtagtggagatatgcatgagttctatttgattgagcttggctcttggagagtgctggtctctcgaactcctgtgggtttactgtttcattttcttttgcattcaataaagtatctccattatccctctgttttctggttgttttgtctggtttgtatcttcattacaggtagggttgacaggcctatgacttgtctggtttaccattaaaaataagtaacctgtacctgataagctaggtccatgtaattagtttctttggttcttttggtttcttatttgttttaatcctattggctggttgtaatcttgggtggttaagtcattaacggctgaagcctataaatagaggggtgggagcttcatagagggggtgtgaaggagtatttgagagaattcttattgtagagaccaaatatcttgaaagtttggaattggagagaacaagcctctcgaaagcttaggattgtaatctttgttttgattttaataagaaaccaaagaggaaattcattgattcttgtgtgttgtttgcctagactttgtaatctaagaaaagtctatcatagctacatcgttgtttttcattaacatttttatacttatcaaatctgcaacttgatccttgcttcttctctcaatttcctcgtacttgtttcccaaatccatgatatagcaactaaataagattattattttctttcatcgatcatgattgaaagacctttttaacttttgagaacccgggactgcaccagcaaagggatttaggtccccaaatccacattggtgcaataattgaagaaaattttaatcgaaatgaaaagccataatgaaaaggtagtcttaaacaattcaacttggctttccaatttccattggtatgagctggaactctcctattttatagcttggcttatgttcagccaaaagtagagtggatagaggtgcagcaaatagaatgcattattgaattggaactaaattaatttgagaagtgctacattttgtgcacttttggcccaatgaacatgtgattaagttgcggatcattctagtcaaatgatagccttcttacctattttgcttgaatgagattatttaattttatataattattgagtttatttaaatcatccaactggataagccattcatcagttttatctatattaagaggaaatatagaagctatgcttttgtatttttttggttttgctgtgtagctggtagtgtgttatttggtttagtttgttcttctgtttgtagagaaaagtcagagttactttggactagggggtcttttgaatcaacttgtgcatgttttggggcttcaatcccaagattggaacccttgttgaatagagatcgtgttcattcatttctagacatctctagtatcttctcacaactgtgctgggttttataggcatctagaagtactcctctttgtaatcaaatttgaaactattgtaaaaacccagaagctataagcctgattctcattagttgcataataatttttgtaatcaatccccgcgtacattcttgcagatgaagaatcagcaaaaaaagaagccaagaaacacgttcaagatggtggatcaggttactcaaaagcagatgttgtcgtcaagttccagggctgtgatacagatcatcatgccaaaagtttggctcaggcatgcttgagtgccctcaaacaattaattctagctgacaagaagctcccaggtactccatactaacctattatttctcttgccttaccggttagttttggcacggtgatacttgttcttctcgttctttactgctagtatatggtgaagtgagataacgaaatataattataattcaattacttgacgattaaccgaagttccatgccctgatgaaacagtaaacgaaggtagagtaactttgaagtcaagtagggcacactatataaactgataataaaaaggtttatgaataacttcatttatagtaaaacatctatttccaacttcacctgccatattgtggttactattatgtttatccatagttaaggtttatgaacaaaacaaccttaattatgtattcataatatgtgatttgtttataattttttggtcgtatctggccaattacttgtgtgtgattttgaaggtaagaagagcctgtacataaggttaggatgccgtggcgattggccgaacattaagcctcctggttgggatccatcatcggctggagatagagtatcacctactacattgtaataaagagttaaatgacttttgttgggaaatctaccatgcacagttgagctttcatttccacatgtacattagttgttctgtaagagtcaacatatttttcttattattattagtagtttccgacattaactaagtttctcttgcaccacggaaagctactggacaaattgcacttgttcattttgttaatgcccaaaaagagagttattttcatccctaatataaatagtgttatgacataaatcaatctaaaaaattcaaaaggtaaattagtctatggtgtttaccgagattttcagaaactaaataaatagagctgcagaaataaataaaacaataaatagtagacaagtaatttttacatggttcgaacgttaataattcttagtccgcgagtctgttgtattggcctcttaagcaagtattttgataatacagtatgt

SEQ ID NO: 17504 - DNA, 3394 bp, Cannabis sativa
tgtgttaatgagaaattgaaagccatttgagaagataaaatagccatcgtgctcattatcatataactcataatccaattccaagctcttctccaatggcttccatttggtgccactcactaacactcctccccattcacaaatcatcatcatcatcatcattatcaaatcccaccttagtttttccatccctcgccaaaatttctaaacccaactcattttctcgacctcttatcaagttatgcagctccggtaacggtgccacgaatccaacgacgtcctcttccactgtcccagacgaagaagaagctcagaatttacccaccgagttgtccatgagtatagataatcttctcagcttcttcaatatcaatttgggtcattggaatggttctttctttgtaagcatcactctttctttttattaccaaagtcaaaataagtaattacattttatttcaaaatgaatgcaagctgtgtctgaatataaattcttaatttgttggttggtgaaattgtaaccatttacaactaataattttagggtgcaaattattacatagtatagtaattataatattttaaaatagatgtgtgtttagatataaggtgataattactcatgaaattaattcttaattagtgtaattatacttaattctgattaaatacgaagcattagtaggaagaagtggatagtataattgagacttttcaattatttctaattacacagtttaaaataattacgtggctagataaacaggtaaaactgtgtaattaccttcaattacacttaattccaatttcctcttggctttccaaatgcaggcttagtagttttttagtaattacgtagtataattacatccaattcccattgacacgagtggtaatttacacctctaattactttcaattacatcattacaatgcaattaaatagtcatacaaatacataaaactgtataattatcttcaattacattcaattccaattccctggtgtcttttcaaatgctccctaaatgatgagtttgtattgtttatttacgatttggtctagtcttaatctgtttggcagcctagaaaagaaaaagaaaatccaacttgggttatcctagttttgggttaaggcattgtggtttatagttttggtttgaatggtctgaaaggttctgaatattttgctaaatgcccctttagtaccatgactgcattttctttaaattacatattttcactctggtccttgtgttgaatgtgataaagttctgttttttatttgttctttttcagcaatttgatgctgggggaaaactactgcataaattggatactaagcttgcagttagctcttatggggaggatgacctcgccagccttattcaaacgtaagattataaaggagaaaccataagtattagttattgtgtatttcatataatgagcttactattgtcacattatctatagattatacattaaacaacccccatcaacagtctctgggtctgaggatgatgatgatgagctggaatgggcagaatacaagataaaagaaactaatatgtttactgtggataaatatcaacaggtggggttttccaacactttagagatgtagatttcactttataattgggtgaatttccatggagatacatagcttatagctttgttttgtttgtgtggtctcttgttttctgttgaatatccattgtaattagcctgcagattggctactttcccaatgagaaagcattttctctgaggtaccaaactgctggaatgctagaaaccgtgcttcgacaaggggttctaggggaagatgatattggcgaagaatcgcctaagtaagtggtacttagctagctagaagaatgttctcaagcattggcttctttccatttcacacttttattgaatgttttcttgccatgtagaaatctgaagcttccttcccgtcgcccttccatagtatgtgaaagttgtctgtattcattggagaaagacatgagagcaagagcattccatatcatggacccgaaaggtgttgtagaaatgcttcttattttcctcgaggaaagaggcgaagggttgctcgatcatccttcaattagtcatactacggcggtaaagtcacatgctgcaactaattagctatgattctgattatgttgttagaataatcttccccagttctcttttctggtttcaggacaacacagacagggtttcaccatttcttggtaggtggaaaggtcattccttaacaaagcgaagtggcgtttatggagccacaattgctgaagctgacacagtagcatcacttgaaatggatgacaagggtaaacttattcaggtagtcactccaagcaaattagaacatttgtctaataacattttcgggtttaatttcctttttctaatcttatcttacactaaacaattttcagaatatggcttcaacatctgctgggggcgatgtaaccacatcggtgccatggaccggtgtcatgcttaacaatatggttatcttcgagggaggttaccaaatcacgctgttgcccggtggaatgtacatggggagcccttgtgatgtgtcgaggagcgtagcagagtctaagtcattccatttggagttctgttggctcgaatcgcctggtaagagacagaggttagttcgaacttacgatgttgaaggcttggcagtttcatctacttacttttatgagaccaaaatttgacattttataagaacagaaaatagactgaatttggttttgtacttgtgtaatcattggaagaagttgcttgcttatgatgatcattgccaattttcatagatggttaaatagttacaatttcttgttaaatggactacattgcaaatttgtgatgaattcagggacttgactgctgataaaactacttgaaggaccatttgatgttcccataaatttgaagaacaaccatgctaaaattaattttgatcattgatttttaaaattataattttccaatatcactttgtctcattgtaattcgctaataatctcttgctcaactagctatctctctcgagtcatcttgtgtttggtggtcgggtctatctagtcgtcttgagtagtcgcctcgagtcattaaaaaacataaaaaaaaaattgtaatcaaggtatgataaagcatgtgatgttagccctaaggaaaagaaaaaagaatggacttattatataaaagaacattgttataagatattagtagtgcttaagaagtgacattttacgattggttagcaataatttataaaattattactttatattttacggaacccgataattaattataataatagtcaggctcggccttgggcataggcgggctaggc

SEQ ID NO: 17505 - DNA, 6690 bp, Cannabis sativa
atatatatatattacttcacactacaaacaaattacatgcaaatgataatattttgggtttatttttgtattttttttttctattacacatatactcttttaaattagtataacttgtaaagatattcttattctaatattttttctctatcatttttaaaaataaatatatagtaaatttacaaagcattatttagtataaccaatgattgaaatcaaatgaagattaaaaacaaaataaactttgaataattaagaatgaatttgtaattttaatattaaaaaaatattatgatagctaacattaattttttattttttttaaggaagaattatatagattttttagaggaaaataacatagaaaatataaatacacaaaattataaaatttttaactaattaactaattgaaaggaaaattacttgccccaaaaaataaatacatatacattatattttcaaaaaaaaaatattaacttaattaattaagttttaaattttgtgaaaaattattctcataaaatcagtaaatattaaagagtaaatttaattaatataatatataatttatatactaaacacacacgtgcggtagcacgtgtaacttactagtattaagaaaaagtgaaaataattaaaaagtttggatgctttttttacagctgctaacttgaaagatattatgtgtctcttcaaaaggaataagatgtacttcattacaaagaagaaaaatattggacactccaacattgcttattttcataagaatgccattgctcattgctcgaagaaaaaaaaaaagaaattttattggctctatttttgataagaatgatattgaagtgttcaggcaagataatcttgtgggtgtctttcaagactatttctagtctatttttattttgtttctcttgcttgtgctgatatggattctattcttaatgctattgccccaggtcaattctcatatgaatgatcaacttactagaccctatactagtgatgatgtgaggaaagctcttttccaaatgagtccttctaaaagtcctggtaagtggtaaggatggtatgtctcaggtttctatcaaaagtattggaataatgttggtcctgaagttagctctatttgtctccgttttttgaatgagggtgggcttattaaaagtatcaattctactcttatcactcttattccgaaaattgatgaccctaaacatgatttagattttcatcctattagtttgtgtaatgtgttttacaatattattgcaaaatttatgactaatcggttacttaagattctgggttctgtgatttctgatgagcagagtgctttcctctctagacgtcttattacagataaatccatgattggctttgagtgtgttaaccatctgaaacagtgtgttaaaagtaaaacttgtgcttttgccctcaatcttgacatgtgtgaaacctatgatcgtgttgaatggtgtttcttatgtagccttatgagaaaactaggctttcatgagaaatggatcagtttagttctagcatgcatgtatcttttcgaatgactatgttttaaatctgaatggtgaaatattgggtaatattattcctagcaaggaactttgacaaggtgatcttttgtcaccttttctatttctaattggtgctgagggtttgtttgctcttgtacaacgttattgtgtgaatggcttactctcaggtcttgcttgtgagtgtactggtccccagatctcccatctcctttttgctgatgaaagccttttctttttcaaagcatcagtgtttgtttgtcacagttttaaacaattttcggattggtatggtaaggctcctagtcaacttgtgaattttactaagtctgccatgtgctttagctctcgaatttcttctagtgatgttgctgacatggctgctatccttgatgttgctatggttgttttccatgagaagttccttggtttaccttgttatgatgggcagagtaagaaaggtctttttcaatctctcaaagaacatgtttggaataagttgtttagttggaaatctcagtctttctctattgttgggaaagaggtgcttattaaatatgccatccaatctaattattacttactctatgaacttgtttaagctgcctactagtttcattaaagaaattcatcagctctgttctagattctggtggggtgatataatgtgaaagaaacagatgttacactgatgtacttaggagagatttttttggcataagacagcccgacttcctctccaggaagtgaagggcatatgaactcctctggatttgtggaactggagatgaactgtcagctcacatttaatggagcattgaggaaacgtctaggaacacccataagaggatgtgtcaaacgtcataaactcatcttttagtaattacacgataatcaagggtacaagtgacgactccattataaaggatcacatcaatcaagaaaggatgaaggctaatctcacctaaaacctaggcaacctactacgtaggttatgcatgccctatttcatatatttgggaacttgtgcatgcccaaggatggcatttaggataattgagactttctctcttcctaccaattgctataaatacccctcaacaaaattaatgaggggatcgaaaaaaaaacgcagaacattctctgtaagaaacacccatctattaataacagagactcgtggaccattaatgctcgaaccacgtaataatatatgcattaattcttcctaagctatcattattacattaaatatctggttatcgaaaatcttagtcaataaaattgagaaattaattttggactataaaatattgtccacgcatgtaggtttgacccacacgtatagggtaacatataaatgcccatattaattttatttattattttatcggttaaaataatttaaattaaattaatcaattatcttttaattattgaattaaatatactagataatttatttaattaaaaaagaataataaaataaaaaaaaatttaaggaggaaaaagatcctttcaatagtgagttacagatgaaggaaaaagaaactgggaaacctacatacaagctcaaaaggtcttatacttcttcctgcaacaaaaggcaaagataaattgggtgaaaggaggagatgataatactgcatttttccatgccaacattaaggataggaggaggcaaaacagaatactttctattgaatctaaagaaggtataagatatgaggattcagagcaggtgactaaggccttccttgatttctataaaaacctcatcaggaggaaaatggaaaataagaagcaagtgaaaagatccataatgtgccaaggaccactagtaactagtaatcaagctgagatattacttagagatatttccagagaagaagttaaggaggctctatttgcgattcctggatccaaggctccaaggccagatgactactcaagctttttctttcaggacaatcgggagattgttggagaggatctttatgaagttgtgtcatccttccttcagactggccaacttctcaaggaaataaactctactgttatcacacttgttcccaagatgaagtgttcgaacacagtgagtgactatagacccattgcttgctacaatgtaatctacaaagtagcaacaaagttgatttgtgctagactcaaacaagttttgcctgatctaattgctaagaatcagggggttttgtctatggtagatttatagttcacaacatcatgatatgtcaggacttagtcagacattttgggaggaaaaccactagaccaggatgtgtgattaagttggacattcagaaggcctatgatactctggattgggactacctggaggaaatcttataagctttcacgtttcctaagaagttcataaagctgataataaattgtgttcgaactcccagatactctttgatgttcaatgggactatgcatggctactttgaagctagcagggctttaaggcaaggagatcccatgtctccttttctttttgtccttggcatggaatacttgtccagaatattgaagaaagcaggggacaagaaggaattcaaatactttgacagatgtagagatcttaaacttaaccacctttgttttgcagatgatgtgattctttattatcatggagacttcaggagtatctattgtatgttgcaagcactaaaattgttttcttgttcatctgggttggaaccaagcccttcaaaatcagcagtttattattgttgtatggaagatagagagatccaaagagtggtggacatatcaggattttgcaagcaagagactcctttcaagtatcttggcattcatatatgtgctaagaggatttcaagcaaggagtgtgaaatatttgtggagaaaatgactgcaagaattagagtctggagctcgagaaacatttcatatgctggcagagttattttaattaactcagtcttgctagctattcattcatactggagccaaatcatgatcttgccaaaaaagataataaagaagatagaggctatttgcagggcttatctatggaagggtcaaagcacatcacaatgtccaagaaagcagggggaattgactttagaaaggtggaagagtggaatttggcagcaatgtcaaaatacatctgggcaatagcaaataaagaagacaatttgtggattaaatgggtgcacaatgtgtacattaaaggggaagattggtggagctatcaagctccactccaagccagttggtactgaaaaaagatagtgacagccaaggagaaatccaaacatactatcaaattttagcagctgatgtgtgagcagaattttcaaaatttaaaggcctgcaatctgttcaaaaatgaaggagataaagtgcattgggcctcgatagtttggagtagaatgaacatgcctcgacatagttttttcttgtggctagcagtacaagataagctacgaacaagagaaagattatgcagaattaatttgattgcagatgactactgcttgatgtgcaggaatggcaaagagaccctagaacatgtatttttctgctgcaatattgcagcagactgcctgtaacagatcaagatttggctaaattggagggtcattacttgttcacttcagcgacttgtgagatggcttcaaaagatcaaggtaaatagcttcaagaacagggtgtatactgctgcaattgcagctttggcttacactatataacaggttcgaaatggtgtattgtgggaaggaaaaagtgtgaaaacaagtcaattagttgccaaaacaaaatcagatatcttgtatagaatcaaaagtgtatggcctaagaaaattagtgtcaagaatagaatatggtttgaaaatttgtaaaagagatacatatatacttgttgatgtatagattatttttcaggtctcattttagatgctgttaagttgtaattagatttttagagtaatgataactttgctgattcataaaaaaaataaaaaaaaaaaaataactaatttctgttaattaattataagatatttatatatgaatatatatatatttttattttaaaggattaattaaaagattttattttataacattatatatgatatatctatctacatgtctatatatataaatgagaatattagggagagtgatgatatgagtttctatctttctttttaatttttcaaattttttgtttatttatttatagtttttgcgattatttataaccaaaaatttgtagaaaaaaactatttattggattcttaatttgtaactctcggtcatttatgtttatatttatgttttattattaatcattaaaattatttgtattcttccatttttttaaaaaaacttatttgtatattttgtatagctattactaatttctccatttttttatttatgttatgtttttatgattacataaaaataaatgtgtaacaaaaacattatttattttctttgaaactcttatcatttatgtttatatctccaatcccttctattatctatatatataatgtcacataccttaaattgaaattttgtgtccactcataattttgagattttttttttctttctaattactattcaatatcagtgttacttggcaatgactatttaattttaaaaattttgttatgttttttcctaattcgtgatgtttcattttttcagattatttatcaatggcaatggcaattcatttataagtctttccaatgtatattttgctgcaaattgttatttggtgatttttttttcttactttagaagactgtcactaaaattatctcaatgataaataaatatgcattttgatacaattttattatgcaattatctatctatctatatgtcttaattttttattttcatcatatatctttctatgtactaactttttttctctccattctactctctcttaagcttaattatcatgagtttgaatcctctattttgatcatgaaatttgtctcaacaacttttacttaatctttcatttagatatacttatatagagcacatatatattatttatatatttctactattttaatgaacgattctcatgtatataattgttctcaactatttc

SEQ ID NO: 17506 - DNA, 4719 bp, Cannabis sativa
aagttaataatatattatcaatcaatgccacgacggattatgccaacaaaaatataagttaatatgcaatgattacatgatataatattatatgaatataataataatacgtatagtttatatacatgggtggtaaaacttggtgtaacttttgtttgtttgtgtttaatttcatttaacaaaggaacatgattaatttaagccgtagggattaaagggattggggaatgagaggaatcattgtcatatagcaattattttaggattagttttaattttataccatagagattgatgattctctactctcctctcctctcctcttctcatcagccattcaagtggtccacacttaccatatctctgcactaaaccattaaaaaaggcatgtgtcatatgtcacttagcctcagtgtaatggctacttcccaccagcatgtggaatgagttgagttcttcatatccaattcttttacaaaaaattctatccaacagtgatatgtatgggccaccactactccttaaccccacataactacactactctactacaagtcaaagttcttgagcccctaaagagtggggcaacattatttgacaaaggagtacattaatacactttaattgttaaaaaggaggaggattttgctacgaaatgaagtttcataaaaagacacaaagcaagtggaaagaagaaacaagaatatgtaatctctctaataccatttgaacagaaaaacgacaccaattttatttagatgcagcatattgatggacacttatatatatgtgaagaaatagatactaaaatgagactaaagctatatatttgtagaatggattaatatggtggaccggaaagctgccttttccatatctaatttcaataagcagtactcaagtaggttttaacaacattagagcacaagatttgtaaaaccacattgtttgttggtccaacataccgaggtgtcttaaattggctaacagcagagcctaatgctaagtaatgatccattaatttctgaaaggttcccttttgaaccactcggagctcaagagcaccaatggtgttaactttgcgcgagctgatgtagcctgcatcgacgaaagatttgtccaaacagttgcagcattcgccaagaatttcttcactggcctcaccacttagctcccagaagatgacatagtgacctggatcagtggacatgtcaacatgactagtaaagtcaaccaaatcttgtttctcaccagctaacagcttggctgcttcttccacagctagctgcaaatctttctcagtatttttgtcaatgttgactgtgagcaaaagatttctgcggcagacgaatttgagctcaggggttgagttatggaaccccattaccttcactacatctcccagcttatacctgtacaaacctgcatattaaacaaaaatgttttgataaggaaactgtgggaaaagttgacttaatggatgctgatgggaaatgttgactctatcagcatcatggaaagccattattctaggccattacttaatgtgttgctccctgttggtttctcaccatacaccattaaaagctctgacgcagcaaatcatactcagaagaatggaagacaggtcctaacaacaacttatggttgcttgtttcaatcactgtccatatacaataccatgacatcttacagttaatctaagttgccttttatgtcccttcttccatgctcattattaaatttagacagcataggattattaaattaatcaaccccatccaaaagaaggtttaagtatcaggtttcatataatttaaggtaataaattttaaaaccgctaactaatcataagacgtcattttaaaatggtgctactagatacaatagcaattcttgatgatatgtggttgttattattgactatgaagtcactatgtatgcacttacttactacctactctcttactatttgcacttctgtgatgcaaataaatgtataattaatacagagagagaaagaaagaaaagaaagggtcagcacatgtacggcaaaattaccagaaagccctaccaaacacaatgtcatgctaatatattttcccatcatgattttccgaaggatgaaaaagttggaccattgacttatttgctaatatactaaagatgcagtttcaggaagactaaaggtaaaaatagccaattatacacatgaaatagtaactttagccaatatgatttttttatatatatttttgatacaacgttagaaaacatttcccgttagccattcaatgctaggatataaaaggatcacaactaatataaaatgctattaaagaaatgaaaagtgtatttattatgtgcaacttgacatatagaatataataaaatgtatgctaaattttttttaaaaaaacaaacgcgtctaccttatcacctcctccaaaccccaaaaaagaaaaaagaaaaatgctcctgtatttactatacattaaaatggtattacaaacagatagcagtttatagaaaacaaaaatgtataaaatatatgtacttgtatgtgtgtatatatatatatacaaatattttatattagagcagttcacatgggcattcgtgctttcctgtaatggttgcaacaaataataaacaatacatatgcaacctacttaactcaagaatgcaatagttgaggaatctttactataacacataatttttaagagttgtggcactattttggatgattaatttgttcacaaaaataattgtggaagcaagtgtcgaatccagctggtttagtcatgtcattgtcaattagctaatagagaatctacccccaagactacagaaaacccttactaataatttagataatgtataatgcaatagtgtttgtatggagaaggagtaatcactaagtactaccacaaaaatagaaactctactccccaactcatggatacacatggggcgcatttaattgagggtgtcagtgccactgagataaaaggacaatatattggaagtaagtgagtaaaaataagtaacatattttttcttgatttaaggggaccagaacaagtatgaagatgttaaaaaggaagaatacatttatagcttattgttagaaaaaagataatataaagtacctgcataattagtgacaagaatctcatactcttcaccaatcttgacctcagtgagacccaatggctttgtctctgtaccaatgctatcatttataggaatgaactcaaaatagccaatgttaggaagaaccacataagtgactaactcaggaggcagtgttgggttgacattggctccaatccatccttcagaggatccataatcagcacttacaagaggaacctcccctgcatagtgcctcaacttggccaagtaaggctccattgaccctgtcatgatcccataaatgtacttcacattgggaaaaagagctggtactagtccataccaattactcaaacttgaacatttgtcatagatcaaattggccaattcaggattgggcttcagcaattttcccattgcagctcgaaccgatggagtcgtaatccagctgcttaggactccatctcgaatgttagtacataactcttcccaatccttttccaaggttctaaaagagtggactatgctatgagcaaatgttgaggatatcagctgaatttcatccctgaatatgagtccacacagaaaatggcagtaaagagattggcgaaaatcaggaccaaatattacttcatcagggctgcaacactcagattggattgccatcatagttttcttatactgcgagtttcgaaaaacattagttgtagctgttcctgcaagctgaccccctttggtcttgaattgcttgctgctataaataaactgcaaagcctttccattccttataggaaattctctgaacaaaagaattatatatatataataagattagtatctgtatcctcccttttggatagaaaaaatattcgtatactttattcaccaaaatatcacaagattactgaattttctcatccgtaaaagggaataagaagggaacatttaatagaatcacagatattataaactaggtagttgaggtaagaaaatgcaaacagacaagaaaagttaaaatatagtagtagtacctgtttctaaaggcaaaagaagtcctgtatatctgcatggttgaatccatcaattcatcattgaaaggtacaaacttgggctttccttgagtagtaccagagctaaaataatagaaaaaatctgagaaaactgtagtttctgtagcaaaaataaataaaaaaatatattttttttgagaaattaaatacagtagtaggtaacagttaccttagtgagattgtagtgatgggttttccggtgagaataggtgaagtttccccatctgcaattctcataatataaggttcaagttccttatgagtaacaattggaacacaagatttgtagctttctgggtcagttcttccattgaggcctgaattctgtaagtactctgctgattcattttcctccaaaatctgcttcagggtctccctttggaccctctcaacatctgcagttaaggcttcaaattcatcaatcactatgtcaccgttgaactcttccatcttttccaacatacttatctactgtctcggaccaacagggtaattgagctgtgaattt

SEQ ID NO: 17507 - DNA, 7434 bp, Cannabis sativa
  modified_base (4067)..(4071): a, c, t, g, unknown or other
  modified_base (4120)..(4140): a, c, t, g, unknown or other
  modified_base (7104)..(7109): a, c, t, g, unknown or other
ggcccaaaatggtatttttttggccaaagagtcttatactgagcttttttatgcagcattaacaagaagccttaatggtatttgaataaattgcaatctatgcatttttaaaaaagaaatgtttagtattttgattattgaaaataattttcttcatattacaaaaaattaataagtacaaccatttttttagaatcaagttttaaataaaaataaacctaatttactttaattaatcaattttaataagcatttattagaaatattatatttatcactgagccaaatttgtagcagcattgcattagcatttgaattttaagttacgctaaaatataatcttgttttaataatttagaacggatgctctaatagtcggtatataagtaaatataatatgtgtagagatatactctagaaactggagttggcattctaatgaaattccaaatgtcagaatcactatactaaaatatacatgcgagtgtcaagactagtaagaaagaatcaacagattcggctttaaagaccaagcctacattgtatgggttgaccagtagcaagtctacaagttttcttatcaaaaaattactgtggagttggaaataatttttaatattgcaggaaaatcataccctacaaaccaggttgcgagaattaaacatagaaattacatttcaaaatttccccattagataatttcacataagtttatatatatataaatgtattttctaaaagggtgactcaaaagacaaaccaaccactcatttatagttgtagcagctgctagaggacaactcctagtcctaactcgaagtatttttccttgctgcatatacacgataaattgcaagtccaaaaacagcagcagcagcaccaactgcaaaaaattgtagcataaagtagtgaagtatcagctcataaataatattgtaatgggagtttgttggaaagtgcacctactccaaacagattctgagaaatatacatacccgacatacacatgagagaacggctaataagctgttggtggtacttgcggttcctcccattctcagtttcaggaatgtttaagtgaggtttctcagctacatctacaattctagtgaatatgttattcaaaaatcctgacttcacgctcacagaaataggagcttctattcccaattctcgacatatctagaacagaaaagttaaatttgcaaattatcaggattgaattatcctcaaaatgaaaattactgaggtccaatttaaatattgatttgtggaataataaattataaatattcttatgcaagtatatgtcagatgagaagggtaattttagtagcaacccatgagaagttgtataccttcattgaatcttgaatcgccattggatatggatctaggtcatccttagcagcgataagaaggcatggcacaccatagccgctttcttctccttgcctagcaacctccacaagcagttcttgcgatttttttgatgaatattcatctgaactgaagcaagaataataaagtcacgccatgacattggcaaaagccaaacagataaaggagcttacaatctacaatcaacaagaacaatatttttcagcacaaaaaaaaaacactactttttaagattcctccaaatactgaaccaacttgagaaaaccatggtatatagctggtcaatttccacaagaaaactaacacatgacatcagaagaacccattatccaactgatatcagtagctttacaatcaaaacctgcctacacatacatataaatgtctttctggtgtaaacttggcaagcacaagtggagacaagaaagagctgtaggacagaaaacttccagttgtgtgatcaagctagtcaagtaataaagtaaaagcaatgacccataacacaaaactaatatgagcatttaattatgtaattgcatcaaagttacctgtcatatacaaagacagccacatcacaaggtgcgagaaattctttgtttgtcagaaattttttaactccatcttcaggtatctctcttaatatgagtgtcttattcccctgctgcaacattatatcataaacatgatcattacacatactcatctaaatgataccaagacgaagaatagaattatatatgcaatgtgctatgtcaaagtaaatattgattgtccttcacctggacatatgtcaagtaaattttttctcaacatcagacaattttgctagtccatggaaagatcagcggaaatagatttttttaaatccaaccatttactagggacagggttgctgatagtacataccccaactcggtttacaacatttactgcaaaacgctcactggtaggtgcagtaatatgactctttgagaaaggcctgtaaatgattcaaaaaaaaaaaaattaacattctaaaaggaaacaaaagcgtaaattttctactaggaaaacaaaaaagaggattgatgataaatcataaaacttcacatgtaaagtcaaattggacagcataggcctgggtatgggaaaattttaaacaggagaaaccactgaaaataatttctgccaagcatggtttgactatagcaacctgctaaagaggcaatacctttccaatagtgaattcaaaatagtagacttgccagcacttttcggaccaaaaacaaagcattggaaaacatttctttctgtgttttgcactttacgatcttttattcttcttctattaacttggagcacggaagctggatcaccactgtatccaatgtacatcagattagccaaactacgcactggatctagtagtgtcataagggcccactgcaatcacatgatcatgtataattacaaaagacttagtagaataaagttattttcctttttgagagatatatcatcagaaaatggaaaggaaaaccaataaaggaatatagatatatcttatgtacacaaaaatgtcaggaagaacataaaaacaaatcatttagcttcacaagaatgtcccaacacccatcacccaactcctcccaacccaaatattttatcttataaataatattatgattcaatttctccagatagcatagcactacaataaaaacgtaaaattgcctgagctgtaaatgactcgtggctaattatatttactacaaagtgtatacatgtcgacatctaacttttaggcatagattatacagataccactagtttttcgccaaaactacaaaaatagttacacatacaccccgcttgggggtaggtttaaaaaaataaataaataaagttcccaattaaatgaaaataggacaaaggtgaaatttttgttaaatttgactatttatagggggttgtgtattaataatggtttagagatattactataattttgaaatagaatgtgctgtttcatcatggttttcctaagtttgtttggggatggaaatcatggaatgataatcatataagaaacacaataaatatgaaaaaggcaaaaccagttatgctgtgcgaagtatgagaatgaataggctatataggcatacagacctcagacagaaacccattaagagataaattacccagagcggttctctctgcagcatcctcgtaaggagcttcgttccaaggcctgaaatttaaaatttgaaaatattaagacagcactactcaataaaattttaagaaaacacaataaacattcacaaaatgtaagcacaacatttactaagaaagaaaacctaatagctcaagtcacctgtctggagcagtacaaaataactcatctagttcagaaggttttagatttccatcctgaatgttgccaaagcacatatataaaaatctacattagatgcatgtcaacattcacagcattaaactaacacacaagtacaaaataagaattttccatgaattaaaacatacattatcagtatcaaataatcggaagatccccttcagaaactccactgcttcacttgttagttccatggtctacaaaaaaatatattaagaaatctttttagaaaagccaaagagagaaaaatactaataataataataannnnnataataataataatgataatgatattgatgatgataataataataatannnnnnnnnnnnnnnnnnnnnataataataataataatgatattgatgatttattaaaaaaaaaatgatattgatgacgaaaagataaaaagattatactttcacttgccatttcttagatttgtgaaagaacaacaaaagagatcattacatagttttatgaatcactcttattagaagatttccagtcaatttagaacaaaacttggaattttcagagaccagtgatgatctcatgctcagcatagtaaaacaaaaacagttttaaattgctaacacttgtcccacacatactcctggaatatcaacttcatgacaatgataacatgactagtggtgccagtttgctcaatacttattttcataagttgctggaatgagtaccataaaacttagcccacacactgatctaaaatcaaaactttcctgtaatctcctttcagttatcaaatttgctcgaaatatcatttgtgttctacaatttacagcttttgtttgtaatttcaggatttaagttcaaagaggattggtaatactaggtaacatgggggagttcattactggacgtctatgtgactgaacaagctcaaaccacttgcagtacatctttttctacgtctagagaaattcgggaaaaaaaatagtttcaagtacatacttgaaattagttccccaacttttttcataataaagaccattttcaatgtgaaatttgtcaacttgcaaaacatcaatacttattttttcatcagaacataggtctacatcctttgagttgattcatagtgatttatggggtccatctcatattcaaaaccaaaagcctaagttacaaattgaacttattatattcacttatgactgtaatcaagcatgctgggttctttcaaaagacagatttggtgttcagcatacatttagaaatttccactttatcatccaaactaaaatataatgcataaatcatgtatctaaaataaaggattaatagtcctaatcagatattctaaaaattagcatgtatctcttcaattattcattgaatttcatagtattatcattgtatttctatcttatatttggctacaaatataataatcaaatgtagtgtgagacaataacctgatcaggagcatgtttagaaggaacaggaagaatatcatctctgagtttcaaatcatcatcgtatccaaacttcctcaggacagcccaagttgtctcaagacgccctttttctataaaaagagcatgaagaaaaaggaaaccagtaagagtaagaccaagttgattgactccgcctggttgtttttcttgaacaacccttttaacacccacaatctcagcaggttgtaaaggggcgttaaagcatttaatctgcacaatatttaggtaaataaataaatgtaaaactcagaaaaattaataagacactatgaaaccatcatggaaaagagaagaaacctgaaattcattcagctctgcatcactgagggcaccatccatgtcatgatcacagaggataaatatccttctcagtgcactaatgcatcgaggctgcaaagtttgtttttcttgatcgaacaagggggttgttggatgaagcactgctctttgagcataatagaaaacttcagggacctaaaattaagcaagtataattcttaaagccatcagccacctgactttataactaggaaattgagagtaagcactaaacaatgttaagaacttgtaaactatctcattgaaaccctttgatatttacatcagcatcataaagtcatttataaatagttatagtttataaacatataaaagacaagggattcgagtattattgaggtaccctttactctaccaagttttgtttcccttggtcaaaattaaactcttgctccactgtaaaagaaaaagtaaatggaataaaacaattctccatcttattttgtatttcttcatcaaaaaagagactgtgagaccacgtaatgcactgttgtgactaaacaaagttcacattccgatttcttaatggctaaaggttacacttacataaattaccaagaaaagggtaaaaaccacactcactataccaaataaaaatcacaatgaaacaggttcgtgcattctacaatacatttttggagccagctcaacacactaatcaaatgtgcatcatttattggcacccatatttaagagagaaagtgagagagatccagccacacacacacacacacatagtatataaaaaaataaaggttcggtttcttcatttcatttatacctgaatcaaagtagctgcagagcattctatgcaggtttcaatttccctgaattcttgcatgattggtgacatgagctgctctatgcttattggttcgcgctcatctcgcaaatccagcttgcaacctactacaataactggtaccttaacctaaccattttgtaagattagataaataaataactggtttatcttctaatagagtttttttggaaaaaccagctcattataaaagaataagagttacagacctccaattggcgaagttcaggaagccagtaattacaaagccgagtgagagtcattggttgatcacaagcatatgttaacaccacagcatcagctcgcttcaattcctcattgcgcttagttctactctccaaactagtattacattaagtacagagtaatattaaaacaaaatgatttgaaatttctaacgtcggttttgaaaattcaggcaaaatcatagtattgtacatgaataaccgaagctacttatggtaaatttcgaatcaagctggatcgcatatcaaaaagaaagacgaagttcgaacaagataatttcagggttcagccatgaatttacagacattattgagtgaaatcaatacaatggaaaataatagagattatattcctgaaataatctaaaaatagatagattattcctggagtaatatatattaatatatatatannnnnntgtgtgtgtgtgtgtgtgtgcatctatattatgtatacggacctggaagaggtatcgatgatggtgaggggaacaaaatcgggaaagaaatcggctggaaggcgtgttggggaaagtacagaaggcacgttatcggagaatgattcggtagcggccgcgacgatcaagctcgatttaccggttccgcgatcaccggcaacgacgactcggatgccgtttcgtcgactggagctaaaattcccggtgaaaccacccgacattggattgaagaacaggtaatttggtcggaccaacgtgcctggtgaaactttgggtaagatttttt

SEQ ID NO: 17508 - DNA, 4507 bp, Cannabis sativa
  modified_base (3824)..(3825): a, c, t, g, unknown or other
atggttagttcttggagaggtctcttgaaccaaatcgttatgtccgaaggagaaaagttctcgaacaaaaatcctaattataaaattttcttaccttaaatttttgttattacctaatttacccctcaaataaaactacaactcaacttagggttattctcttcttcatcttcatccactcaaacctaaaccaacataactgtaacaacgctccggctccagctccagctccagctccggctccgacacacccagccagagttagctactcgtctcagtcggaaccactcttctcttctcttctaatccattgcaaaaggtactttcttttcagtcagaccaccatgtgtttgatataattgacatgcttatcatacattttagggtttaagccaagcagccatggatgaaagctcgtaactttcaatctgaaaatagaaaacttaatgctgaatttccaattaacattacgaatgttatagaaaaaatcacttctttttacaattatcagaaaatttttgatgttgtccaatggtagtttccttctgccatctctggcaagaacatcatcacctcttttatcattctttgtcaaaattcctcttccattgatataccgacagaatcacagccattgccgatcatttgagagaattctagttgaaaacatttatcacaaacggttttcaatggggaaaagtaataggttttgtactatggcttcggctcctgtttcgaacagagcgacaaagaaggcgcggcgagaatcgcctgagggattgcttaagcacaaatttgatatgtgttctaagcatggtgatgtagctgaagcacttaggctttatgatgaagctcgaattaatggtgtccaattgaatttgcatcattacaatgtgttactctatttgtgttcttctgttgaattgagtagtgaagaaatggtttcatctgatttagttttgaaaaggggttttgaggtttttgagcaaatggttatggataaggttgcgccgaatgaggctacgattaccagtgcagctagacttgctgctgcagcagaagacccagaaagggcttttgagttggttaaacagatgaaaagttttggtattccacccaagttaaggtcttatggaccagcattgttcgggttttgtaagaaaggagaggctgagagagcttatgatgttgattctcacatggctgaatctggggttgttcctgaagagagtgagctttctgctttgcttaagcttagttcagattcgaaaaagggagacaaagtttatgagatgttacataggttgaggactacaataaggcaggtttcggaatcaactgctgaagttattgaagattggtttgtgtctgaagaggctgggaaagtggggattgtggattgggatgtgaataatgtgaaggaaggagttaggagtggcggtggaggatggcacggtcaagggtggctcgggattgggaattggagagtggtgaggactcgaatgaatgaagatggtgtttgtcaatcttgtaatgaaaagcttgtttgtattgatattgatcccagagagactgaaaattttgcagcatcacttactagcttggcttgtggaagagaagttaaagccgattttctccggtttcaggttcgaacaccatccaaacatcctcagttaataaggtttttgtttattttgcatatgaaatgtactgaacctgaatttatatatatataatgctgagctcgtttgagttactttgatagttgatattattgagaaagagtttcttttggagggtctcaactcaatctgatatgaattcagttgcatggcttgaatcccaattaaaaattgatgatttctcaacagaagtttcaatgatttgtttaataagaaagaaatgaaagaagagttattgttctcactggatcaatcaagaagcaaatactttacacacacacacacatatatatatattcttcaggccagtgataaataatatgttttccagaaacatcatgattgatttgaagttaactcattcaggagtggctcaagcgtcatggtccattcgatgctgttatagatgctgcaaacgttggtcttataaatcaacacactttcaattttttccaggtgagttttactttacactgataaattttcaacaatgttcacagttttctttatgccatattagatagatggatcaacttatgttctctcttgttttttttatctgttgtagcttaaatctgttgttcatcaattacaacaaattagtccatcaaagaaattgccactaattatattacacacaagtcgtgtaaatgggggtcctgctcaggatccaaggaacaagaaattgatagaaatgtggaagaaggccggtgcactttatgctactccttccggctcaaatgatgattggttcgttcgcatcccttacttattaataatttttttttttcgaaaaagaaatcacttgtcttagactagccgcctccctttatgtattgagaacctcacttgtggcagagaaaaaccttggtaaacaaaaattttagtacaaattagagaaaacaaaacaaaaaaaatcatccaatctaatcacatcaacgaactccacttaggaaggaaaagttctcaaaacatttcgttctaaagatccaagtgactgtccaaaatctgattctcgccctaacatcatccgctgatttctcaattccttcaaaaattcttctattaatgaattggattaccttattatgcaatatcatttttgttggttgaacaagttgctctttcgtcggttggtttttgttagtgtgtatgatattctatctctacacccaaatagctcaaacattcattagtgtgttatttaacaggtactggttatacgctgctgttagttgcaactgtttactggtaacaaatgatgaaatgagagaccatttattccaattgttagggactagctttttcccaagatggaaggaaaaacatcaggtattaatatttgctagatgcattaagaaaaacatcatacccgaatcgctgtgggaagtattgactcgagtgtgttttgatcatattttgcaggctcggttatcagtgtcgtctaggggacctcagcttcacatgccaccaccttattcaaatgtaattcaggttagataattaatcaaactgctaatcaattttatatttcttcttatactttcatttggggtttccgaacaaactatgatgatttgccatattcggttgatgaatgcaggaatccgaggatggtcggtggcatgtgccaacgatgacaggtgatgatctcgaaaccccgagacagtggttgtgtgctactagagccagaaatacagattagggagagaggtgttttctatgtcttctattcaattttacttctatttattttttactcaattcaatgaggcaagtctcttgaaagtaattatgagagtgactttgagaggtttgtttctataaattgatgttaaaatgcatcatcatacatcgaaagtcattaaggtgttttgaaaattttgaggaacacttttctttaggcttgttaaatagatttgccatacctcttctaatcatataacatggtacaattaaacaaaatatatttttttaattagatactttggctgcaaatatctcataaattaagtacttttactacaaatatttggtaaattaggtactttcgcaataaatacttaaaggcatcagtggtgcgtagtactactcaagatgttgcattcttatttggtgcaattaagtattgagtctcatatnntttaatataataacttttatgaaatatcacaagtcattcttataacaccactctactgatatttaataacaatgtactatgaaaatacaacaaaatttaaataaaaagtacttatgctacaaaaaaaaaaaaaaaaaattgagttaggtacttatgttactaaaaaaataatttaatttttaagtgacgtataatttagtttttaagtgctacgtcataatgtagatacttgttatcataatttgttttcaaaattttgaataagtgaaaaatgtaagacaatatgcattatggctataatagatattttgtctgcctttaaataatttactgttttgaaaataaatttgaaaaaaccagctatacgtattagcactgtacataaatttttgtagatcgttcaactcgaataacccgttcaaactaaatcgaaataacttgacgaaagatataaactgaaaaactcaacgaaaatataacattcccaatctttatattgggcgggttgaaaataataccaacccatttatcaacccgaactaacctgaccaacttgattaagagggttttttttttcctacatatttatatgcttttattatatatattggaaaattctacgatgcactcccttaaaatggatatattgatgcacccctatttgttttagcatccgaaataa

SEQ ID NO: 17509 - DNA, 1904 bp, Cannabis sativa
tgtattccctcctaaacattaccctcaaaacaaagactcaaatacccttttatttaatatatgctagcccaccatactaatcccaaggcctaacaaagtggcacacaatattttatatatggtatcaacaatccttgtagagtgctactagtccacagattcaccccctaaagatacgatttattagtcaaatttcaacaagtacaaagtaattggcttaaacaaaacttagattccctcttataattttggcgcaagcttgttgtactcctatttgctgaatgaatctctctaaagcactaaggtttgaacgaactcccttcaaattacttgatgaattctcgcttcctctcaatgcaagacttggtagaaatcttatttcaaaagttattttttactttcttcactttggaatttactagtcaaatgacacataaactcaccaagacataactaaacaattatcatttacaaaagaaacattctcttcccaaaatataagaaattaaagagtggaagagttcagcctatcactgttgatttatgtaaggataaatgacacccaaaatcaagctcaaaaagtctcgatacaaagagaattcattaattagttttcttacaaaaactcataaatgaagaaattctgtctggacagatatagaaagcgtgcagacaaaatcttgatctatctagtcaatattgtgaatctaaactccatcattcaaagctagattaatctgacaaatgatccatggacattacgaaatctagttagagagattaatatagataatataagaaatatagtaaaataaatattgagtaagaatatatactcaaataatccacatcaagtcgtgctttgcaagcaaggaaataacaaacaataaataaatattcttaaaaaagaaaatcaaaatcttttcaaacaacttctaaatagactcaaacaaacttggataaagtttaaacacaatttccttaaataaatatgaaaacgatattctcatttattctgatatacacggtttagataataaatcagactaaataaataaaattcacataaatataaatactaagttattatatattttatatagaaaaattacattatttattagcataaatagaatattctaattttaaaaagcttttcataccaaaacaagatatcaattttattttgaaatacttacataattaattgtcatttaatttttactaaatatgtcaactaagaattttataaaattacctacctaaagtgtaatagcattcacatctcatgagctaatataacttaaaatgtcaaaatatgaagaaatgttgttgaaaatgatttacatagagaaatattattcaatttttcaaatattatttttatatttttctatccattttcaattctttttcatttaatttttttgtttatataataaaatatattatgaatgtataatatttaaatgatatatattgagaaaatagataagtggttatatgatataatgtaaaagtgagtaataaaataaggataatggaattttaataaattattttaaagaatagagtagaaaaattaacgtgatcataatatcatattataagtgatttgcttttgatattacttattagttaaacactaaattatggatttttcttgacattaaacgtaaataatataatcatatatcgaaattgaattaactttaggtgaaaaatgggtaaatggcggtaaaattcttaaattttttattttggtttcactcaacccccaaaactcaaatttgggcggtaaaaccctcaatacgcccattctgttagcaatttaacatttccgtctattttaggtgttaagtgccatgttggactggacacaatgtacacgtgacacaatttta

SEQ ID NO: 17510 - DNA, 3785 bp, Cannabis sativa
tttatttaaaacaccttttttttttccgatggtaatggtttgaactcctgaatggtttagaaacatggctgtgacagtgaaggtggatgaatacaactatatatacatatatattatataaagttcagtactttgtttctgtgtcaatgatgagtaagaagagacctgttagagaatttaaaatgaacaattatatacacagactcaactttctgaatgattccaaagttgtgtccgaagtcaacgattacatactagttactacaatggagcaagaatttgttgctcagataagatgaagaacaagataataataactggttttacagcttaacactaagactgagactgcgcatgctcgggtttgtgtgagaactcgtaatctaaatggacaaaggcgcgctcaatttcaggaagttgttcaagcttctcctgcaaggattcgcctatgtcatgagcctcttgtaagggcatgtctgccggtaagacaatgtcaacctcaacaaagtagtgagacccgaaagtgtaggccctaacggtatcaatgtgtcgtatggccttgtggtggttccaacagaggtatgtgagtttctgtaaatattcaggagcagctgatcttccaaccagagagttgacattgtcaagaaccgtcattgaccatgttcgaatggtgtacaacgccaaaataatagctccaacgggatccatccaatcgtaaaaataattagcaaggagtgcagcaaagagaccaatgatgttggtgatgacatcaaaaaagtgatcttgtgcataagctttaacaatttcgttactaaaaccgcgacagtaaatcatcagcacgaatttcaccagagtcaccatgagcataatgccaacaacccatctttcttgatctttggtcaagctgaactcaacctcatcagataacagggttcgaaccgactccaatatgatctgcagaccgagtgttgccatgacagacgcaaacacaaggatacccaacggctgcatacgcctttttccaataggatattgatacggatttggagtttgcattgaaaaagcagtaaaccaaagaataaagccagacaaaagatcaagaagtgagtccaaagtcgatgcaataattgccaacgaaccactcctaatcgaagcataaacttttgcagcaaaaagaatcatgtttgcaaaatttgatattctgatggcaaatgtctcgcttttcgccaacttatcttgctcttcctttgacattccaggtagaaaaccgcgctctgctaacgcatccatctcgttaaacccctcgagcatttctacctgttgctgatagtactcagccacgttatcctccggacctgaaatcatcaatcaaacaaaccaacttaacacaaaagctgatgaaattgtttgtggtttgcattgctatcatctgaaaatataaacacagctttttacacaattcaacttattccttttttcttctcaagcatcatggaaagtaggaatatagtaagaaaaagcaagtgagaatatattccctcctactatactatctactatagtgggactctcaagtcaaacatgatatcaacaaacacaacaatgagaggacataaattgaatgcaacacaaaataaaagccaaaaatttctagtaaccctccctcaatcatggtctgtgatgatcaaaaatctatacaaaacaaaacacagtagtaggtaggttaagactaagagggtcaaacatacaatgaccatcacacaaaatcagaaagtgactctgactcatagatctaaaagtttctttcgagcttttgaaactccaaaacacttctgcttctggtggggtaactagcgagtttcaacttttagcgaagtcagttctagtaactttttcagaagcttagccaaacgggaccatagtatactatctttttcgaaaaatcgaaaaaagaaagaaaaaagtaaaaccccatgtcttatctagcaaaataagagacagaaagctaaaaaagctctaaaattgtataagcccatttatggaatacccctcaagaatggaaatcaaacactgaaaacaatcaaatatggatattactaccattttattccaccctaaattcttgtagatttatagtcatagcagcaacaactttagactaattaacaacaaggaaaattcctcacaatcatattcatattcatataaatggaaaagcataaaaaaaaaaaaaaaaaagaaagaacctttgctaagctaaaccattagaatatttgagtcacaaagcaaaaacaaatagaatccaatccactacttgatataaaataatcccactgacaatgaatcaaccataggcatattaagacaaacaaaacacaataataaaacaacaaaaatgattactaaaacaagaaataatttaataataataaagaaagaatacttaaaactccatagcaatcatggaggccagggggtgagggtttcttctctttgtgggtgttggaaagtttaaagctttcgaagtttaaacgccaagagaggtcgccattggtggtgggttgtctcaagagggaaagttcttcctcttcgtggttgagattcagtagctccatagccattttccgtcgccgtggtcgagagagagagagaggttgttaagtgtaattgtttagaaagggtaggggtattttgggaaagtgtgaaagaagctattaatgttgtggtgagcaatgaatggagcacagccggagtgagtgtatactatagtgtaccattctcaatcacatcatatctctctccttaataactacaagtttcaataaatatatatatttgcattgaaaatgcaatctttgattatcatttaagctaattaaggaggagaaaggctaaaaggcaacattagtctctagcacatttcttcgtgttaaattattattggtataattaaatattgaattttatataacttaagaaaagaacttttagagaataccgctaactaatcgtaaaacgttatctataaaaggtatagggcactactagtatccaattgaattgcatcaatagcaatatttcacctatcaaaggatattaggtaccatgagtgtcttttattatgtatcttaatgagagagatgaacaattttatttgaaaaaatggcacaactagcactctccaacgtgtaatatcattatcgatataattaagtatcagatgccacatgatttaatattataatttttatagaatattgttaattaatcataaagcgacacttttagatggagttaggcaccactagtgtcttatatcaatggtcttttatttgagcatgctaaaaaacaccagtactatctaaatgtgatattttacaattggttagcaatattttctaaaagttatttcattaaattacatgggacttgatacttaatttcactaatagagatataattacttagagggtactaggcaccattggtgacttttaacatttcttgttttatttaggctaattataaattttgtaccctgaaattttacatgtggtcattactctaaagcatctgttgcgccttatgattggttagcgatattctatgaaaattattatattaaattatataagactctatacttaattgtactaatagtgatatgatacgttgaaggatgttaggcactactggcagtgacagacccagaatttttgatctgtgggggcttaattgttataaaaatatttattatttattttacattaaaattataactattt

SEQ ID NO: 17511 - DNA, 6777 bp, Cannabis sativa
ggtcacgaatttgatttaggtcagcgaccttgctgttttgataccatgaaactaatgggttttggttaaattaatgagaaatcagaattcgagcacttgattgctgctttatgccgtatgctaattttgcattcttctattcaatcttattgtctattatgcgactttaatctttcttccctaagatacagctgattacttaattataatatgttttttttgttctgttctcattacctggttttaacttgcattgtgttttatcacttcaagaacaaaatttctgtaaaagtgttttgtagtattgtgaaattatgtgatttatcattctcagctttgagtttatgattataaacaataaggcttaaagttctaatatgagcagggggcatggcaaccatcgctaaatatttcaactgttcttatgagcattgggctgttactgagtgaacccaatccagatgatggtctcatgtgtgaagcggtaagtggatatgctcatcaatggtcagaccttttttggctgctacttgttatttgcttgttccttaatttatgtagtgatggatgtgcagagtaaggagtacaaatataacagacaggcgtttgaccagaaagctcgatttatgactgagaagtatgcccgtcctggagctagtgggtgtgttcagtccaactcagattcaagcatggtaagtaatagagtaacctgttaagccttcactttcaaatttagagcattttgaaatttcagccctgcatttgttttttcctcttcatgctgttgcaggtagaagttgaaacaacagtgaatgaggcaaaacatgaaggtaacaagtatgcccttaaccataagaagatatttgggattagcaggaagccaacgctagagtctttggaccagtcacaggaaagagttagtgatggagaagcaaatgacaacgaggcttctaacaaacacccctttctcaaagactctagtaaccagatgaaagttgaaggaactaaacaagagttacaacatgtgtccaagtttaatgggaacaagcggaagttgtcactggaggcttttactcaacagcagaagagaaatgacaatgaacagaagaaggtgataccaaatcaacattcttcatgcatgtctgaggacctttctgtggcttctttggggtcaataacgccgcaagatgcagattctagcaggggagggcttcatcttatccgggatgctaaatcagtagatggtaacataaacatgaaatcaaagaagctgggtggactttgtcacaagcagacactaaaatcgttggaaactgtagatgttgctacggagaaaatatatgtgaatcctcaagtgccatctgagaccaatgttaactcatttgatgacggtgcttcaacaacccttgctgtagatcacattaaactacctccccaaaaggatttagttgacaaaattgaaaatgtgtcttctaatacaagtaataaaagattctgttctacaggaaagaagctgtctctcggactaagacgctcatcagggacacacaaggaaaatgtagagccaattcagaagagaccaagttctacagcactattaccattggagggcaagcaattggaaagtggacatggaaaccacgagaagcaagggagaggccagaaacaattactttgtcctctatcccgattgcaagtaagcaataacaagcacatccaacagcaggacaatgggttggacaagaatcagaattctcatcaaggtcaaaatggtaagcagcaggaagtggaagaatcgctgatatctgaagcggtaattgtcgtggatagtgaagatagtgaggaggaaaaaagtgttactttaaggtctaagccattgctagcaagaaagcgattaggcaagtggaaacttagagcctgaaaaattatgtttcttcaacaccaatgacaaataaatcaaagagatatcattttgccttcaaatatcagatttgacagtgttggtgtctgtaagtgggatgaggttcacaagctggagcatatgtaaattgtctgttttggccaaatatgggccataaaactagtgatggtgctgcaactttttgatatgaacgaaaacttaggtgtatacttattgtaactactaactagtaatacttttgttgacaaaagcaatcaaactagttgatctcaaacatatactcttgcatattgacctgttaatctgcaagaggaaagaaatttattacataatgtatactggggattacatgttttcctgccataggaaaaaaaagccatgaaagcaaagcacatttccaattctggttttactttgcttgttttcagtagtgtgaagcttcgttttgctagaagcatattcaaatacataacagaatagagcaccttgtttgtttcaactgataaggattctaaaggagttagtcctatacactttgcattctcctaccacttggcttgatcgcagagatatttgggactgaatcattacatggtttctatgagccatgactagtaaaatactaccaaagtaatatggtaaatttgatagaataaagctgctatctaggttccaatacggtaatagttacattatttattgatgcacttcttgaaatccagtcagttcctgatgatggtgatccggcactttttccactatgacagtatgcaggttgttttggctgtggcaatgacctaacatcgtttgagagcatggagataacatctgacatggttggcctgtctgttgcatgctcttgtacacatagaagaccaatatgaacacatttcgtaaactcttcttcggggtatgaacgatcaactgattcatctacaaggtcaatgctttcttcttttttccacaaatcccaagcctttagtcatttccaatttatataccaacaaaaccagaagaaaagttcaaatcagtctatgaacaataatatatcatgacattgtttgctggagactaagtagaattgtaaacttacaagttcaattagagtgagagttcctgtggtgttcttttttccacttgtaatctctagtagtagaactccaaaactatacacatcagacttgacagagaaaattccattcatggcatattctggagacatatagccactgcataaaatcaattgattactatcacaattgtattcattgcaaacacaaaaccaactcatgcataaatataaacaaatattgttaaaaagaaaacaaaaagcatttttaacttactatgtccctacaactctctctgtatttgccgtcaactcatttcgcccaaaaattctagccatgccgaaatctgatatttttggattcatatcttcgtcaagtaaaatattgctagctttcaagtctctgtgtatgattctcaatctggaatacttgtgaagataaagaagtccttgtgctatcccttcaataatgttgacgcgtttttcccaatctaaaatcttctttctaataggatctgcagttgaatgtaatattccatccatatattgataaggaaaaagaataataatataagagatttatgcataaaattttaacttgttacaaactaaccaaagaggaagaaatccaagcttttatttggcatgtattcatatacaagcatcttctcctctgcatgagtgcaacaacccaaaaggctaactagattggtatgttgaagctcagctattagtgttatctcattcatgaattcttctaatccttgtcctgaatgccttgcaagtctcttcacagcaatctcttgcccatctgctaatttaccctgcacttacaatttattcattggataagctcacttgggttgatacctgatttattatatatgatcttgagaattttaccttgtaaactggtccaaaacctccttctcctagcttgttggcaagtgagaaattatcagttgcagcaattatatcagcaaaactaaacaactcataatcctgtccttttctgcctcttctaagcttatctgcaccactcaaaacatgacaccttagctgaagaaatgcctctccttgactagaatctgaattttctgcttatagacacaatataaatttctacttttacttgtatatgtaattcttattttgattgtaacaactcttttgaactaacctgtctgttgcaacagcctaagttttcttctcctcctgtaaatcaaatagccaaaaaataatattgtgagaccaactgtggctgctatgatgcaccatagtatccaccttatttttttcttgcctccttttgaatctctctttgttcctcctacaatagttgtccctcctagacaaccaccaagatcatcatttttatcttcaaatgactaaaaactagattaggaaaataatcaactctcttatattttgtttttttacaacaaaatatttacctgttgtaaaccgagattcaaggtaaaaaccaaacccagagcgttcatcaagtaaaacgtcagatatgttgctcatgtaaaagcatccagtcccattctgatgaagagttacacaaccaatacaagagcaatttttccagcaagtagcttgacaatctatgagtgatatgtttgtgttataatccatgtaactcgatttagtcgaattagcatagcttcttatgggcacaaaaatttcagaactgttactactgcatgtggatggcttatgttctacacactcaactagatttggaaaattcttaccatgtttgcatagactaaccaaagtagtgttttcccaagaagtaccatctttggcaagtacatactgcacaatttgtccccaaaagttgacttccaaccttgaaacaatagaactatttcttgctttgtaagaaaagtacttctcttcttcatttgaaacaaaactgaactcgaataaatcagccctcctagtaagctcaggagcattctgaaaactcccatttttccacaccccactagtccagtaaacatcctctcttttccagagaaccaattggtttgtgccacctggatcaacaccaagcctaaaagctcctggtgtgagtactaaccaacttaaccaagaagaaagtgtccaactttgtccagtttcaaagttcttaccaagtttcattccaggtaacaatgtgttaattgggtaatcaaagctttgccacaaaacctttcctactattccattagctaatacttcattcaacacaaaattaccagagtccattaaagtggcactggcagtgacattattaccagaattaacattctgcatggggttcagcacaatgagttggccttttttgcttatgatcttcaactttccatcaaaatccaaggtgaaaacagcagaagggtctgggattggatacctgtttcctagccaaattacttctggattcttttctatgtttctataccatattgacaagtaagagccagggtggtagaagcctagtttgtatacaccattagctgaaactacttcatcagaactattcgaagatctcagctgttgaccttgcttaaacataaaagaagaagaagaggaaatagactgcatcaagataaaacatgagaatattgttacatatctcagtagtctagccatagcttgttttctttacataaactattcaatgaaaagccttttagtgtaagtttctgcactatataataatccaaactaaccttgagagtttctacacttgaattgaaggtcctgttgctgtttacaaaggtattttaagtcaggtcaacttggatggctactaggagacaggttattactatttctcatgaatctaggtccttggatattattagcattaaattatgatatgtatgttgtcatattctggtcattggagtagttggatttggacttttatcactatcaataaatatggcatatgtatgtgacatgactactaccaaaatatttgatggcgttttgttgggaggaacgaaaatataagaatgagaataggaatagaatgaaataaaatttaaaatatataaaaaaaattaataaaaaaattattaaattttttttcatcatgcattggaatggtctttcatttcattttaaaatggaattgttattctgctaaaatggtggaatgaccatcctattggaatgatattccaacactttaatatgcaaccaaacaaaagaatggaatggagattgtttcctttcatttctattccattttattacctctacgtcagtatagaaatacttttcttgttttttatattagcattcttataaggtactgtgtctattttataatatttattaaattaaattatataataattaatgatattttataataattattaaattaatatatttgggtggatttttaacattttatctactatagcgcatgtcatgctatgtaaatatatcaaacatatctttatttcattattttatgactcgtgactaaataaaaataaaagaaactgtacataggaagtttagaatagtataaatgaatattaaattatcgaaatagattataggccaatttttttaggtccttattataaagatagatattaaatagtatatttaaaaaattattaaaaaatatgtatattttctaaaaagtattttttttatttgggcctctaaaatgagtgggccctaagtgcatagggccggcctgcatgtattgtagagaaaattagactctacatcatttttatattgtcctcttttatttttaccctctttttta

SEQ ID NO: 17512 - DNA, 2750 bp, Cannabis sativa
ttttttacaatcccactaattttggtgtgccctgtggatttggaatccacacctacatatcatattcaatccttccttccttggatacttcttaccagacatactgtaaatatgttatcttataacattattaacattattacaggggtttacaaagattccgggtttacgttcagctaaagccatgatcagcttatttaacgatgctaggagtgttataaagcttggaaggtatgttatatatcatcagccagtcttgaatttgtttctgtacctatgtttaatatcataaagattgaaatgtgttctttcatgtttatagagaactaccatacttaagtatacactattttataaaatgttgttaaattcctgagtcaagtgtaatgtagctatcatgattagacttagtataaatagtaatatgttggaactggaaaagtgtaaggtagctatcgtgaatatgttttaataatagttttgaggctgccatgtatacttgttctctctattcggtaaagttgttaataacttgccatgaatgtgtttgttctcttgtagcttagagcattgcatgatgatgtgtgttgtaataatgaaaaaactttttattcttttatagcctgacttgtattaatacttgttctatatattttagatttgtgccttgacctatctatgagtatgtttataaattgtgtctggagttatatttttctatgttgtttacttcctttccagctcaaaaacgaggtttagtaaatagatgagaaggtttcagtcacgaaaatcttcttgaacacaaagcgagttatggtctcattggtcattacattattcttgtttctttatatctaatagcataaacttatatatactaaacaaattagcttttaacttctgtgagtttttctctgtttgatggggcatcatcttgtgcacattagtgactgactgtatggatggtttgacaagttctttactgcgttgccttgtagtataatttgattatggttcccaccattttacatcaatatgcagaagcaatagctatatacaacattttttttttgtttttgtataaatagttttcttaactgaatgtcaatggtaaactaatttctttatgttgcaggatttcaaaggtgtaccactcgggctcacatgcatgtacctcttggaacatttgattctaagatcaactcaaggtaagcaattgtgatagaattatttaatatatgtatttttttaaaaaaatcataagtattgtgatatagtgatttgagttggaaagccttactgcactaaatggattttgagtttttgagtgtagagattattactttgctcaccaaatatttgatttgtaaatgtttagttgccaacgaaagatcacacaaatcgttgtagttctaaatggagagtgaagctggtaatcagcccaagcatgaacgttcaaggacaaggtggacagcatcacttgataaggtatttgcagatttgattgtgaagcaaattcaactaggcaacagacccaacaatgtttttgacaaaaagacatggaaccacgttcgtgatgagttcaataagcaaaccgatctcaacttcaacaataatcaattgcggaagcacttggatgtcttgaggactcgcttctacaatttgaagtcaaattatgatcaaagtaacgaattcactttagatgagtcatgttgcattggtttcgatctgtgggaagacataggggtacacatatgctctaatcttttctttttattacattatttcctttttcaacactttttattgcaagttcttacttcttgttcttgcagccacaacagcctaggcctgaaaatatcaaagtgaaggactgtcccatatacgaacagctatgcacaatatttacagattcatcagctgacgggaagtacgctcaatctagtcactacgaagaattggacaagtctgctggaatggaaaatggggttttaagttcacatccagaaggggagatccctcgttctgaaaacccaccgccaccaatgccaccaccccaaccgagacctgcacaagtaaatatgtcatcagaagcaaagttagttaaggtaataactgataggaaaaagaaacgtccctcatccgagacagagtattctaacgatcaattgagaagagatcaagaaatgtgcgatgctatggtgcagaccatgttagacatgcttgctgcttcgaaatccaggagagttgctacatcacccaccagtgattacagattcaccataactaattgcatcaaagcattggacgagattgaaggtattgatcaacaaacctattttgctgcattggacctctttgaggaccctaacttaagagagactttcttatctttgaaagacaaaatgatacagttgacttggttgcaagggaagtgtgttaaattaggttagaatgtagatgataaggcccattgctcatagtttaagcatattcatgtggtacttaccagtttgtccatatcatgtttcttccttttctgcttctaggttattgcagtttgtttctgtaaggtgtttctacagtgcaccctcgaaaataggtctattgatgcatttttttgtgtttttgatatctagatagttttaatattttttttatatatggtattatatttgttgattgagaaattttgaataatttacaatacagaaagtagggtttaaaaaacgtatttttcacacgtatga

SEQ ID NO: 17513 - DNA, 3830 bp, Cannabis sativa
  modified_base (2081)..(2094): a, c, t, g, unknown or other
  modified_base (3780)..(3796): a, c, t, g, unknown or other
gaccttaaaagttcaggggtatgatttggtacatgtcaaaattcgaggggtaaaaatcttaattagcctcaattttattatttcaatgattgtttaaatactaaatcatccctatcccttcaaaaaaaaaaaaaatcatgcttcctaaaatttaatatcttccaaatcatgtccctcgaactttcacatgtactaaatcatgtctcctgaactttcatccatgttagactttttttttactaaaattggacaaaattccttaaattcaacaatctaaatagttcagggagtatttttaatgaccttaaatgtttagagagcatgatttgatacatgtcaaagttccgaggaaaaatcctaattagtcgtttttttattacataaagtatacaatataatttcttttagccacgagtttgggtaggccttagccataggtttacctcatcttagcctaaggttgaacttgaaaaaaaaggcatacaagaactctagcaaaattgtgctaatatttgaaaaataatattaactattgggctagataaaattaactattaaatcatgtaaaaaactttggtgagttggtgttatttagatatatcttattactaaatatatcatagttttttattatttaaattcaagcaatttattataagcatcacacttgtgttttgaccaatttctcaatctaacttatagagtttaaaatagtattaggtgcttaaattgtgtaaaattttaaaaaattcaaaatatataatttttcaatacaaaaagtagaatttaaacataatatattttatacgcgtgtaacaatagagacatacatgaaataaactatttgcactttatattcgacacgttaaattattttgaatttctaaaaaatttgcaaaatgtgtcttaaataacaacaatgtacattgtgattaagatcgattttgaaatttagtgggtcataaaaaaaatattaatcccttatttagagtaaaatgtgatatttttcaaaatcaataaaaaaatgtgtaattttaaagaattttttttgtgggctaggtggaccctaggtacatgcctaacccgtatattcccaaggccggatttggctgccgtataaaaaaattaaaattaaaattatctaaatatcgaaaatatgaagaagtgtatcggtacacccatttttaacgtgcaccttagagttttccaatttttttttttaaaatgaccaatacaccccatcaaaatgggtgtattgatgtaacccctagccatttcggtatttataaaaaaaaattagtttaattttttttatagtcgtgtacgttatagttatttaaaacatccggtaaaattttaagaaatttggaataatttacaatataaaaatcaatgtttaaatcgtctatttcacatgcatataaaataaaaaagtcacacgtgcaacaaactcttttaatactatttttgacgtgttaaatttttttaaatttctcaaaattttgttagatgtcttaaataactatagtgtatacgactataaaaaaaaattagactaagtatttttttttagataccgaaataaatgagagtgtatcgatacctattttaagaaagtatattgtagaattttccaaaaacaatataagaaaaatagtaagcatattaaaaatgtgagccattaattaatttcacgataaggacacctcacatgcagcccacgtactcactcattttctatctttattaatattattctctctattattaaatcattaataaaaatgaaaagtaaatcgtggactcatatatttattattttatttttctataaaaaaatatacatttagttaatcaaaacataaaaatatgtatttattttattgaattttttagatgtgttttaatatcctaggaaaattattttatatatatatattttaaatttacggtttgggtttttaaattagtttctcaggtagtttatgtttctatgtgagttgctatacaatttgtgttgtgatttagattgctccgctagttgcattgcaacagaggtttttatgtagaattctgtaaannnnnnnnnnnnnnaaaaaaaaaaaccaaatattattagtgcaaattctttatttatttttaaatattaatattttgtcatttgaacaattacgcatgtagtgacataaatgacctatctaatttattttatcttgtaaagtatatttttaggtgtaatactattttgattctgtatttttattttgtaattagatcttttattttattaaatggtaaaataaatttagtattgactaaaataatataaataggactttaagttaagtttttaattttttttaatataatcaacttaaaaataattcataatgcagaagatgtaattaattttgtcataacataaattattattaaattttattttaacaaaaaattaattcaatactatttaacattattttaaaaaatataaggtccaatttcttatttaataaaatagggtctaattaattatttttacaaaacataagatccaaaatgatattaatgttcaaatgatatacttcactattgttttaaggtatatatatttttaatgtatatttatcttctctatatttaaaaattaattttcaatcatcaattctttcttctattttatttgttggttcgaaagcctaatttttttttttttttttggatatttttttcttcaggattttaatagtttatatagtaaggattataaggaagattaatttgtaatttgtaaaaaaaaaaactttaattttgaaacattattaataatctttttctttcttagattattaattaattgaactaatatcaatagttagacactaaaactacttagttgactttttttaaaatatttttggaaattagtttatttaaaaaaaaaaaaaaaaatcctagaaaattttgaaataatattttcttacaatttattaaaaacctaaaaggaaaataaaacttaaggaaaaaaataattgtttctaacaatttatttgtttagattaagattgaaatttgattttaaaacataaattagatgtgttatgtaattaaaataaaataatgatagtttcaaattaacttagattatattatttgtaaggatatcaactaaactaggacatggtaaagtggtatttaaacaaataaaatgataccaaagtggtataatctctttatttatttatttattattatttaataccatgaaaacatgacccatggttttaaaatgcagttaaaaactaaaagataccacaaggcaaccttaatggtaaaaattatatttagtgttaaattaacactaaaattatattattttaacactaattaagggcacatttgaaaaactattgtgtaattagaattaagtgtaattttagtaattacgaggttaggcgcatttgttcaaccagataattatatagtaatcatgtaattgaaggtaattaaaggattttaattacacttttcaattcttatgaccccatgaaaatttggtgtaatacacaatactgtattactatttttagataattaataatgttaaactgggtaactactaacttatttgtcaaatatgaaaataaaaatttatatgcaattactacctgacatccaaacatacattgtattttaaaaaaatataattactactttagtaattatataatttcttccaaactaggggtgttcacaaattatccgatccaatccaatccnnnnnnnnnnnnnnnnnccaatccgcaaaatgcggatatccgcacttatgc

SEQ ID NO: 17514 - DNA, 2104 bp, Cannabis sativa
aaagctacacattttttcaaaaagaaatataagtcaaaaaaaaaaaataaataaaaaagaaaaattaaagcgaaagaggtattggggggacctccatatatacatatattaatatgtatatatatttaaaagattacagggaattccacttatggatatatatatctgcagttgaagacataataataataataatttaatagtgttgggcattgggtagtaattttcatatataaagtagtggtggttatacatattagttattgaggagtagtagtagtgtatgtagtgggggtgtgatataattatatatatatataagtgaaaattaattaagaaattaaggaaagaaagaaaggaaaatcagtgatatggtggttaatattattatggagaagaagaagaaaataagagatttgggtcatctgtatgtgacgatattcctctacttctttgcaaatatggctatgtttacatccattacagatgtcaccatgtcagccgtttgccctggtcaagatgagtgttcttttgctatttaccttactgccattcaacaagcggtactctcttcttcttcttcttcttcttcttcttcttcacttttgttttactacttcttttcctttttctaattattttatacaaatagacaacattttaaaatcgtcacctatattataagccacagtttttaatcatcagtaatttttctttaaaaaaaattagaattgtaaagtacgcttaaaaacagttgaaaatacattataactgtttaaaatcgtaaaaaaaatctcatttttcccgataattttaaacactcactcaatttttgttagtaacgttccttcaaaagaaacattttaaaaattatcggtaatagtgatttttatagtaatataacttacttttcataaaaaaaaaacaaataattatgtataaatttatgaaatttgtctatatatatatatatatgagaatctttgtttgtgtatatggaattatgttcacatatttttttttaagttttttgcagaaaaattatgttcacacattgctttcctttttcttaactttgaagtatatatatatgtataaatataacttaaagtttaattaagaatttaaattattgccataaaaacatatatacaaatgacttaatattcctttgttaaattcaataatgaagtaataaaacttattattatatatttgaatatttgaattagaaatgaaaaactttaattttaatcgattagagttagaactacttcttaaagaaaaccttagaaaggtaattaattaagaacttttgagtttaattaatattattaattaccaaatatatataggtgacgtaattgcttacgtaagaaagtcacgatgaaagtgttctgaactaaaatctaaaactaccaactaatagataagtgatgagtttatataatgtaacgcatttatttgatccaaatttctgtgtccttatatttattttatcatatactttttgaattattaattatttacctattcacaacaaaatagaatggtcccatttacagccaataataatacattgacataacatactttacgtccttcattgtctcttttcttttttgatgaaaattataattatcataattaatgcctacttaattaataataattcatttatttatttttgcaaattgattaatttaattaaactacttgaaatcattaaaggtaaattgcatgcagatgcaggtatgtatatatatacatatatatatatatatatttatattgatcgattattttcatgataaagctagctagggaataatatatatatattttcctatgaaagtgtaaagataaagttaaagaactagagaacattactttcttaaaagagaaaaatgaaaaatgaaaaaagtgtaaaagggttgggatatattaacgtatctctctttgattattgtattataccattgttgaaaatgagagaaaaatatatatgaccaaagacttaagatccctttatttttgttttttatcaagagagttaagtggtattttcagctatctattataatctcttaattaatttttgtat

SEQ ID NO: 17515 - DNA, 1945 bp, Cannabis sativa
tttttttaaaaaaaaaaagataatatttttttttttttttttaagaaaaaaaaagccataagaataatatttcaataataaaaataaaaaaaattgcaaattaaattaaaaataaaggaataagattctaaaaaggaggggcaccagcgggcactggactagtccactaaaattgaaatttgaatctaaagactcattcaacaaagttaatccaaatccagttagaaaacaccacacacctcaatcactttcactctttctttttttaaatattatatgttttccctataaaatgacaaaattagtttcaatgaaaagaaaaccctacaaatttaggaaattttaataacaataaaattatttaaatatggaaaatccaattatatctatttaaaatatttaataataaaaaaagcaagaataagcacaccgctcatgttaaaattacatatataaataccgaaacaaagtttctcagaacgccaaaacaaattgaatcaaaatcttttcaatccccaaaatccctcaaagtcccccaaaaaaccattctttggaaaaacaaaaccatgagcgcctctgattcttccgccattgatatatacacgaattcattaccagcttttattttgtgacacaccgaaatccctttttgttttggaattcattcttttgattttttctttttggtttcggctttcctgaattttttgttggtttcgccgaaatcgcaaaccgtagataatactagattagttgcagaggcgaagatggcgattatactgaaggagaaaacggcggacgtcgacattttaatgccgccggtgaatttctcaatggtggaagatggcatttatagatctggcttacctcaaccctctaatttctcttttctcaaaaccctaaatcttcgttgcatcatgtaagtcttctttaaatacacacgagtgcatgttctgtgtgtatatttatatatatacatatatattcgtatcctcgtatatgtttgggaaaagaaaacaaagaaagtgacagaatagagagaatttttttattttatttttttttatataaaaagtagaaaattggggttttgttgtgcttaattatttttgagttattcttttcaattaataatattctcttacacttttctgatttattcgattaatcctttgatacaaattttagaattagaaagattggtactgtttagagaagactaatatattcttttgactgatttatttggctgaatttccctttgaatttgactaaattttgtgtaatgttccagatatttgtgtccggaaccatacccagaagagaatttgaagtttcttgaggctaacaatattaggctctttcaatttggaatagagggcaaaacggtatgatctctctctctctctctctctctacgaatttcctgtctttttcattgtttttctgtatcaaaacattccctttctacttttcaatacaaggtctttgaatgggtgtaatcaaatgtctttcattgcttgttgttttgcaatgataaggcatttgtttgtatacgttattttaatgctcttatttcaagttcccaattccctatgtgggtttttgttgaaagtattccttcataatttaggtgaacaataataaactattttttttcccccggatcactttatttatttatttttttttataaagttggttgattaaattcttcctttgaaagaaacagttctcttaaggtgctaaagtaaactaaagcattattctatttcaattatggttttatgtcaagattgggaatctgtgggcttgtagattaaaatataattagtgacaactgtaaagagctaacatagcatgcaatgtacttatttgctatgtattgttttgaaaattgaatatcttaatatgtgtgtggtgcctgccattgttgtttaaggag

SEQ ID NO: 17516 - DNA, 5439 bp, Cannabis sativa
cgaagacttgcagtgattcaccaaggcttgcaatggtgttgaatcgtataagaatttttttccctatttctctatgtttaattagataacttgtaaaaaaaatttcctttattttttttatgtttagttagataataacttgtaaacacttggactaattttaaaatatttgtgtaatagatttatttagaataatgtatatatacatttagttatctgattaatttaatatttattatatgaaattaatatttaatttaaataaattaataaaaataaatacattatttattattcaatatactaattattatacaaaatataacttaattaaaaaattatataaatgatactaacatactacaaaacacaaaaaaataatataaaatattaataaaaagatatctaatatacaaacacttagagtaatgtaaatgtgtatttatttaactttttaatttaattttttatttatgcttattatatataatttatacttaatttaattatatcaataataaaataatatatataaaaaaattatgctaaaacataaaattgtaaagcgaaaaaaaagccataagaagaccctatgggctatggcgtcagttattatgaaataaccgacaccatagggaccctatggcgtcggttatttcataataactgatgctatagggccctatgccgttgattgttttttacctgtacagtgtcgcctggaacaccgtcggtagcaaattttaccaaaatcgacgctgaaagtccttaaaaatcgccatcaaagcctaattttgtagtagtatgatattatatattatatttttgctcacatactttgatcttagaaccggaaccatacccggacccgaacgggttcatgtcatagtatagtgttaaaatattaatttatttaataagaaaaaatctaaaaatagttttaaaaaatttatgccaaacaccataaaatttttaaaataacaaaaaactgttttctattctcaattttaaaacctaaaaactgaaaacacaggtaaaaactgttttctattctgttattgattttttttgttgttggatttctcgctcgtctaatgaggttactcactgtttaggcaaatgggaacttaatcataattgtaattgttttgctttgtttttgggaggtcagtctccatgtactaaccaatattctagtttcggtttaatgaattgtgcaattaattaatttgagcaatgagagaattaaattaattcaatagttttaataggataataaaaaggtaaaaaccactagtgatgattacatttacacatatatctcaatcaaattgtaggaaagtcaaaaaataaaaagtcatatgtaaaagtctcaaagcacacacgtaagtagcagtcatatgtatgtatgacaatatagtgtgcatatatatatatatatatatatataaagatggattagttaagggtgtaatcttgaaggtttggctgagtaggaaggagacgataagggtaaaagttattaggagtagtctgatgaagtgttgtgagttgaagaacactgcttggttggtcttctccaccaaatgggaattgatccaaaatatgactcattcctcccattctctccacttcttctatctttctcacatttactacttcattctgctcctcatatgttgttgcagctgcctgctgctcctttaactatattgtcattttatataattattattatatatataaagacataatcatttgtatatatatataaattaatatagtgtcatgtatatattctaaccagatgaaacatgtgctcattatcttgccccagtagttgctcctatatatgtacagtatcaaaacgtatgatcccatcatttcattgcaataaatataataattaattgacaaatatttgagatatatattatatggacacttagaatgagatttcacctttctctcgagattctccatctgctgctgtaagatttcaaactgcacatatataacaatactcttacaaattacataacttaatatcactgctcatttataaaataaagaaattgttgagagagagtactggtccaattataaaattagttaataccatataaataattatatatgtaagattccaaattatattattcatcccgtttatggactatcactagtactctttctacttctaaatttatttacatataaattaattaaccattactcttcgatcaatgatcgatcgaagaagagtacttttgcttaattattgtccaaaccatattgtctatatacataagtacttatatataaagaaaaaaattgatattatctatacatatatagaatatagcaattcatataaattaatatataggataatgaaataattagataaattagtgaaattaaagtaccttgcgagttcgaattttatgagaggaatgctctaaaacatgctcgagttcattcagctcacccaagcttagtgaactcaaatcttccccaatatagcgctgtagactcagttgaagattgcgggtttcgctcatgattcttctcatttcaccatgcatttgttcctacacaaattatttagtttaactcttacttgtatatttatgtgtattataattaattctagtttattaataggccatataagattctttttgaaaacagaaaggtaatctaattaatatatatatatatatatatatatatatacatacaatgtcattgtgctccataatttgagttcctgttgcgagttggtacttctgtattatattctccatgctgtaacaataaattgacatattaaaaacatgcatgaaacgtatagtcattaacaaggttgtagttttttttttcctaacaattaacaaggttgtaattatattcattaaaaacaatataatttacagtataatattcaatgaatatattgtgacaaacaattttttttatgcagagccataatttgatttttcagggcacacaagttaataaatatattacaaaataatattgctcgagtatattaaacaaaattatcttgtgacagaagcacataattaaataatattgctatcaatatatgtagtcataaaccctagctattactcataatattgattcaaatttcatcatcattaatttgacatgtatgtagtgtgataaatttgacatttcatgagctagtcttcctttgacaatggaccatttccagaaatgttcttatgacagaaaagatctgtagatctagctctactgtttacaactcaattagtaattatattaattatctgagaggacgagaaagactcaaaaaaaaaatgagtttatgattaagagaatcgaaatgttataacaacaaccccaaatcaaccaacaacaaattaaaaacaacatcgttagctaagacagaaagtaattattaataatataaaactaaagagatgatggtatatatatataccttaaagggtcactgcagaactcatataatttgccattagcagagaaaatgatgaggccgatctgggcatcacaaagcacagcgagctcatgagtttttttcaaaagcccagctcggcgtttcgcaaaggtgacttgtcttgtggttttgttctctattcttgaaatgttaatcttcccacgtcccattctctgcacctctaattcttacaaacctcttctatatatgtattaattaagaaaaaaaaaaactatacaaattaagaagaataaagaggaaataaaataataaatcaacacaacaaaaatatcactaaattctaatttcaaattactagtaattaatatatttatatataataatggatgggattgttaatatttataggattgttaataatgtatatgctatgtacttcttttcatttttgccccgtttttctcggatgaaattaattgagaggaacaaggaaattaaatgtttacaggattggaaactcttgtttttgtttctggaaaaaaatatattatatgtaatatttctttattttcaaaaataaaatatatagtaaagcatgaaaggtaaggaaagagaaaagaagaagggttttacagggacgacattgcagacctaactagagaaaagaagaaggattttacagggtttgaatatttctttatttttttaaaatatatatatatagtaaagcatgaaaggtaataaggaaataaagaagaagggttttacagggatgagatacctaactagtttctctcagtagttcctgcacttgtagggttagaactttgggaagaaagctttttatggtagcttgagctggccaactctatttgtaatatgtttgcctcagttatcttatgcaaatagcccaaccctttccttcattattacgaatatgccaaatacacaactctatttgtaaaagataaatatagtgactaataacaatatatgattaactcagatttaaaaaaaagtccctttcaaaagaaaaaaaaaacaacaaaaaaggtcacaacaaaaggtaggattagtttcaagcaatattataagtttgagtacttatacctcatgtgatccgttgagtcaaactaaaattaaatcagtataaatggtatactggttaataaacttagctatgtattcttatccattctgcagctacgattagctatgtgaaaaattaatcatcaagctggcttaaataaaacgaaacaaaaataaaatattttttttagaaaaaaatacaacatttatatatacattaaaagaaatgcaaatatattaatatgaaactaaagggtactactggtgactaggaccttccttagtgtcataccgctattggtgtaatttaatagcgcgtcccatataacttaagaaaataagttttaggaaatatcgctaaccaatcatagagagatcctatggaaggtgctgggcaccactggtgcccaatagcaatgctcattaaatttacatactgcagtcacattgctaaactgatatctttcttccctaatataaaaaaagggatgggttccctagacaaacacgatttttttttaacattattatttactaaaattttcagaaactaaaatttaagagctaaagaaataaaaaattgcaaaaataaatgagacgaagaattttacatggcttaggtgttaacaaatcttagtccgtcggtctattagccttaaatgatgtaattgatgttgtattttttagcaggaaaccctaactctgtattctgtatttctttagaagaagattaaagcttagtataatgtgagcagagtttcagctcttaggttctgatccccccattcgtatggaaatagaaaggtatttataggctataaggtcaagtatggacacgcccatgacccgcgtaggatttttacaaaaagcccactaat

SEQ ID NO: 17517 - DNA, 4600 bp, Cannabis sativa
aaatgttctaagttctttgtcaatattgctgccactatccgaaaaaagcgaaatagtttggagagtatcttgaataagaaagacactagaaaggagttatcggctttcctgagagacattttcactaatccagtccaaggtccgctggagatcagtttggaccatttgatttcagaatacattttcactcttgatcaagttgagctagaattaatactagggcatgaggaaattagacaaatacttgtttctataaggattttgaaagtctcggggtcagatggtatgtctgtcctatttttttaagcaatactggaattcagtgggtgcggatccttgtgaggttgttgtggatttcttgcaatcgggaactatgcataagggtctcaacaaaatgaatgtagtcctgatccctaaggtttctaacctgaagaaagtgtcgtagttcagacatatctctctttgcaatgtggtttacaaggttatcttaaaaatttttgcaataagaagactgattctttctaggttgatttgtcccacccaagcagcttttgttccagggcaaaatatccaagacaataattactggtccaaaagatcatccattcgtttaagctcaaaaaaggaaaagagaatttttttgctttaagaattaatcatgttaaagcctatatgataagctaagctggcaattttttgaccatgtgctccgaagctttaaggtccctgataagttttgtaaatgggtctgtcagtgcatctatgacttccttcaatatttaccttagtggaggaactgttggcaagattacttttaagtgtgacataattagataaggggatcccctttccccttatcctctcgcatattcttgagaatgtcctaaataccagaacaatgaaaggcatcaaatttagcaggaatggaccctgactttttcatcttttctttgtccatgatctaatcttagtaggtagggctaccatggaggaagcaaagagtttttggcaatgcctggaaaaattctgtgattggtctggtcaaaaaataaataaacttaaaacatctattttcttcagcaacaataccagtgaagggattaaacggggtataaaataggaacttgagctcaataatgacattggcaacatttattatttggaatttctattgtttagaactcacaataaggatgtaaattttaattttattatggataaccttatctcgaagcttcacagttagaagttgaaattcttgtctaaggttggccgtgctactctgatcaagtcggttggcctttctttaccagttcacactatgcagaccacgaagctgtcgaagaaattaaccttgagaattgatggtatggttagggactttgtgtgggttgggcttcctaaagactttggaaattaatcaagtcttattggataggttggactctcataacgaggatcaatctctgtgttgtaaggtcttaagtgccaagtacctaaggggtaggcctttcttaaattattcttttaagaactccgattcgtaattttggaagaatgttgcaaaatcttaagaaattcttaaacatgggacctgcaaacttatctcgaatgggaaagaaacaaatatctgggatgatctatgagttttacatggccaaacattctatcctcaacctaataacaatctgcctgagagtttggagaaagttgtgaattttttttagacaataggaattgggactctcgaaactacatgttctttttgatccaaaaacaaccaataatatcatcaagggtggtaaaccctatggaaagggaagggataagtggatatggactaaagaaccaaatggtctatttctgactaaatctgcttacctaattcatactttacagtgtgccccattatgcaatgttgctccttctacgtagaataaacttttgaattctaaaattttaaagcgtcacaaagtcttctggtggagcatcctcccaaatgctttgcctatcgattctctcctcgctagaagattattacatattgaggatgttacctgtcctctttgtgcggagagagaggaaacaatggagcatctattcttttattgcaattttcactttcacctgtggaggtcgcccccttaggaagttatgtcagttttggactttggagctcaagttaaattgggattgtgtgcagtttctttagattctaaaatctagagggatggatgtacactactacaaaactcacatttagcgataaagaattttctttggttgtctaaactgacgctataaccacagacgcaaatattgagatttttgcttcattcattaacgatgccaaaagttttttgcttcagttcataaccgaagcaaaaagtaatgcactgacgccaaaaggcttttgcttcagttataaaccgaagcaaaaaaaaaaattgacccaccacaaaaacccatcaccaacaacaaatattgccaccaaaccttatcgaaccaccaccacaacccatagaatcacctaacgtaccacatcaaaccaccaccatcccatcggaccaccacaccacatgcctataccgcgcgcttgcagaaaaaaccaaatagaaaaagagagagatcagagagagagagagcatcgacagctaaaagagagagaggtcggaggagaaagagagatcgtaggagaaaaagagagacatcgaaggagaagagtgagagagagaaagaaattaccttcaaacggttgtggcggcaacgtgtctgggtggttgggggtctccactacgtgcgacgacgaattggcttcgatttgggctgagcggtttgggacttacaaaaataaagagagaaaatgagagttgatggagaaagaaagaatgttagaaatgggagagacagctggggtgatgtgagtattaaatctttagggttagggttttcttaaataggcctaaagcctgttattatgtctgattttttttaaaaaaaaattaggaagtttgcgtcggttgtgcactgaggcaaaaagtgagatttttgcgtcggttcacaaccgacgctaattctctaaaaaaaaccgatgctaaacctacgtctgcccataattgacgctaaatttgaccactgattatgtgcatcgattatgtaattttcctgatgtcataaccgacccaaaatgtaatatttgtagtagtgacaagagttgttcctttatgctttgattgtagtagacgtaatatggaaagttcgcaatgacaaggtacacactaattctatgagtcaccttaaacattgcattgaatcaatctctatttgttacgcatattatggcttcttgtctgtttgactcgtcgaaggatgttgtgtcttcttctcctctccttctctgcagattgggtcaaaattaaccgtgatgtgaaagttggttgcagttcaatgtgtgtggcggctttggctagagaccatacgaagtctattttgtgggtggctaccaatagacttaatttttctaatcctcttattgaaaaagctgcagcttgtgtgttagctatggagacaacagtttctttgaatcaccaatttgtgatgattgaaagtgactctgagacagttatcaggatgccgaaagaaacatgttctagttggggtcttgataactatgtgacttaatgtaaaaatctctctaatcatttgttaagttgtaattttttgtttgtttaaagatcgtgtaattttgcagcccataatgtagctaagtaggcttttgccatgaatatttttggtatggtggaactttcttctatagaaaatgacattatatgtaatgaatgactaggggcggagccagggccagccctgaaatttagtgggtcataagaaaaaaaatttatttttggacctttatttagaaaaaagtagtattttccaaaatcagcacaaaattgtgtaattttaaaaggtgaagattttttttggggccctaggcacaggcctagcccgcctatgcccaggaccggagttagaataaagttcttggggggcaattattaaaagataagtatcgataaaaaaataatatttatttcaacaataaaagttaatacttatagataaaaaaatatattcacataaataaaaaaaaagttttgaaagcagtataatcaactatgatcaaaaatatttaaaaaataacacatgatcaaaattttaagggaaaattagaaaaattaaggtcaaagtttttattagggatattctacttaagacacttaattaattaattaaaataatagaataaactaataatacgtaaatctctttaaaaggggtgttttgacaccttcctatttatttcgatatttataagagcttttaatttatttattttcatgattatgtatattataattatttaggatcacttgtaaatttttaaaaaagtgcaaatagatcttgtagtgccaaaaaataagatttaaacaattagttattctacgccaaagaagaaaaaatagtcacttgtgtaacaaaatatttaaatcttaattttagcaatgtgaactattctaaaaatttaccagttatttta

SEQ ID NO: 17518 - DNA, 2392 bp, Cannabis sativa
aaaaacagtaaacaaggattttattttttggaaatggcagcaccaaattgactagatggtaaagtaaacccatagaattgacagatgtcaatttcgtattggccatttgggaaaagcccaatagaaacgtagaaaaagaaagcacatggactgacacgtgtctttccaatgttcaacttcaagtaccaatagagaaaccgggaacagccagtagccggtacccaccttatgatgttaaaacccaaaaaaaaaaaaagggtcatctgatcagaccattagactcataccataaccatggcttttatttctcaatttattacagttttctactaatttggaaaaggatttggtgagagtgagagagagaaagagagtaattgcatatagcaaagagcagaggcttgtgcctttttatactctcttttgggggttcttcattctctcatttggggttccacaaatactaagattattcattaagagtgaagaagatgagtaaaactggtgaggattcagaaaatgaaagcgtgtctcttgatcttctgaagcaaaaaatggctgattttgctaaagaaagaaactgggaacagtaccacagccccagaaacctccttttggctatggtatgtacacacctcaccttcttctttaatcttgtatattcattttcctgctgtttatttaagattctaataatctattggaatttctgtctttgtgtggtttaatctccatagagattcaggtgtttgtatctttttctcgatcccttaaatggggctaaagcatttataatgatttttccttttgacttttttcttttgtttttgacaaatagtaaaaatggattgttagaaatgaataaactgtttaagaaaccagttttgtgatgatgattatttaggtgggtgaagtaggagaactctcagagatattccaatggaaaggagaggttccaaagggattgcctggttggaaagaagaggagaaagtacaccttggagaagagctttctgatgtgttgctttacctaattaggctttctgatatgtgtggtgttgatcttggtaaagctgcccttcgtaagattggtcttaatgccattaagtaccctgctcccaataacaataataacaataataatggctcatcttcttaggttaattaaaattatcattttgaacttttatgctggtggtgactgttattgtgactctaagcatcatcatgagctttatccattggagattttagtttttacattttggggtttgagattggtgtttcattttttgtgctatgtgatttcttaaaagagatcaggcaattgaagctctttattctctactctttttattagtatatgctatttttaatttaattatggtacccaatactttagacatgttacatatggtcatggtcggaagttggtatttatttacaccaaccaatataatgttcatcatcttattgagatttgatatttgtttataccattagcaatataggatgttcatcattctaagatgttctttaatatttcttgtcaacaatatttgaagcttacatataaaaaggcaactcattattttttaaaaaaaattatcatttttatacaaaaattagaaaaatgctaaattttttattaggcctcacctatctaagtgagcacttggagcactctcatgttttgctcaatcttttaaaattaataactaaaacaagcaaaaaaaaaagttgaaaaaatatatggattagtggaaatagaagttgtacttagctataatactagagaacaaagtaaggtttcctatgtgactcttaacacttttatagaattaaatttaatctaattttatttgtgtacatgtgagattttgttaaaataaaatttaataataatttgatctaaaagttttataataaggctaattatttttttatgtatttattcctattacaattgtctttaaattagttatattaaaaaaattattgaaaattaaactgagagtactactttgtactattttacgaaatacaagatctaaattgttatttaacgtaaccaaaagtacaatttaactcttatttaataaattaagtaaaagctaaattcaaagtaatattaacctttatttatttaagatcacaacaatatgatgagtgtatgtaagtaactatacataaagtttccctaaaaaaaactatgcataaaatatttttttattattttaatcactagcgatctcaaattagattatactctttagaaaagttaaaaagtgttttttaaaagaagaaattacatttattataggattttaaaagtttttatgttaaatatgacacttttaagtttgactaatttatattgttatacccgaaa

SEQ ID NO: 17519 - DNA, 2994 bp, Cannabis sativa
taacaaaactaatatagatataccataatttttaaataatttgcttttttttttcttttgaatggaaataatttgcttataattctataaaaataaaaaaaaaattaatgattttttatgtgacaaaaggcaatataaataataaatagtttttttttttttttttgaaaacaataataaatagtttaaaacgatcatttctctacaagttttgaaatgagcacatttactaacataatccatcatatactaacatattcctatgatttggatcatttactatcatttccctatttaaaaatcaaattatgtgaaatatatttatccataaaatttataaacatatattaaatttaaattttaaaatttgatatgatttatatatagaaagacaaagtttgaaattttatacacaagcacagaaagcgctaaaaacaaagattttttttttcttatatatagaaaagactataaataataagaacatatacttatgtagttatataatttgtagttatttattataatttctcatctataatttgtagcaacgtgaatatttcattatattgaaaaaaaaatattaaataaaagaaattttgctacaatctatgagagcagaccaatacaagaattttctacagtcatacatactattaacatgactatcatctaataggagccccttgatcccctgacctgttcaagatcattgatcatttaaattcttcttcccactgttagatcaaatccatcattccactccaacttcaccaaacaacaatgtatgtatgttccgcgtgcccattctattgtcaagcccacaaatttggacttcttacctgagcaaactattctctcatgagagagattttctgggccacattacaacaatatgctgaaatttctacaatttttgtgttactaatgaaataattttgggcccaaatgaaggttacccaatttttctttttttaattttttttttcttttatgcaaggctagaggatgattaatagggtttctgcatgaagttgaatgagaacatgtcttgcaagggggagagccggtccattgggtttgagtattggatttgaagctgagacccaaaaggatcatctgagaatccatccatgtaattgaagtcaaaatcaaaggcattcgacaacacgtcatcactgacagtattccatttgggttcactttggacctctctatcgcacgtgaactcgggcgaaagcacgtgctccgacccgctggagtccgtatggagcttcggtacggagtccgacgtgtccatataaaagtggtcattgtgcaaaacagagggaataatatggggttttgtgtcctcaatttcagggaattcctccgtcttcatcacctgattcgttgccggatagttcttctctatgctaccctttttattgtagattcgacacaacacccaatcatctaactgaaaattaataatttaaagtctcgttagtttggcagtcaaatattcagatgcaatgtaattggtaaaaacaacaaataaaaaaaaaggaaaaaggtaggcaaggcaaggcaagtacccgagagttgtttttcttgccagcggagcgatccacgttagcgaggcgatattcgtgcatgatccagttggtcttgatacctttaggggctttgcccgcgtagaaaactagggccttttttattccaagtggtttgggctttccaatgggcttatcagccccagtcgccttccaataacctgttccagcagctcggttcggcctcgaaccgtttggatattttcggtcccttggggaaaagaaataccactccttctcaccgtaaagagccatttctgcacaatattatcatttaacatcagaaacaaaaaaagttattatattatattatgcaaaaggaactgaatcaataaatgcattcaatttttttttttcaataaaatatataattttttgaatattgaatgctttaccgatcttaaaaaaataaataaatcagttggtaaggaaggtaagctcaaaatcgagaaacttagatctaattagaaaatcggagaaagaataagaccgataatcataccaggaagctgccacgggtcgaatttgtataaatcgatctctttgattatgggaactgcgatgggaagcgaagaacattttctacacaaataatggtttactaattcctcgtcagtggggtgaaatctgaaaccggggggcaaaatcaattcaccagtgctcgtcattcacgcttgatcgtctgtgtttgttggttgttcccttctctttactttctttcagattagcttatccgtcttcttttgtatctctactaataatactgcttcttcttcttcttcttcttcttcttgttggttctgtgacttgaaacgtcttaaggagccctagaaaggggtttatataaactccctaattttgtgcggacaaatttagacacgtgcgggaagcaagatagagagatttgagggaggcgagtaagttgttaccttagcgcagccaggtgtgtctggtgacacgtgttgacacacgtatggttttccccttagctagttttgtcattgctttcgtcacagcatttggacacttatataggtcggcctcatccacttgtgtaatatttagaggatcgttgacagtcaagggcttggacttttataattgcccattttcgttattaagccgatgctctgtcaccaatctatattattttgcgttttttggtacagttaaattttttcttcttttgttttatttgtatttaattcattaagtttaaatattaacagtaaatttttttaaattaatgacctaatagaaaatttaaggtgctatttgttaattgttacaatgaggtatttatacgtacactcttgtatacattatacaacgtgtatattagtataactaatattattatttaaaaatcatttttaaaattcattttaaaattaaggtg

SEQ ID NO: 17520 - DNA, 8191 bp, Cannabis sativa
acacagatcaagtttaagtagaattttgtgtagaatctaaattttcaattaaaatgtgattgttactaatatacatatttatttatataaaatatgattatataatagaatttttgatttaaggatatttttttattttctacgttaattttaacagaatatattattattaatagaatattctttattaataatattattatatatatattttttaaaaataacaattatgtacatattttatataaagaaattttcgtttaaatttaaaattataacattgtagatatttttaaccatatttttaactttattagattaattttgaaattaaaataagagacaattcttgcccaatggacacaattcaccatgacatctcactacgtatatatatagccgcaatagttaaaaaaaaacatcttcaaagattaaaatctcaaatcccatttcaaaaattaaaaaaaaaatacgtacattagttacctaattgaaaaagaataatcatacatgtattgcacttaacattatttaattgaactaaattaaaaaagactaattatacgtacattgcacgtaacatcaatctactatatactcaatacatataaatttactaaagaattaaaatttgaaagaggagatattcattatcgtttactaaagatgaagaagaatcctaattttttttttttttatcatccatcacaaatcaatccctaaaagtaaaaaataaaaaattgtcattagagtgaaggaaagaacaaataggagagattttaggggataactcacctgagccgcagacagtggagaaggacagagagaaagagaaatgtcgcgtgcgaggaaaaaaaaggggtctggaaggttttatttaggtcaagttttgttggtgcatttaggtgcaccgacaaaagtaatattgcgtcgacaaaaacgacataaggataacaacgtcgttttccttttaattttattttcagtgaaaagtattatcggtgaaatatttcgacagcaaaacattccccactatttttttacacacgttttccttatgcaggaatttccccactaatattttcactgcttttcccagggcaattgaacatatactgacgagtacatgtaccgacaaaacttattttctcacgaatttttttgcatgttttggttgttctcaccatccttctttgctagtgaaattagttaagtgtaccagcaaagcatacttacactggcgaccttactcgctagtaaagtttatcaatcaatcaagctttttataagcttttgtcggcgaagatgactaattgcaccagtaaagctcaacttttgctggaaaaatatgaatttccctagcaaaaattaagattcttatagtgtatccaatatatccaaaacaagagaggtggaaacttaaagtgatgcttctgtgccctttttagagggcgatctactatataagaatttaatgctttgttctataaaaatataatctaactttaaaaaaaaaaataaaaaataaaagaaaaacaaaataaagatattattactaaaagtctataaatatgtgtgtagatcaggtacgtatgactaattaagagtagtgtagactagagaacaagtgaattaatggtagagatatgatgatgagagagcaaagaagcagaacagaagcatggtctggtccacagacaatgatatatgatgagctgagttttgtaaacattgatagattatgaagcttcacacacatattaaaagtcacaagctaactcctctcccactacctctcacgggttaatatatatatatatatatatttatatatatagaacttcatcacacatgcatggtctctatattttgtcattattctcttatgtatatcatattttatattaatctataatttgatcgaaatttcatatgtttatacatttaatttcatgtactgtaatttctaataatgatgaacggttgtagagataaacgaaatatctattatatatgcatatatatatgtttatagtactatttgctcctcattataatggaaacagtctaacttaatttatatgtctaatagtgtcacccttgggactttgctagcttccaacaacaaatttgaggaccactttatatagatatgttcgtacaaatgtatttgaataataattttgcacttttgatcaacttaattattctttttatgtatcacacttatattttataattgtttttcatgtccactactctctttatatagtgtttttaatgttagccaattaattgcaataattattgcttcgcgctttcatataaatatttttatatatatttgagtaataagatcatggggtggtatggtacgtataaagttaattagaaaaatggtttagtaattacatataatatataaaattggcattaatgtgagctaacaaaacattatgattaaatctcagaatatatagtttaaaatatttgcgtgagtagtgggaaagggatcatttaatacaatgcttataatatagttaagaagttgtaacttgtaatcatatatatgtttgatagttttgaattcgctatactataatattttattagttactaatggtacatagtataacagtaacattttatgaggtaacaatattttataataattattatgttaaattatatagaatacaatatttaataacattaatatggtgttatatatgacattttaagttaagtagtgtttcttacattatttttataaaaatattaaaagacactaataatacttaatactgactaaaatattatattattattaatataattagttatcaaattctacacaatttaatacagttattcgaatgtataaacatgcttattttcaataaaaaagactacaatattatattattattgatacaatttgttatcaaattctacacaatttaatatacagttattatgacatatataattacgaattatttataaattgccacctcaaaatatcaatatagtattaggcatcactacggactcgtaccaaggctacatcaattgattcagatcagatcaacaaattgctttgtttattagtttattattatacatattagagaactcttatttactacttttcaactcaaacatataaattaataatatatattttttttttattgggggtcagtcatatgttttaatgtaaatacaaaataaataatatggagttaatagatcaatagactgcattaaatggtagctttaaatgatgaaacagaaagatgaaggtttggtataagaaatcgtgcaatttatttgaataaaggaggtagactttaattttgatgatagtaaggacaatgttcaatgcctttctctctctatatacttggtcaaaatcaataaataaataaatatatatatatatatagatttagttgtatagtaggtctctaagttatataggtttcgataaattggtctgtaaattttatttttagcaaattaatctcatttggtatgcattctttatgtttttgcaaattaatctccaaactttttattttcttaaaaatataaagtccccgctcttaaatgatattttatttatttatttatttagttttatattagttttaaatatttatatattagtataagttatgaagttaaaaaaaaaatacatattttttatttatatgtattttttttaaatgtttcgaagaaagaaataaatcaacacatattttttgaaatattccgaaataagaagaaaaatatataatttttatttatatgtattttttaatcaaattaagatatattttgaagattataaaactatagatatatatgtgaatcaataatttttctttttatgaacaacatttacacaaaatatatatttctactactgaataattctttgcattttaagcaaatattcattctcattaaatagttaatgtgcatttacaaaaaaaaaatatatatatatatatatctataaaaaagtcaataaaaatatttggatgctctaattatttttcttaccattaaatgaggatcgtttcctaaatatatgaaagaatttaatataaaatttaattatatatgtagtaaaataatattttgtagccaaaataatatatatatatatatattttatataacctacctaagtaaattatattataaaatctatttttaacttatactcagcgaagaatttatgaaattttacctatgttgacaaaaaatttaaataattaataaatatatatacaattaaaaaattattaaaattataatactacatattcatacatcagtaataaaatatactataaatgctaaaatataaaaacgtgaagaggctagaattttttctaggcattatatgggtctgcaagtgtttactctctgttttcttattaataacatatatgaataaagtatgttttaaatattttggtaaaaaaatttaaatattatatgaatacttaaaaaataaaacaaataaataaaatatattaataaaattattttgtcaaagtattaattttttttaaaaaatgaaattatttcaaaaaaaaaaaataaattaaagtaagtaaaataaataaaaaataataaaaatatcaatatattaaagtggaaacttaatgttgctaataaaataaaagtgcgtggaccaatttatcaaaaaaaaaaataaaatttagggataaacttgccaaaacatatataatttgaggaataatttgccaaaaaataaaatttgtggactaacttaccaaaacccatatagtttagagacctcccgtaaaaataagcaaaatatatatcccctcaattaagggggtaacaactaagaagtatatttggcacatcattatttttcgtccttcgtgagaaatatagtagttgagttatattcggtataaaataattttgtgatatttttatatcaatttttatttgtagtttcaataaataattataaatattaatgtaaaatttaatatttttttaataatttattaaaaatataaaataataatataaagataaatataaaatttaataataaactaattataataatatcgatcatttaatgcaaatgagcatgttaattaaaatttaataataaaatatcaaaattgcataatagtaaattataaaagtagagaatttattgtgatgcaaattttgcatatgctataatgtgatctaattttaaatcactttttgtttgtgacaaatttacatcataatttgacagcccattagagtatatttttacaaaataaactatattttatattaaaattattacatagaaaatataaattgacactatatttacaaaaataaagtaaaaaaagccctatatatagaaaatgtagaaaatcccttttacatttgtatttccattaaagatgttctaacattttaacgtttttgaagttaaattttcatagtccatgggtccatcttattaagaataatgatatttaaatacagaatacaatgacataagtagcaataatatttcttttttctctagattggctgtcctcttttaccttaggttctatccctatctatagatgtataggatgatagttattctcttgaaatctactaattcataaccgctcatgaaacgtggacattttccacgttttatctttatgcataagagataatattaaataattgttaaaccattctttgttgtctttatccacagacgattattatgataactgtgttagattgttctcgccagttacacgttatctttcttaatcctctttgtaggaaaaaatgctaagtgttaagatacaatgcttctcgcgggttctctttttggtttgaaaggtattagcgaggcagttactccatcgcatcaaaagcgaggtgaacgaatgttgttgtcattctttgagcatacccacaaatatgtagatcaattagctgcaagctctttgtttgtttacttgtccttcctgaacaacttttattgtgtattctgtttatctcgagatggagatggacttgttgtctcgccaatctcacctgttaatagttattattcacattttgttattgcctatatagcgagctcgaatatttttattaactgtaattctcgagatgagttattgaatgtgcatttaataatgcacgactttggttggttcgtattcttgccctggtacatgtgtcagcttcttatttttagctaaattttgagtataataattgccccttaaataatactttttttaaagaaaaaaactttttaaatgtctacgagggtacaatcgtattttttattttaaatttacatgcttttagtttggcagttcaaaactttgagacaagtcatttctcaatttaatgctttaaatgttcctttctcacttagttcccatcaatttgatctatttttctctcgatcgaacggttaccactatttaggtataaatttcaagctttccttcatttttgccattactgtccatgaaatcttagaactcaaaaatctctcaaccaacatctttcccaaacttgcatgccctttctatctttcacattttttctttgagttttatccgattgcatccctcgatcgtcctcaaattcgtcaagatcagtatctccgacatcggagtttttcccgcgaagttattcaatacccagaatttctcattaaaccagtaagtgacatttcattttgccgacttttatttgtgctttcagtcttaacttcttggcatgtattttttttttcttggcattattttactatatgggtgaactgtgtatttagagagtaatttagggctagaaatttttaaggttatgtgattcgcaggttttgggttttctttttccaagaattggtgtattattctttataatcatgtcccgatttagcccataatttatgatcccagaccctttagaatcagactatccttaattttcagccatagcttttaagcctcaaacccaagaacctcaaactatacttgacctaaatgatgcaaaaattaggaaccatctcattaggtctgaccaagaagaagcttgtaatcactatagacaaattttgcaagaagtccttaagggcaagcgtcgttgtttgcgagaagctgcttggcttgaattgcctagtttagttactatccctttagcgaggccaatatttttactacttgtcactgttgctatttcaccaggtgacttggattttaaaattatggctcaaaaagtttgcaaatccaagaccccatagaaccctaccgttaccttcgaggctgagttaattgaattcaggatcagctccatcggcccttatgttggcgatgttttgagatcatgtggcatcaggaacgagaaaggatgtcacattcgatccgtggcttaaggtgagttcagttgttacctacccagacgtctagtttaagatgaaggttgcagcaccagtaagcctactagaattggtgcatatatagagtgttgagcatataagggctggagctgttctcccccttaggaattatttcaaagaattcagcaactaccttggtattgctacattttagctcgcaccaaattcatacaggatcctcgcctgtctaaaatccctttaccacattttgaagtgggagtgtccaacaccccttgaaattttgaatttttattttgtcaaagcctaaactgggaggaagtatagagcagggggcttttattatctcaggacccacactagtgatcgtaagatcacagtgagggtgcctaacaaaaaggagttcaaggatgacttcttttagaccacaagtttatatccactcaacacctctagatttaggattatacgtaagtaccaatttctctcaaatttttagattagagttatcattttttgtacttaaactaattcttcttctattttgtcatgttttcagtgatcactaagaggcctatccccaccctgaaaatcgaagaaagacacaagatccttctcaatctcccctatggtctgcgagcggcaaacttttttattgcaaaataacaatttaaaagcatgcacccttcttggcagagatcagagtactaatgccttcaaaacccccaagttttcaaactagcagca

SEQ ID NO: 17521 - DNA, 3106 bp, Cannabis sativa
tgtcccacatggaataaatggtagagaattgatccatatataagaacatgggctactccactcatagccaattggttttgagttggaaccccatgattctcaacatggaatacctttctagattattggctaaaatggtaaaaagaaaggaaagcaattatcatccgagatataaaagccttcatctgaatcatctttgttttgctgatgatgttcttcttttttctaaagaggatattcaattcgttatgcttcctttaagaacatcaagagatttgtagatacctcagttttacaagccaattccaacaagacttcactttattgctcaggtataacttcttctaatgtaaaattcattcttggtagttcaagatatatatactcaaagcagcctcccttttagatatttgatcattcctatttgtgttggtcgtatttcttaagtggattgtgactttattattgaaaaaatagttgctaaaatcaaaatttggagttcccgatatgtctcgtctgctggaagatgtattttgattaattttgtcttgttggccattcacatttattgggctcaaattatgattttatctaaatatattcttagtaaaattaatagcatatacaaggccttttaccggaaaggaagttctaattccttaagtccatgacatattgcttgggagtctatttggtgtcctaagagtgaaaggggaacttggttttcgaaacattgtccattagaatgtgggtgctttaagcaagtttgtttaggatattgctaataaaaaaataacttgtggtgggtctacattaaagaacaaaactggtggatttatgaggctccacacgaagctctaattggtactggaagaaaattgttatgaccaagaatctaatagaaagcaatatagacctaagggtctttataattatgaaatttaccatctcatatatgtgcaaagccttttggccgagagatacttgaaggaggaaattgttctctttaatttgggatagacatgtattaatcccaagcacaggtttataacctggttggcttgctggaatcggttccttactagagatcggttggttagctttggtataattagtacctcaactgcttgtttaatttgtgatcaggcttgtgaatcgcatcaacatctgttttttacttgcaggtacaacaagtctatatcttatatatatagatgagttgtgcaattggacagtattgaatcgtaattcttaagatttagagcaattaatgtctaaagtgagctgtgcaattggacaggaatgaattgtgaatgctcatgtatatattggtttgagaatttatattagtttggaaaaatttttgtttcgatatataataattcatacttaaaaaaaaaaaaaaaacctaatttatatatatatatataatttcttccagttatttcttgcagttatttaattattaattatgagagttaggcacagtgtcgagaaaatgagggtgtgtgatgataatatagatgggtaattataatgagacatttagtcttatttaggattacaaataattaaattctaattaaggggtttgtcgtctgcatgcgtcatgcgtgtatggttgatttttattctgatttatcgtaagcatatatgtagaaaagagaatgaaaagagtaataataaatcaaaaataatatatataatacaaaaatgtatatatttatatcaattccttttccacctaaaacacgactcttaataatgacttttagaaaattatgactagatgaatgggaatatcaatatgagactactgactacttcttatgttgatactttgtccatgcatgacatcctaatcctacctacaaataaatatttcgtttttattggtaaacctctcactactaattaaatttaattctacgccatatgcttaatttaccatcctttataattctctaaaaatcttatccatttttgaaaatgaaacatcatacatgtgatatgctcaggtgtagtctctaaaaacgactgcacctaaagcctcccatttcttttcataggtgtctattgtacatttgatttacagaatagttagggatgtaaatcatcttctctctaatttattctacatgtgtaatatgaggatttattattcgagattttcaaaaacccattataagataattaaatttaagagagatatattaaagaagaagaaaattaggattttacgtgattagaacgttaatgatgagtcttaattcgcgagttaatattttaaagctaaaaaaactttgaagtattttttgcaagtgtttttgccctagctaataagaaatctaattaaaccgctcaaaccgaacttttttttaaaaaaatatgatccaatttattttataaacgcattattctatattttacaaaattattcaaaaactaattaggacatttttcatttttacacttctaaacattttttttttttttgcatttttacgaaattctatatagaaactcctattgcgcgctgcaacttaaattgcaacaaaaaatcgtacaggatcccttattggaactgcactgcaactactttagaaatccaaaccgtaaatttgaaagaaaagtttaaaaaatagtatataaagtaattccccaactaattatcctattcttttaactttaatattaataaaacaataatatattattatgtatattattagtaactacaatacaaaaagtaacaatacataaagtaaaaaaaaaaacttaataaattaatatatatgtataatgatcgggttcagttttttcgatcgatttattataaaaaaaaaactgactgtttaatgacgattttaaccgttagcgatttttttcggttttgttgatttcaattataacaatgttcggtaaattaatttgaacaatttttttgattttctgtaatttatgctcaatcctaatttttttttttgggtaaatggccgcaaaacccccgatactttcactttcgttgcacttaacctccaaaactcaaattttagcggtaaaatctccaaaactagaaaaccgtgaaattccgtattttaatatt

SEQ ID NO: 17522 - DNA, 4848 bp, Cannabis sativa
acgaacgacctttaaaagaccacaggaccgaacgtgacatttgaaagaatcccacaagaccaaatattgggaaatttgtaggtgtactcgggaaatttgtgaatttttgaaacaggtctaagacccaacactagaaactagcacattggccgaaaggtcccaaatggaggctaacgaagtatatgtttggaccggcatcacaaacggtttttttggaccggtggcaatttgggctcacaacggatcacaagtggctgtgataccatgttagaatttggggataagatgaacggggttacatctcaaaaccaattaacaatgggaggaatagctcattccttttatatatcacaatttattttcacacattagcaatgtggactaactcttaataaacaaacatgccctttatcatatcacatcatatcatatgatgaacaaaaataactttatgatgaactacgttttctaataataaattttaataaaaattatttaacaaagaactactattttcaaaaaaaaaaaaaaacaaagaagtactaataataaacatatggaaagaaaccaagcagctaaccaaccggaagaagtgctctggacgttagtcatacaaatcatctccaaatcttcaccgtcagattaatcgactttaatatccaacggttgatatcactccccaaaagccccaaactcttttaaaagaactcaacgctggcatatatatccgctgactcagctcagttgcacacaacatatcaaactcaaccaaattcttcaaattttattcgaaaggaagaagaatgtcccagttttcgattcaacgaggtaccaagattttcatttctctgtatttacatgttttgattcagaaactgtaacggttttgtttgatttctgtttttggttgatatgggcagttaggagcttgaaagctttgaggcctcagatcttttctttgaggagttctgggttttctactgccacttctccctcaaacaaacaggaccctccggtaaatctatattgtttgtttgtttccctggaaaagttttgatttttgaaattttctttcgagggaaaatgatatgtaactatatttatatggtgttcatgtgtatgtactttttgtatatctaacttcagggtaatttgattaataaaattacttgatttttgttctattgtttggctgctgagaaagtgtgagaaaatttatggtactgggatatttaccaatttgcttagctttgaagaagtatttgtttttactaaagcatttaagcttttatttttttttttttttactaaacttgattttgtgggtttattctttcagagagttcccaatctaattggaggtacttttgttgattcacaatcatcatcctccattgatgttataaaccctgtaagttcatagaagcttcaataattctatacttcactatttaatggtgtaaaaactattaacgagttgttggggaaaaaaatattggttataggcaacacaagaggttgtttcacaagttcctttgactacaaatgaagagtttaaagcagcagtatctgcagcaaagcaagcatttccgtcatggcgtaacacaccagttacaacccgtcaaagagtgatgctcaagttccaagagcttattaggagagacattgtaagtatatgaaattctaagggcatttgttcatgactgtgcctcccattcgagttccatgataggtccatggcaattaactatgtgattgaatgtcatgacaattttagaacaacttttttaacaagtattttggtaagtgaaccagcctactattgtttcaggataagcttgcccataatattacaacggaacagggaaagacactgaaggatgcacatggagatgtttttcgtggtctaggtttttgtacttactttcgtgttttgagtgtaattcatggcataatcatggtggaactcattagttattaacaagttttgttaattttgatgggttttacttttagaggtggtggaacatgcttgtggtatggcaactctgcagatgggagagtatgtctccaatgtttctagtggcattgacacatacagcattagggagccacttggtgtctgtgctgggatttgtccctttaattttccagcaatgattccattatgggtaagtcgcttgctacttttcttgatattatacaaaagcaattgtgtgactattgcctagtctcttccttgtattagtttttgtttccttcttggtaatttgttcttcgttatcttcaagtgacattatcataaattgctccataatcttgatgcagatgttccctgttgctgttacatgtgggaatacatttgttttaaagccatctgaaaaagatccaggtgattatcattagaatgtgctatataattaacttgtggttagctgagatttttttaaaaaaatttctttttagtcaacatttatgagtatatacaactatgttaataacatcaatatactaatttggccttttatctcggttcatcacctaattttctgttactttataagataatttaaattttcactcacatggtctattcccactttcaatccacttgcctttactcgctgtcctgcttccaacgacgtaaacagcattcatcttgcttaatattctttttatatattttctatccattgcacatggcataacttttcatgcttcacttgaaattgatttgtactagtactctttttacaggtgcatcgataatacttgcagagttggcattggaagctggtttgccaaagggtgtcttaaatgttgttcatggaacaaatgtatgtttgtggttcaactgcttttcgttagccctctattcataatgaccttcagttatccgtatattaattatttatggacaaattaatcatacctttcaacatgatgagtattaaaactaaattgagaggatgctaaatgattcagccagaaaatgcaaatggtgttattctagataagttttagtcaacctttctcagagtagaaaacagtttattgcgaaatagatacctctaaacgatgttaatatgtttcccctttttatcggtcctgtacaaatattgatttttttgtatttccttatgtttctagtcattcttttatcggtgcaacttctgatgtttttagtagtctcttctgtgaatatatctatgcggatttggtatcttaatgtgtattacgtttgggcaggatattgttaatgcaatttgtgatgatgatgatatcagagctgtatcgtttgtaggctctaacactgtaagtatcttaaagcatttctcaatctaaattctaatttgatgtatgatgatttcttctttgatatttctttcttgagcaaatatctattcattttagccatagtgtatgtatccattatgacatgatattcttatcattacattttcattgattataactgtgtatcatattaggttctgccagaaatcttaactacttattgtgtttctaaattttcttttcaaaggctggcatgcatatatattcaagggcggcagctaaagggaaacgtgtccaggtaaagtctcttttgctacattagtatctgtacagttcctatttgtattgttcttgctttgaaatatatgtcaaaagttcaagtggaaatgattcatctgctttctttctctagtccaatatgggggccaaaaaccatgcgattatcttgcctgatgcaagtgaggatgctactttgaatgcccttattgctgctggattcggtgcagcaggacagaggtgtatggcactaagtacagttgtttttgtcggagatgcaaagtcatggtattgagacatcttcctcctttagacagactccgtacctgtcctcgaataatctttttttgtttgcatgttaatccatttctacactgtaaaagatctctcagtaaggcatatttttatatctctccttacgtttttcaagtaaaaagctttacaatattacgatttaccataacattttcctttcaacacatgctcatccagtagactcggttcctttaatagttcaatttacatcaaccgaagcaggaatctaggaagtaatgtgggcgtgtgactattcattaacagactcatcctaaaatatgtatgaatcctaacatattcttattaagttaacaattttcgtatttttatgtattacagggagaaaaaactagtggagcgtgccaaatctcttaaagtaaatgcaggaacagaacctgatgcagacctcggtccagttattagtaaacaggcaagcacataagattgtgagacggcttagtgaaatttacaatttcaataccaataaagaaaaatagctttttgctacacaaatttcaactcctttatgctccataagactgtattgattatttttctttattgcattaacaggcgaaggaacgtatatgcaatttaattcaaaatggtgtcgatagcggtgctaagctattgcttgatggcagagacattgtggtatgttgaatagctagaatgaataattttaatgatatctaagaccacgatagaaaagggcttccaagtattcaagaatatttactgtttgccgaagagaaacttttattctaaattcatttatgattgacaaaataggtccccaggtacgagcgtggtaattttattggaccaaccatcttatcaggtgtcacacctgacatggagtgctacaaggtactttttactttaaagacttgaagatagaaaaattgattttgaaatcaactatgaaaggattacttttactttccttgtactgaaact

SEQ ID NO: 17523 - DNA, 3049 bp, Cannabis sativa
  modified_base (2250)..(2253): a, c, t, g, unknown or other
  modified_base (2331)..(2340): a, c, t, g, unknown or other
ttgttcttggttgggggaaattccatctccaatccactctgttattgttatggattctattcaataataataatagtgttttgttttctcaaaaaaaaaaaaatatatacagttttacacatgttgcgcttttagaatagtttattcgttcttacgtgttatctcttttggacttgtcgcgtcgtgtcgtgtttaagtactctatattttttgtgcactgtcgcactcaagctcatattttttgtgtcgtgtcatgccaattcgtagtattgtatcatgtcgtgcccaaatttatattttttcgtatctagtcatgctcgtcaggggcggacgtactttacgagatagggtggccctgcccccctgaaatttcaaaaaaaaatcaatcaataatatataagtatagctaaattcaattaactactgttataaataaatattaatttagatatgtataacgaatcaatataatgtaccgtcatatatatatatatatttagcaatttattattatctttagcaacttattattatttttctcaattaaaatatataattaaatatttaatttaactaaaattagatcacaaataagataatttttcttttgtaatttctactataattacaaaatatctttttcatttttttaatcatcgattttaaatttttttgaataatttacagtaccgaaattaaagtttacacaattatttatcacgcatataagaaaaaataattatgtgtacaataaaaaatttaaatcttattttgacactataatttggaatttttaaaaaacttacaagtgatacaaaataattacaaacgtacacgaacataaaaaaaataaaacaacaaatttttttggatactgaaacagatagaggtgtgccataataactattttttaaggagtgtactatatgttaaacaagatatttttatgtatattacatgtttcgcaaattaattattaggtaattctatagtacattctattaaagggtcgtttcggtacaccctataactttttcttccatctaggatagattttttacaccaaattattttcattattatgcacattctagttattcagaatgatttgtaaaattttagaaaaatctaatttgtttataatgctaaaaataaggttaaaaaatttaattgtatgcgtgattatatttttttatacgcatgataagtaattttgtgaactttatttttagcattataaactatttagaattttttaaaaagttttaagtggtctgtaaaaattgtcatgtacacaataataataataaaaaaaatattagactgaaaagctttcctagttgtcaaaattgataggaaatatattgaaaagattttttagtgaagggatgaaaaaaaaaattaataattggtcccctagtaattaagttctggctccgcccctgatgctcgtgccgcctaaactcgtgccggtttcatgccgtgtcaaaaatccaaaccggtaattacaacagtagacctgatcataccaaataaaaaggaaggaatactaaaactttatagtaaatatatgcttctctctagctcgtctatatataatatgaggaccaggtattagtatatatagggaggaatatttgagcatctagttatatatatatatatatatatatatatatattgaataaaattaaattacaaatttgtgatagaaaccgtgcatgcagatagcaatataatatgtacccttctaattaatttctttgtatttctcgtgtgaaatgaaaaccacgtaacaagcagctattgacaaggatttgacaaacatgcacgtgaccaaaaatatatcttctttatttaaaaaataattaataaaaaagtaaaaaaaaaaaatgtattctactctcattaaggtttatgtatataaaggaggtgaggatgttagttgttcctaccaatatggatatctatatattaatatcagaagaaattgagttcgtaaattaatatcttatacgtttttagaatattttgtataatttacaatacctgaacttagtttatgtttttctgttttatttttcagaaaacatgatcaaaattcagtttaaaatgagggattatttcacaaatacacaaaaataataaaaaaaaatcataaaaatacggtttcacggaattttaaatatttttatgattttttttattttatttacagaaaatatggtattttaatgttgtactcttgtnnnnttgttgttaattttttattatatgtatgttgtattcagtttaaatattatttttatggaaaactataaaaatgtaaannnnnnnnnnagaaaaaaaaaaaattaaacttaaaaatatattttcttttttataaaaaaaattgtaacttatgtaattatctcttaaataattaattacatgcataaatatataaataaatatgcatacaattaaatatttaaatattattattttcaataatataaacaattttaaattctttgtaaatatatagaaaatctactataactatatagtaattagataatgttatgtttagtgtaaaaaagaaaaaaggatgtgtgtgttcacattattagtaagtaatttatagtgtttatattatatttatatagtagctatcaacaggggcacacccaaaaactttgttaaggggaggacaaaaaaaaattaggagaaagtaaacataaatatattaagacacgataaaaattaatttaacaaaaatataatataaaagaaactacaataaatataaaaatatttacaaaaataaagtataaatgtaaaataaaattataaagagttaaattgtaaataaaaaattttaatattcaaatgttaggattggcatatgtcactgctagtcctgtattggtaaaataataataataaataaatagcggaaattttataatgcacctccttaaaagggatacaccgatacatctctatatgttttagtatccgaaataattttttagtcaatttttttctcataatcatgtaaattata

SEQ ID NO: 17524 - DNA, 3476 bp, Cannabis sativa
tttccaaaatatacatttcataattattaattaatctcatacataaaccttaattatttaataatttaaggtattaatcatatgcggtctttacatagctcatagtttactgcaataacaagtaataatcaaagcaatgtttaaaggtaattttcgaatctttattttatgtactttagttaatgtattatttatacattgaatgagattcgatcatagtttagattgtatcgaccacataacgtcattgcaatgacaagtgataatctgctcaatagaacttccagaatacagattgattaatttatacttatcgtccttggattgggatgaagtccacgggtggagccagctcaaaattattgatatgctaaagggttttgtcaaccacaaaaaacataatttaaatttagacaaacatcaaaataatttaatccaatttggtttgatgagtatcctacctagactataatatactattctgcattttgtttgtgttgtttccattataagaaaaatatgttggagaacaagggggtcatgttcttttgctaaggaatgagtttcaaattagaaataaaaggaaagggcctaataactttcgctaggggtactcggttgatggttctttctccggtaagaaggcctacttaactctcattaagagtaaaatcggtgagaaagataaagtttgggattgtctttggaggtttcaggtgtaagaaagagtaactttttctttagaaattgggaagcgacatcttattgttcaaatgtcttcagtgcattttcggtaatgttgtaaattgttctatatgcaacaatatggatgattctttttctcgtcctttccctgagtgccctcttgctagacaagtttggttctcaaattcttggggaattcattcgaatcagcttaggtttgatttctctctccagctgctcaagtggattatagatcctggttcaatggaggaaaaacttaagttctctttgtttactatctttagtgattctgtttaatgccatgattaagggttaccataaagccactcacagggtgcaatattgggtagtttatgtcatcaccaacaactcatcattgggcagcataagaacaatgtttgtgttacttgaaaggagcaccaaaaccaggtattatttataaggatcgtggacacactcagattaagagtttttctgatgcagattaggcaggttccaagatagatgaaaactccacttcaagttagtatctttgttgggggcaatttgatctcctagaagagtaagaagtaaattgttgtgtctagattcagtgtaggatcagaatatagagctatggcatagtctgtgtaagatagtgtggatttatcaacttttgagaaactttaacgagtgaatcaaagaactttatgaatataaataggagttcttgtatacttaagattcatactgatctactaatgatcatcgttgtgatataaataactctttcatgataaatgacatgttaatgaaagttgttatttcatattcaatccagtcatgtataatcaaattatacacagtacatttactacatgtctatccacatatgtgtttcgaatcaaaatcacacgcactagagtatagtgtatagcaaaccctacttggtaattccatattaaatattccatactttaatatcctaccgacttgtttcattcatattgtatgatctcaattctcttgtacaaccttacaagatcatactatttctatatgaatatcaaatttttagatatttattaattatacttctataattaaaatattcatttatcttataattgtatttcatatattctataatgtattatccattaaatacttatttttagggcataaatcctaacaaatgagcaactcaaatctttgagacacaccctctggagaaagaagacgaagaaaaaaacactcaggtagaaggataacaacaactctaacaaaataaaaaatagtgtgagaataaacaagatacgaccagagccacgtcgtaaggtcaagaaacggtcggtgagccctggtcaggcaaaaaaatcaagtgttggctaataacttttacagagaaaccctatagagaatatactttttatttatttactttttcatttaagaccttaatgtttttgaatttatcacttcatctatttcataataaaatttaaataattttttttcctaaggttaaattatattgtatgtttgtattaaaaatagaggctagtagtatgtttggaagaacttttttttaccaaaaatatatttagaggactacttttaacattttaataataagagtatttatatatatatatatatatatatatatatattttcaaaaggatgtctaaaacaaaatataacaatataaaagagatcttttctgtattgtttctttattttattaatatattaatttattttaatatattttttattaaatatatcaaaaaatgtttttattttttattaatataggataaataagtaaatatatatatatattctaaataaattattaagaagtttttccaaaagaatgaaatttaaatcaaatctaattatttatgttcaatccaattaatcgtaaaaattgtcaatttattttgatattcatgagaaatttttttagttcaataatttttttatcaacgtctatgttgtagtttttttaagataatttgtaaattctcataaaattttaaataacttacaagttgataataatgtatgacattttttagggataattacataaattactattttttgtaaaaaaattatatttttatgtttaatttttttttttttttacatttttacaggttttcataaaaacaacacgaaaacaacaagaaaattacataaaagtaatattaaaataacatctaaataacatcaagacaataataaaaaataacatatagataataaaaaatcaacaacaaattaacaagagtacaacataaaaagactgtaatttctgtaaataaaaaaaaaattgtaaaaatgtttaaaatttcgtgaaatggtatttttataatttttttgtttctttttttttgtgtatttataaaataatctttttttatataactatttaaaaattatttttgttaccataaattatattttcttaaaaattaataaataatattaaataagtacaacatatatgattataaaaataattaaattaaaatacttcaatttgaataccaaaaataataaaaatagaacagaaggtcctttgtagcgtatatttgcggcagtcattttaaaaaggaaaaattccactttactacatataatttcactttattatattaatattttaataattactttctttcatttttaacttatatttttatattattattatttatataccgacttctataatgttatttggaataattacataaggc

SEQ ID NO: 17525 - DNA, 4161 bp, Cannabis sativa
tgtcaagtgttgtgagacccttgagtttaagaggcctcctattcttctttttgattgtgtattaaatttgtgtgtaaattatatgtgtatgtattattactcaattaaggactattggcaatattcatctaaatctaaagttgagaaaagtacacgtggacaagttttattggattagaagtattttattttaacaatatcttttttttagtttaagcaaaacagaaaggaaattttcttttcagctttccaaaacaagaaaattaaattaacttaacatggaaaaaaggtttttgcgtacgtatgccgccattattggaattcacatgcgattttaaataccattttttttattaattgttttattttattcaatttgactaacttcgagaatgaaaaatactgaaatcataaccgttagattagcttactttcctacatcgaacgactagtgttgacttatgggtaatcactgagatattactctgccaaatactttaacgttattataaagaagtgctcgtagtgagtgctctctttctgtgtctccatttctgtaccttccaaccaaaaatcagtgctcagctcagcaacattgctactctctgtaagtgcccttgattctttctcagtagcttcatcaaccatttcagctttcaatctctcaaagcttagtcattttctctgtgtgtgtgtgtgtgtgtgaatctcttctatgatgtatattaccgttactttgctgggttttttcttttgagcaaatttaatgatacccatttgagtaaatctcttgaagattgtgtatttggtgaaagtttgtacagattttctctttatctatgttgtttctttgatgggttttgtaccattttttttttctttttttttatgatgctgagtttgggttatttgggtctgtatttagtctgaccaccattttgtaatctcatagttatttgagtttaatttgtgttatttgaccaccattttgatcaattgaaaattctttttcaaattgtgacctttttgcccaaatttgagtatgagcttaagaaaattttggatttaattttttattgttatatattttgaaattaggatcctacctaaccctacagatatttttttggggactgtgtatagaagggattagaacctgaaatttgtggcagcaaatcacacacatgcctaactagtagtactagtaactagtctatgcctaatcatttgagctatagtgtactgaatttgaatatatgacccagctcaatccagttttggtcaaggctaatattaatactttttctgcttgtaaaatcctatttagttgcttctaaaagagtaactatacaattaagttttcaattttcttaaaagaacataatcataattttactattattatcatttgtgaagctattacaaattatgactttatgagcatggataacaggttcaatatggctgagaacaacaatggggagtcaagtgtgaaaaattctgtagcccgtcctgctttaaatgaaaggattctttcttcaatgtcacgaagatccgtggctgctcatccctggcatgacttggagattggtataaagtttgattttatgttttcaattttgctccattttatgttaattagcttttattaactactgtgattgaagagctatcacagctgcgtacttgcaatggtggtgagattataaaaaatccaaattgctctgtgtattgtaatcatttccaatttacctggtaacgtttgttgtttgctttatgcaggacctggtgcccctgaatttttcaatgttgtaagtccattctctatgtaccgataatagcgtaagcttttagctgggaattaggcataggcagaagttcggttagctggaccgaaatcacttaactagaggggaattgttgttttgtttgtttcacttcttttttgttacttctgttttgcttaactgattggatgtggctgcttgatttcgttttgtcaaacctttattagtactggtatttgagagattatgtatttgtccaactgatgaaattaatcccatttgaggagttatgtttttcatccattgcctgcctcatttatagaaccttgctcactgatgaatcaaacacaaccaaccatttactctgatttatgtcttcttcaggtgattgaaattggaaaagggagcaaggttaagtacgagttggacaagacaagtggcctcataaaagtatgatcacttttatttcattagtccattagattggaatcttatggaaaacgtttttattgtaaacgagaatagctaatacataaatttgttcaatctaggttgatcgaattctttactcatcagttgtatatccacacaactatggtttcgtcccacgaaccctttgtgaggatagtgatcctattgatgttctggtactgatgcaggtactgcattttggtattttgaatgcaccattttccattaattccaagttccaactataagtaattaaacaatcttcctggatttttctctgcaggagcctgtgctgcctggtacattccttcgtgctcgggctattggattaatgcctatgcttgatcaggtaaaatgaccacatacactcaatcaaacatcgaacaattaaaagcttaaaatgattgctctctggttatgagtgtctacagatgtggaattttacaggtgggagtcatgagactgctttttctgtccacaagtgaaatggtttataaattgttggttctaagttgcagtatctcttgaatcctagattatagtttgtatagttacagtccatatgcattgctgtgtcaacacgaaaatgatattgcaagtctcttctgtttgttttgtaacatctagtaatgtcttacaacattatttacatccaggaagaaacttggtataatcaaacttaatgttttgagattcttgtataattgcttatgataacataaaatcaaattgcagggggaaagagatgacaaaatcattgctgtatgtgccgatgaccctgagttccgccattactctgacatcaaggagctcccaccccatcgacttgcagaaatccgacgattctttgaggactgtatccacatagataaatcacttattacatttttgttatctcattgttaattttgattggtcataagattgaagcaccacatcttcacaaccagcattcttcttcacagatcactcatttattcatgctttatcttaaatctatatcaaaacttgtaatgtatgtgcttaacttgaaaaatagacaaaaagaatgagaacaagaaggtggaagttgatgactttttaccatctgaatctgccattgaagccataaagtactccatgtgagttaccatctctgctgctcatttcatcatgaattactctttaagaaaaaaaaaaaacatatgattgttctttacatcttttcggtgcaacatttttgataaaagcgacttctttagaactcgatctactgttcttcatcttcttacagaaaaaatgtcatcttttttgcagggacctgtatgcgtcttacatcatcgaagccttgaggagttagtgactccatgggagagcagatgggagctgacagcataccaaataattttagcatggctaatagatttggttgtttcttggtacaattaattagaagttatgttattaagactgtgatcttctgatacttttctaaaatttgtaagtgttgaaaagctgcttttgaagtaatctatatttctgttttatttttgttctttaatacacaaaagatagataaacatacacaccatctctattttcaaaagagctgcaaatcccacatgattttattgtaaaaaaaatagcttaaaattcagatacaaatattagtttgggaaaacattcaaccaattcaataatctatgcttttataaatatcattttcttctcatattaaaatctcctttttgttgatgtaaatgaaaaattgaattttgttttaagtttataaataaattttagtgtgatccatccacatgagctaggagtttcacacatgtctacaattttttcatgtgatccatccacatgaaaaattgaatgttgttttaattttttattcttttggtatgttttagttggg

SEQ ID NO: 17526 - DNA, 5428 bp, Cannabis sativa
gatgacagagtagagttactctagctgcttcttatgcgcccccctactcatggggtgaggctagttgattcgagaggtgagttttaacacctttataaattgtagatagaaacttaaactataatacttgtgaggggcaactttagacagctgaattcctcttggaatgcatccactaaactctgatgaacaatggaagcttcacttgatgtctaaacccttcgtgcacacgggatttttttcgagctaacaagtgaatccaataagtttcatctctccatgtttggatgtgctacatcacagaaaatgagaaatagtgtaagcctcataaatgaaataaagaaacaaaaaatgaataagttttcatctaaggaaaggtgtggaattataagaagacagaaagcaagacacctcaaatttttgaaattcttatgccaagacataaaccatttgtgtgtgcatatgacatatctcctttctcttgctagatcttacaaacataccctgttcgatgcgagtcacaatttggtgatgtctgaatgctgcaagtggtgctcatcatcatgatttgagccccttctttgcttcttaagtctctttgctgatcgagaacgagtagtgctggctatatggttcaagcttaaacactaatgttttgtttgattgttggttttcatggatattgctcaagacataggactttttattgtaggattttatggatattggctttagacataggactttaggttaaggtggtctctccttaatatcttaataactaggtttacatatattatatagagaaaatgaaaaaaaaaaaaaaaaaatctatacaaagatataaatatatctaatataagtatgtactacatgagaatatcattagctattggattagttatccaacggccaacgaacggtgatgatttacccgttcttcgattcctaccgtgtgtgtgtcattggtagcttgactatccaaatatgaattctttgatgaatctctcatgtttgagctattataagtaatgttggttgtttctccaaacgttaagaagcttagaatttcttttatgtcatcactgcttaattttggtatctcgttgcatagttcttccggtgagaatagttgttgttctttgcatagttcttctagtgagaatagttgttgttgttgtagagatgatatatcattatttacttcatcttgacaatttacctggaatatgaatcataaacaagcaggcatataggctttttggggaaagaacaaaaactcagtattgtaaagcgtaaaaaagagcagcgttgctcaatcttaccggtgtagttgtagtagattctaataagttttcaacatcattctcaatttcactacttggactcttctcagcatcttcattttggccattctcatgatttttgagcttcaatcggcaaattacataagcaggtttctgcatatttgaacaattttattagagtaaaattttagtcatttaaacgaaattaaagctttctctatccattccaagaccaactgagattaatgatcataaaacataaacttataacgaaacaaaagaaaaacatcaaggaagagatgaataagaacaaacctgtagagaaaaggcaatatctggttgaagagaataatactcatggaggacccaattagtccgtttgccaggagaagtgccttcatggaagaccaaaatcctcttccttccattacaacctttggttttgcgttccttaccagtttttttccagaaccctgttttagtcgtcctgtttgacctgttattatgtctgttcttataatttggtcgacataagaaccaccattccatattcgattccatcttagacaaagctgaattttgatcaaccccaaaagcacacacaatattaggatacataaaagttattctaaaaagcattataaatatgtatggacttacgaggtagttcccatggctgccattcgcagaaatgatcgatctgggcaatgcaagaatcgagatcggattccatttccatagtcttaagattcaagtgagcgatcagttcttcctcggtgggtttgaatttgaagaatgatggacaaacccaaagtggtgattcattgacgtagtcactcatttattctcttccctcccaactttgttgagtatgatttgtgtgatttgagttgggtttcgctctctattgattattttcagtgtaagcacgatgagcgatgagaagtgggaatggaatggatgattttatagaagtagttttaggcctcccttgcttgagaagttgtcttatggctcattcatgttttgacaagtggcatttgaggaaaagagccaatgaggtgaagcccttgttggatactcttgactgatgatgtaactgtacagtgatgatctccagtccatactcttgctctttacttttggacgatatttcgtggaagctgggatgggaaaaaaaataaaaggtaaatactattttagattttgtgttttgtaaaagttatgaattggactttctgttttgttaaatgataaaataaatcttatattttttaaaatagtaaaaataaaaccctaagtttaatttttaaacattttatttttcaatataattaactttaagataatttttaatacgaacagatacaaaaaatataattagttttgtcataacatttctatatcagattattattaagttttattttgacaaaaaaattaattcaaggtcctttttgtataatttaagaaaatataacgtcaattttgttatttaacaaaataaagagttcaatttgtaatttttacaaaacagagagtctaaaataatatttactcaaaaataaataaataaataaacaaattaaaaacaacatgtccttatacctttatgaataaatatttagatgaatgattattgttttaatctgttggaaacgttgttgcaaaaaaaaaaaaaaaacaaaaaatgaacgaaatagaaaatttacagattaagttgatttctttcagacgttcgcggcagtgtttatctattgcatgataggacactatcaaaatattacaccaaaaaaaaaaactactcagaatattattttaaaggtgtttgagtattagcctatactattcaaggtgatactcaagcatttgtgtaagactctgttgaacatattggaacagatcttgataatgttctgttacagacatgaatcaatggctagagatctgaatgaaatgagtcatattattataatcactgtaaggatttcataatgcctaatgtgtttatttatcttatttaaaaaatttatatttaggatgttagataataaaattagtaaatttaaatcttggtaaaataatttccaacagcaagtgcaggaggtggtccccaggggacaagttgtcggttgtcaggtggtctaggcttacaggtgtagtggttgcagtgtgtcctttgtcgggccatcagggcatgcagatggcatgccttcaatacttgttcctaggggtgctcaaaagtatttacaaaccgcttaaatcaaaccaaataaatcaacaaaagatacaagcaaaaataatctaatgaaaatttaaatcgctcaatgaatatgtagggtggattaaaaattattctaatctgctcaattaacccgaataaactaaattaaccaatttatatatctttcaataaaaaaatttataatatattatatgaattacatttattagttaaactattttgtatttaaaatttagaatttatattttatagtgcttaatttaaaatttagactttataatgaataatttttattgtatttagatattgaagttgaaatttaaaatgtatatcttattattacttttttctatgtgtttggtgaatgtttgcttaatatttttaatatttacttaattatatttgtcactatcacatttttaagcttgaaatataaataatattattttatttttataatctaattatttaaatattagaaataaaaataattataaataaaaaaaaaggtaaagattagtttggacgggctaactcgactaaacagataaaattattgggcgggttaacctttttttaatttttaattggacgggttacaattaaatatatgtaatctgatatttatattgggttggtaaaaatatgttataacctgaccaaattgacgggcgtacttcatccatgtgattgcaggaagcatggtcgtacttcatccacgtgcatgtcttgtccttgtaattccacatccactaatttccttctcatcacttaagaaagttttactaagtgttgaatgcatcctcgagaagtgcattattaacactcccaagccatggctctttgtcgagatccatgcaagcaaagcaccattgatggtgctgagatgtttgccatgccaagattcttgcaagcatgcaaggttggtgttgtcgagatgcttgcaagcatgcaagcttggtgatgatgtcgagatgtttgcatgcatgcaagccttggtattgccgagatgcacacaagcatgaaagattggtgatgttgttgagatacttgcatgcatgcaagccttcgtgtttctgagatgcttgtaagcataaaagcttggtgatgccaagattcttgtatgtatgcaagctctagtgatgttgtcaagatgcttggaagcatgcaagcttggtgatgttgtcattcttatatgtatgaaagccttggtgatgttgccaaaacgcttgcaagcatgtaagccttggtgatgctgcaaagatgcttacatgcattcaagtttactgatgtcgttgagatgcttgcaagcatgcaagcttggtgatgttatcgagatgcttgcaagcatgcaagcttgatgatgttgagattcttgcaagcatgcaagtcttggtgtcaatgtcgagatgcttgtaatcttgccttgccaagatttttgcaagcttggcctgccgagatgcttctagtctaggttttttgggatgcttgcaagcttggcttcttgtcttgacgctggatttttcaagttgagggacttgaagtggggatggcttcgacctcattatcctaagtttaatgatgaaacttagttaaagatgcatttattttcttgactaattttggaacattacctcgctaatttctagggttgacaattgtgtagtagaaaatttaatatgcacaaaaaatatgtaaaaagaatgtcattttttattaaaattaagtactccaatatataatattatttttacaaatatatttcgatacttaatttttattaaaatattgatgctttgttgaaacaatattggttctacataattggagctaagcaccccaactcaatctagggctgcacatttagatggttttt

SEQ ID NO: 17527 - DNA, 3519 bp, Cannabis sativa
aataataataataataaatctttaaagattctacaaaggaggggtccattttggctatatgtaactccatgttcttgatgcctttcaaactacaataatggccaaatataaacaaaggtgggacccaaacgaatccaatccatttgcgaaattttctttctttttttcatttttttgatttctttactcatcttcatctaattatgaaatttcacacaatattgtttcttggttttttcagccttctataacagtgatgatgataataataataatggtaatgataattgagcaccacagttggtggtgaaagagatgactaaaataattaaaagagacaaaaagatagagaaagaaggggaaggggttggggtcatggggccggctgatgacgacgaaccactcccaaatatcattccgaagtagtcgtcgtcgccattggaggtggaggaggtcccatgcccggtgttgcttgtggccccacttatgctcccaccgccgctgaatccaggtagtgatacgctcttgtccctaccataacgttaacattatacattttaataataccaaaataaaaaagtcatgtaacaatattcaaatccaaaataaacttttttttaagaactagatttgatgtagtacaagagtgtgacatcaatacactaaaggcttcctcaaccgaaactataataaaactaaactgattatggcataaacatttggtattgtgggggccaagaaatagtaagctctagttgttgataaaaaaactctcaagttccaagaaagagaaatggggggccttaggccaccattaaaaatataataaaatatcctatgaagaaatcatattaataagattaggaacatccacagcccttaaccatagtcactactcccaccaaacttaacccaacacatcgaaataggtagcagtaaaaacaagtgttaaaatagagtgcatttaacgtttgtcttgccaaaagcttccgtttttggccactgatggacaattcagcttgactgaaaaaaaaaaaacgacagctcttttccaagttcagaccaattagggaccccctttaaaaagctcactcttacactcgattatagtaagagagaacaaagatttacaagaaagagtagtgaaaggacaaaacttagaatagaaaaaaggcagtaaagactaaagactacacagaagagcaaaggaaagtaagttgagatgggacttggtgaagcaccggttcttatgctgtactgtgccctgtggttgtggctagtagtataggtccagttcatatcatatcagaagtggggtccaaaatttcagataaaataacaaaggggtccactcttcattgctggaaagcaagtagagagaataaaaacccagccacattccccatacaaacaaaccatggttagtcgtttccttcaatatcaaaattccccaatttctcccaaaaaattattaaatagagtcccacttgcaccctttttttctcacttttccccctaatacacgtacatgtatttacttcctcatttgaaaacaaccttttctcagcaacgaataatcaaaacaattaatagaatgactattatacataacaagattatcatcaacctttttcttcaatacctctattaactattataatgacttgtttagagagaaattaatcaaaatgtcaatgtaataaactgaaacgggtagagaggggttttaaataccatgggacaaatttagtagagtaaagctttcagtactgatatggtcaaataaatgtctgacaactggaccccacaaattactaatgggtatccaacgagcataaaagagaagaaaagagtgtatgtatactgctatgatgtatataacgtatatactctttacccaatcccaaggtcataaaaagatgcaattttgccaaagggcaaaaagggttgccaataaaaaaaatgaaagacagacaactgaaaactgtaaagctacttgcttggctcgagcgagccagattccatttcatcgcaagatcacgtgcacccatgaatacaaatcccactattacataatttacatattcccactatttattaaattgtcgttccctgaataaggagaattttttttttctgtgtgtgtgaattaaccaaaaccagagaataaattaaaaagtaaagagtatcactaaactttaacaaaaaagaaaagaaaaggcgatgacagttaatgtgacaggtaagcttgaaactgactttattgtaggcaaagacaaaaaagtcggaaagggtaaaaaggtaattaaataagatgttacctggggtcaccgaagacgccagcggtggaagtgagctggtcgatgagggcggctgatttgggctcaacactagaggccttggcgtactgtgtgctaagccctccccctgatggcacgaagaacgctccatttaccatcatgtccccttctgtcctccagttccacccagtccagtcaccctcgtttgtgtccacgcgcttcgtcacctaaaccaacaaccaacatgaacaaaatctcatcagtccacgtgtacctatacaataggcgcgtacaataatacacagtaacttattactgccaccctaatggtggctgatctggcatgcataagcacaatcgctttcgcagctgcctctttcatcttcagttgagttcatgcaaaaactttcaaaaaaaaaaccaactttttcttgtctcgtaggaagaacaatttttaatttttcgccaattaacagctctatctatcgcactgaaataaaaaagaaaataaagaaatgaatttggaggataaaaaagaaaacagtgtgcggcgcgtgtttatgtcattcacgcgccaccgtagcaagtgggatgcaatcaattccataatgtctgtacatttgaagagaagtcaaaagaaaagttttccaagcacaaaatatcatgaaacaattattccacttttggcaatagtattattagcccatacctctgaaacccctctgtttatttatttttcattttcaccaaaggtaatattaattatttccctctttaccaaaacaaaaaagaaagaaagcagaaaattacgaaactacccctaaagaagaatcttacctctttggcgttttggtttgctggggcaatgtatcgattaccctggctgttaatggtggggttagcactaccgccgatggcatacatctcccactgagtgaaatcgttgttgaccacgtgtatgtacccgcgtctacacctgggcatacgctgcaccagcgccggcccaaaatggttgaaggcaatcgtaacctgcatacctgaatctggcaagtagttatcgttgtggcccaaaagcataacctcatcatggtgtgagaaatggttgttcgtgatcgtaatccccgtcgaacccattattgcgtcgatcaaaccgtccgtacagtaagacagcgtgcagtggtcgatccagattttgcgtgcgctgtagatggagatacca

SEQ ID NO: 17528 - DNA, 3225 bp, Cannabis sativa
atattttctgtgctacatttgtttcagttctccatgagtggcaattttttgttgataagatagctagcctcaagtggtgatcaatgagtttcgtataagaagactatactttattcacattagtaatgattttgagttagaattctttttaatcaagctattgctgagaaattttaaggagtattcactgttacactaaataattcagatcattgatgtgaaaatttcatgtgctgcactgttttgatcatttatctttatctttttaattttgtttacatggtatgcttagcagcacgaaaagtggaaaaacgtgtgattttcttgatgactggaaaatagtactttggctatacaggttaagataagttgtatgactactagggaataactagtaacaaccaaaatatggctcaagttttgcattatcttgacataggttttcggttatgaatgattaatgtgcttgatttttgttggtagtatgaatatagtgatacaaaagtacaagagaggattgagaagcaaatagaggatgctcctgagggtcaaggcacagtcaggatgctaactcgtgaagagtgggaagcaattcaggaagtgaggcccaggactccatttgaatccaaacttgcccgtccaaatgcacgaataagaacgggtgaaccattacgcaaggtatgcaacatatatagtatctggcaaccaactccagcgcttttttttaagatcgttagctattgttgtctaacacaacctcaatattttcttcttagttagcataacaaggctagaaaatgctagtgtctgttaaaaattcggtacttatagatgttgcttatttttcatttgtctcagatgtttaaccaatctcctgagtttgtacttgcagttaacttaatgttgcttactttcatattagcatgttactggtcttaaaactagtgcccactgttttctaaccccgcattcaactcattgatttccgaaattctactttttttctctttttgacaattctaccatctttcatttctttagaccatgtttacagattatttacactttttttatcattgaattatggattatctaagtgtgccttagcaattttgtgtctaataaagaaaaaatggaattatacactgatgggcaaatgccattattcttacacttcatgtttatatgttttacacaggaagatgtgaaagactggactattgatgtgctcacggacgctcttacccgagtcgaagaaagtgtgaaaaacaactgataggtacttgttcaacatgttaagttacagttacaagttaagaattgaaattatgatactgttgtttaatacaacataggtatacataaccatggatggatcatttcatatgattgcctagaccatttgtggagtctttgctgcatcataactagtcaaaaaggaaattggctaagttcaaaaagagaaattctggtagttattggctttttttttttctttttcttggttgctgtgaatagagatgattataatgtagtaggatttgctagcaatatgatacaacatttgcaataaatataaatgcaaatttattgcctattataaacagaaccacttcaaatctgcaaggctctaaatctaatgttttctctactttttacataaattgaaaagataaattatttacttaagcaattggactgagagtatatagtggatacttgcatcaaacataacaattacatttagattatctttaactatagtgtttattaaaagatagcatatgcatgatttgaaatgtattttcatatatataacatgaataaaaagtagaaaagcaagaagtcaaagtgaatgaatacaatattaagttcacaattactacttgggagtaatgaaaacaaatgagtgggaatggaaaatttttaatatgcaattatgaaaattaataaaattattattattatttatttactttttaagaaacttaatcttgtattagaatttagaatgatctttcttatttatttacttaatcattctaattccattaccaaaacgtttatgattgtttgtagacttcattccttgaaagtattttactcaataatttgtgtttcttttactttttccaatttaattggaaaaaactaaatattttttagtggaaccaatcaaattaccttataattgatatatttttttttacacattataattgtaggctctaatcatttacattgtatgaatattacataagaaaatgtaattcaataaataaaataaagcatgcttaaaaatgtcttagtgagaaattgtattgaggattgaaaatttgtatgatccaagtactagtatgattttgacagagtatatggtatgcttcagttctatttacagttcgtcgagcaaattaatactcgcgtcaactctgagattgggtgaatcttatgtatatttttttaaaaaaaaaaaaattgttttgatatttgggttgggtgggccttaaatgcaggcctaacctagagtcgagcctagtataaagcttacaccacttgtagaggttaatataataattaactactttttatgtaaaaacaaattctattttaccggttgagtaatttgggtcactcccttgaatgtcgtgcagtgaaaagtgaatcctagagatgtaacaactctttggacaatttaagttttctattttattggtcgatcagataaatgaactaatattatactactgatcggtgatttcatatgtatcttttttaagtcgcgaataaaagtttctttctttcctaatactaacaaggctttcgggtcatgaggtatatacgtggttaaaacttctaatcttaaacctttcatattcttacgagactgtggatttacttttaacatgtgtctaagatataaaaccttgtgactccaatctaaggtgtgctacttgttagctcgagattttttttagaggtaactgatagaatttgttaattttaaattgttaaagttaaaattttataatagaagtttagtaatttgataattcacaatgtttaacatttaattatgtataattttatatctaaatttgataattattaaaccagaatcattaaaaggttacacaaaaatatattgaaattttgattattttaacattaattaataatttaggaattatgatcaaaatgtatgttatattggtagatttgcat

SEQ ID NO: 17529 - DNA, 10801 bp, Cannabis sativa
  modified_base (10742)..(10776): a, c, t, g, unknown or other
tagttagtggaattagtttcaaactttgacattttgaatctcaattgaggattgaaaatatttaggcaaattaaataaattttaagatatagtccatacagcaaattcaaacaaaaaatttatcaaagcgtttacaatgaaataaaataaaatcctaataagtcttcactcttcataaattaatcatcaaaaaggtgtgaaatataataggttctgaactaaattagtatctgaaaaaaaatctatctatcaatagctatcattatggatcaatgatttttgaagaaataattttattatacatatcataaataaagaaaataacaaggagaaatgacatccctaatagaaacaacatgagccatttgacaaaatatccaaaacccaacaacagtacacaaattcctctctaatcttcagaccaataataattcctactaaaataatcaggcaatgaaaacataccattattaaaaagtaaatactaaaaaaaatccaatgtgtaatttttactataaaaaatgaaagctactaataaagtcgagcactaacatagatcgagcataaacagacccaacaccattcattctaatattgctaagcagaacaattcgttgaaatcaccaccctaatccagatccgggagcaaatgttagttattggaattagtttcaaactttaagattttgagtattaattgaggataataaatgattgagggtaaatttatacaacaccctctaaaatggtgttttggtagactttttatttatttcagcattcaaaaagagattttcaatctaattgtttgcatgatcgtatacgttatttaggactacctgtatattttaagaaaatttttaatagtttataataccgaaaataaggtttagatattttgttgcatgagcgaatgttgttccttatacgcatggtaagtgacaagtaactgtttgaaccctattttcgacactataaattatttagaattttttaaaaatttgcatgcggtcctaaatagctacaactaaattttttttctaaatgtcaaaacaaataaaggtctaccaaaatataagaattagtctactgtagaaattttcaatattttttttttttttgctaagaagaaatttccaataattgatttatacaattttggactattttagatctagttattgcattttggaaaccaaaaaactaaaattataaaataactaaaagcaattaaaatgcaaattataacccataaaatcaacaagcacattgcatgcattaattaagtaatgttatatcttaactgaactcttaaacaacctaataacaagtagcagtagtactcttggaaatcgaaaaaaaaaattaacaacaaaactaaataaatccaatatatatttatatataaaaatatataaatatatatatacattgagagttcgtttggcctaccacataaggcgactagaaccagggttgaggccgagattcgagttcccagtatgtttcattttaattttttgtatttatacatttacatatttttaattaattatgtatccttatgattcaaaaatgaactatttttggacatgattagaagcatgccattttcatggagatgatggctagaattttgtgagtaagagatagctaatggttatttaggacttttcatatagtgttacaatagtaggataaatatgaagattattttgtaaagttcccaaagaaatagggagaaatgaaaaataaatgcattttttggatagaaaaataggggatacatacaaatgatagagaagataaaaagttaaattatatcgtgaaagagagaatcaaaagaaaaagtaaaatgatgagaattaacatgcgtagcgtcgcgtgtagaacaattattgtgtaatctatttttataattctctaattggaatctcttcttaataaaaagtccttaatcacgtttagaaaagaatccttaatcttctcccaaaacaattatttatacttgagaatgataaaagagtgaaaaaaggtggcaactagtgtttgaaaaagtctaaaaaagagtcgtttgaatttaaagtggcgtcacaacgccacttacatggataatgatcggagcattgtccgacctttatgtgaaaataaaaaatattactttttgcagtgtctacattggaaccaagacgtcaatacctttgtaatctcattgacattttagagccctaaatagaggggttcataatttgtcgtcatgtcgtgttgaaacgttattttttatgtattttattaaagaaaacagaatcttgcaaatttctttatgttttttttttttaattaatcagataccatatcataatacatttctttttctgttattattaatcatttactttttttttccaaatctatcgcagtagtttgattaaaagaaatgttaatagtgtctaacaccacccaaaatattatacagttatcaatataattaaatatcaaatttcacatcatttaatataataattgttataaaatatcttaaggtgtcactttgtactacatagtaatgatctttaattaatatatatgacctttctgttccaaacaaaccagactttttttcctggaaaataataataataataataatagaatattttttatccgaataatatactacacactgtagcagaacaaaaaaaaggtcatgtaaacgttgataatccgtgaattaaattgaacttatccttatcaatatcagtccagtttgaacaaattttgtatacacttgaaaaaataaacaaaaaatttattacattatggggtcaacactcaaaccagaccttggtgagaagacaaacacaagcctaggttgttccaattttttttcacaatctagaaccatatcaagttcatctttttttttctttttttttgacacaaggatttggtatctgatcaatggcagatagagagtatggcccccatataagaatcaaggttgccaaactaatcctttgaaaatttgaacaaaatgctataagcccaacttcttggagaaccaatccgaaatattggcaattacaaatccagcaaagacctgaacaccacaaatgaaacaaacacatacaaatagttcattcagtctttcagatagcctaaataaatgtcaactatatttttataattcagagagcgcacctgagccgagccaagaatgtaaactgctgaatagtgacgcccgtggatcatcatgtcagccaccattgcaagtggtatggtgagtgacatgcctagggtcgcgaccagaggagttgtccacactacacacaatgccctgtgtggaatagaaatcataaataagaaagagaaaaaaaagaggaggcaataaaagcagaccacaaatcactatttcgaatagaaggctattagatgacaataccaaaagtaatctgagagtacacttccaacaaagccattggcaagaactacttcgtccagtttgatagagtgagggatcgtaaatttcggttcaattcccaatgcagtcaatggccaaactggataaggcataaacaaacatattcctcaatcaagcaaaacaatgctgcatgattctttcacatatagaataaagcttaatctgaagggtgactgagagagagtttaaaacaccacaatttaatagcaaagcatagcaagatgcttctagaggcataagtaggataaaacaaacaagtatgaagaaccctgtaatgactttcagtgtgacaactgagcacttaccgagccaccatagtgctaccagcgtaaacaatccaatgtatccgaacaacttctgaacatcagcattttctccttcctcaccagaaaactttttaagaagcactgcaatatgaacagcaaaataaacgggagtatgacttttactgtccatttaaatttgaaaaattacaactgtactagaaattaataacatatatgtatacatctttgatcaaaatttggcaacctgtaaatagaccatatgacacagcggagagaaggccaaaaacatctccaacaagagaacgttccccattgctgagcacatacatatcaaccgtcaaagttaatcctagtatccaactaaggaatttcaaattgtaaaaacaaaggtagcatatatctatctgtacatgaacttataaacatgagaagcatcagtaaagttgaaatgatttcaaaactcagtaaatagtaatacaaatccagcatttcttcaacttaaaactactgatctttgctccatcaggaggtcttctaaggactacaaccaaatcacagatgcagagcaccaaaacaaataagcaaaacaactgcttccatatgagatggcagagatgttcaccttccactaaattgtatgtcaataatgaagatgtattgtataatccagatccaagaggtaagttagaacttacgtagaggatcctaattttgaatcatcagtagcccatgtttttcccatagttgtcattataacgccagccatgctaacaaaaacagcaacaacttttgctacattcaaagaatcttgaccgagaaatgctccaatgaaaagtgtaaagagtcctgaagtagaagataatacagttgtacttgcaacactcgtccgtgcaagtgcagcatttgacaaatactgcaacaaacaaaggaatcccatttataactaaaattttaatagatgtttttaatttgataacaaaaataaagcaattgttagaaattctaatattgttgtaaggcttttgatctgttcattaaaaaataatttcacgccactgcatcaaagcaggtataattggttttcctttcccaccctataatcagccgaaaagactactctttccaacatgcagaaacttatgaacacgaaagctatatgtagtagttgactggttttaaaagagtagtcttagaaagttccttacttcagtaataaaccaaatgggggctatgtagaatccatatgtagcaacttcccttgttgtaagctttctctcttgtttcagcacatgcaattcatctttgtgtctagaaaccaaaggtcttccttctgcaagaggagaaaggtctgcttcactatcttttctagttaacatcccttgcatttccagttcatattctttctgccctccatacttcaaaggagaagtaaatccagaagaaaattcgttcatgctttctgcatttttgccaccttttgaagaacgacgtcttagtaaactacacaaccaatccttaaggaatgatactggaagataaactaccataagagaagctccaagataagttactgcgaatggctgcttataatccgtaaatatgtcctacacaaacaaaataattgtcacttagaaagaaaactttggcataatacaggacttggcataataaaaaccattgtacataaaccacccataaagttttaaaacagataaattagttcaatttatgcttctacaatagctcttaacaaaaacaacaatggtcaaaggtttcatagaaacagatttattcgcagttataaacccccaatgtaagaataacatttcaaactgatcacagtttctccgacgattactatatttaaccattatgtgaacccgaatccatttaaaattacctcatccaacaagtttaatacccttatcaatacttctctcctagcaaagaaccaagcttgagagctaaattaatgtctgaaatccatgcctttctttataacaaacatcttaagagtttgtaaattttaccacttctcctataaattccataaagcattttctccagtaggcatacacaatagatatacaaattaaaacaaatacgtataaatccacatccagttccaaactttaaatcaaaagtcaaaaccataaactgaaactgagaaaacccataaaggatatgcacaacaaatacatatgcatcattgcaaagaatgaatcttttaccaaaacttagtcaaatgttaaatccaacacacatatttttttaacaaaacattaaaccacgaatagtctacccagaaaactagaaacttgaatcacctgggtgacttcagctgagataacccatataacaacaacggtaactatgaggaacagcccagccttgtatttccaacccatcacaaggggcgagcaagcaaagacccagaaaggaaaaatatgagattcgtagaattgagtggttaaatttcagatctttgaccttgatgtattccagtggtgaccagcgtggaagcgtgagatcttaggtctggtgggaatttcgatatttggtgttaaattcaggcaagagatagatatggggcagcaaatcaggggaattaaaaattcttagcagtaaggagaaaaatattaaagccgaaatatttgggtgggagtaaagaaaacaatgaagaaagagagagaaacagaaatagaaagaaaagagagggaagtgttaaaattaagttttggtgataacgattttttctttttaactcaacctctttttttttttttttccttaactttgtgaattgtgtatcataaatatatattttttaaaggaattactttttatttaccaatttgtttaaggatattttttaaccaatttaatttgttttaaaatttatgattgaaaaatatgtatgtaaagttctataatccacttcaaaaaaattacctagttataatttcattttttatatgaaaatcctagaattttaggatatagtgtcgaaatcattattcaaatagtttgttttattttttaaaattctttatcattcataaaatatgcaataataaaattcaattccataaataaacatattatatatttttataagtgtataaatacaaatctaaataatatgtttgttgaagagaagaagaacattaatagcaaaactgtaccttagttattgatagagataattttgtggtgtgttatcccaatttttacacaaggtgatgtggcatccatctcggtgatacgtaaaaaaaaaaaccataaaacttggacggacaatgcctcctacaatgtgttgtacagagagatttggtacttaaatcatagaagaagctgggaatattcaaggttagtgtacaataacatctgatcagcttccattacgcaggcagctcgcatacgccgactagaaaaggtgaattaaatgcttttagaaatataacctatatacctgcaagcttgcaagtcacaccaatattcctaaaaaaaattattaacaaaaaaacattcattaaaaaaggcaaaggccacccaaaagggcaaagtctaagtggaaacaagaggttccaccttctcagaggacaaacaaccgaaaaagtaataagcagcatcccacgctgcaagagcatgatcatgagtgttaagagttatgcgaatccacaccaccctagcattagccaaagaatctagccgatccacaagaagattaaaccaatacttagcatggagcctttttagcataaatatcatcaaccagcactttacaatctgaaaggagaaccgaactctgccagccacgcgagaagctgcatggagaagaacaatggtctctccttgaaggggagaggaaatatcaaacctgactgtcaaagcttccaacacagctccgccattattcttcacaatgatagctctcgcaacccacgaccctctacaagcaacatccacaaaaatacagacagtgtctgctgtgaaaacagggatccccccatcagctctgggagctataaaagatcttctaattttaggggccatggcttggagaatctagtttgtagagttttgagctaaagcatgataccaggcaccgttggaaaaataccctcatgataagctttattccttaccaaccacagctcatagcatagacaccctacgaaaatactaaattgcatattgatgtcaagagggatgctaagatgaatatcaggatttaagatccagttcaataatgcaaatgaattatcaaaagctaaatcctctgatctcaaaccccactgactaaaaagccaagctcatttagccacatgacggttaaaaaagagatgttagaaggaatcctcaccaacatgacaaatggagcaagtcatattattgccaaaaacccattggagacggcaaccaaaaggaagaatgtctctactaagcttccacaagaacaggtggagtcattcatggaccttaagcttccaaagatctttccacagagggtcaaggtggccccacctatgcttaatcaaggctctataagccagtttggtagagaaacaaccatcatgagcatccttccaaatgagtacatcagggtgtgtaggtggcaatctcttcaaagagagaatttactcaaataagctaggcacaaaccattggcgaagctaatccaagtcccaatcactatttgcctttaccagaaaaggggtaacaaaatatggagaaacctcaataatagggttaaaggtagctcggtaattatcccaatcaatccaaggaatccaggaggacttccaaatgtcaatagcagtaccagggccaactaagaggcaagtttcttttctatgaacctctcttgtagccaaaaccccacgcgccccaaaagacaacggaccatgttcatttaacgaccagaaagatgcggagttacgacaatacttggccaaaaaagaacgacaccacaaggaccaatcacttgaagctaatttccatcataatttgtagattagtgacatgttaatatcttgaaagcgttttaagtttaggccacctctatcaaaggggagacacaaatagagagtcccaagacgccaaagccaaatagcgattacgatctacactccccatccaccaaaattttcaaataagcccatctagctcttcacaaaggccttttggaaggagaaaggtagacatagtataaagaggagaactcaaagccactgatctaatgagggcagtttttcccgcctgagagagaagtttgcaatgccaaccctcaatgcgagcacgaagattgtccctagcaaattggaaatcttttttcttgctattagagaagaaaattgggttcccaaaaaacttatcctgtggattcatagctcgagaacccaaggctttagaaatgtccactctcgtctgagcctctacattcttcgataagataatagcagatttccccacattgataacctacccagaccacttgcaatagtcctctagacacttctaaacacaaacaacttctctcaaatcagctctacagaaagtgaaagtatcatctgcatacatcaagtgagaaatagaagggcatcgagaattgatcttaaaaccatggaatcgctcgtggtcttcctatttcaacaaaatcctagaaagaacctcactatagataataaactaatacggcgacaacggatcatccttacgtaatcctctcttagggcagaactatcttagagggggcccattaaggagaacagagaaagaaactaaagagacacacatcagaataagggaaatgaatctttcatgaaaaccaaaggatctcagccactgctcaaggaaattctactcaatctgatcataggccttagacatgtcaaaattcacgccaacatagttgcacgatccacccattttcttaaaagaatccataatctcatgggcaaggatactattttctgctatccatctccccagaacaaaggcaaactagaatggagaaataatatcacttagaataggctgtaaacagtttgtcaagagtttcgagatgactttatacgcaaaattgcataagcttataggcctaaactcatcaaaagcatatgccccttgtttcttaggaccctagcccggacccagactttggtctagacatcggcctggccccgaacctagcttggactcagccttggacccacaccccgtcccggaccctaaccccagaccccagacacaaacccgaccctagtctcgtacccgcctgaaccccgacccaactcagacccgaccctagaccagccccgacctggcccttgaccccgacccgaatctgaacccggaccctcacccgcccccggaccctaactcggactcgaattcgaaccgtaaactgccttcggaccctagttcagacccaaactccggctcaaacccctgacttggccgggacaaatatgaggagagagaaagtgatgagagagaaaatgaggagagagaaaataatgtgagaaaatgaagagagacaaagtgatgagagagaaagtgtgagaaaataatgtgaaaaaatgatgagagagaaaattatgtgaaaaaatgatgagtgagatagcgatgagagagaaaataatatgaaaaaataatgagtataatgatgtgagataagtaaaaagaatattgaccaaaagtaaattttttagaacaaaaaataacattttgttgttctcaaaattcttgtattttataattttaatatctgaaaactgtttctaaaaaataaagccaaacacgcttaattatttttaagaaaataattttttatttttttttaaaaattaattttttagttatgatactaaacatgtacttatattttttttttatttgcttgaataattgggttgtatttaaatggtaattataaaaaaaagtcaattaattaaggtgtcgtttggtannnnnnnnnnnnnnnnnnnnnnnnnnnnnnnnnnnaaagtaaaatttttgtttttgaaaa

SEQ ID NO: 17530 - DNA, 2861 bp, Cannabis sativa
aatgagggttcatatcccatgtgggactctttccaactcacacacactaagacacttatatattttgttaaaatattcacaacatttccaacacatttcatccaattcatcttcttcacctttatctttctttagtgctcaaagaaaaggcctaagcttgcattgacatggttttagagccgatgacagtcaataatcgtttggttcaacctcaagatcaaaatttcgttgcttattgcttagtatccgttcaacaacaagcttttcgattattatttttatgaaagatttttataaatgaattaaaattcattcatgaaaataaaaaaaataaaaaacaatggtgattattaataaaacaagtgaagaatatataatatataaaaaaagattgataataagaatttaattaattaatgtatctttaactgaaaatcaaacttcaataaatattgataaaattaataattttatcatgtaatttgcatcaaagtcttgttcaagtttggccttagattttgtttaagcttaggcctcaatctccattccaatatatactatatattgactttgactgatattaatataaaaattcttaataatattaatattgtctctatagctaatatgttcatctaacaatcagaacctccattccatatgtttgtggtctggtgcaaaagttaattaagtaccaataagcttttttcaactaatccaataattggatgaagaatatccaattttttctttaacactcataatactttttttttcaattatctaattaataatgttagttagttttttagatatgtcatcttttcaatagaagaatccaaatgacattattcccaagaaaaagacttttcaaaaaacatgattataagacgatcgatattaagactagctaatactctcattatagtttgacccttaattataacctaactactaaattaaatatacgatgatgatgtaataatattacagggccacattcttgttaaaattatgtatatatatgacagccctacttaatttgtaatggcaaataaattttaaaatactacaaaaaaaattgttatttttagtgataatttttagtcacaatatattttttttttgactaaatattacttttaatcacaacaaaatgtttcatgtgactataatatagtatttagttacaagttgtaactaatttagttttagtcacaacaagtattatgattaaaaatacatttagttgcaacaaattataatttttgtgactaatatttttaatcacggatcttttaatcacaatataagaattataatttaaaattagtcacaatttttttactaaaattaaaattttttgtattgatgaccttaaataatggcattccacatatacatgtacataatttgatttttaaattaatataatagtgttttttacttaaaaagtaaaaacaaaaatgaataccttgacatattacattgattaaagaaataaatatataccaacaatatagaatataatagaataagtaaaggggactgatcaacaactttacttataaataaattacatttatatagaattagatcagaatgtgtgacataatggccgtgcatatcggtgcatgcttcattcttcttctattttctttcgaatatattatatttatataatttatatgtataaatataatattgtgtcaagttggcacgtgagatgaaaattataaaatattaatacactttttttttcttcaaatcatgactaataaccaggaagataagactctgtaggtgtagcaaataaatattaagtaacaaaccatatttatagtctcagtaatctgttaaaaataattaataagaagcattgttagtggcatttttccattgggttttaaagacgatagagaaagtgatatattattataagtggcttaatacaccttaattgctggacccatgaagcttatttcaatttcaaacaataaatcatataggaagaggaggaccaacgttagatataaatatttgataaggtttagggtttatctctgatataaatataatataactgttatatggtaatggaggagggtcttaacaattgacttttccatgtgttgaaatcaataggccagggtgtatatttatttttccagtttgttggtccacatgatttaaaaaaaaaaaaaaaaaatctttaatactttcgagaccttttcaagagaccaaatcaaatatatgttaattaaaaccaataagtaacttttttttttttacatgtatgatgtattgtcattactaattactatgtccaaaacactttcccattgttaccgttgcatcttgcatgagtacactctttccagaaaataataatagtaatcttctcattttgtcgaaattttcctatacaatgtatttttttcttgctaacctgaacaataaattaaatagtgagttagtctcctctacaccctaaaaaaattattccagtacttatttgttttatttgttttggaatttagaaaagtttcttaaactttttttttttctaataattgtgcatatttttaattattttagattattagtaaatttttagtttatagtactaaaaataattgttcaacagatatataaaaaaagtaattatgtgtgcaataattaatattgtaaattattttgaatttattaaaaatttataaataattattttaatgaaaaaaaaaaatatcttcacaatgactaaacaaataatagctatatcgattcccagtacttacttctccatcgttttaatcctccaacaaactatcacggtaaatatctctctctggttttctttt

SEQ ID NO: 17531 - DNA, 2960 bp, Cannabis sativa
  modified_base (2681)..(2685): a, c, t, g, unknown or other
ctacttttatactagaaacttcaaactaaggctaacaaaacaatttatgaaatgcacgtggatattctaaaaaacataggaaacaggaaaaagtttccacggtcttgtgtttgagattagcttgattgagtgctgcatgtgttgatgccatccttgcaatccttggtgaggtcattgaatgtttcaatctgctttttccctctcaagaaaacttcagtatcaacagacaccctcatgtatccatcaaattcgactggagccccgttgttcagcttagtcatctcagagtaccactcactgttctcaccccaaagatccttgtactcttcaagaaaatgagtcgtatacttgtctttcaaagggtcaaagaaagattgatcaggttcatctgttgcaatgtaaaggttccttccatcctcaattttgtcttgcaaagttgacagaagtgaatttggtgaagtatcttgatcaaggttaggccaaagctccttgttcctagccttttctcctctcacaatgtgaacggagtcgtagtcccagttcaatcttgatgcaactccagacactatatccatcaaccttcttgatttccatatcaaatgccaaggtcgccggacagcagattctgtttctccttcacataccctgtaccagtaattatcaggctccacagtcccaaactttctcataatcaaagcatcattgacgctcgaaagtttcattggcgtgaccctgaagtcctccacaagatgaagattcagcccatctttcttctgccatttattccaatcagtccagaactggcccttatctaacacagaggctgactccttcaaatgctcaaaatcaaaataaaacctgaaatctttcccttcctcatcctgattggaagaagtgtaaattgaagacaggcaaatactcaaatccataaccaaagttcggttaaggtactgagcttcaccgagagcacaaaggaaactccacaggtaatgattcatgttcttgcatctgtctccaccacccacatacaacaagtacttgccgtggctgaaagatccttcggactcaacaacaggaagggaatcatttacagcttccccaacaacaggcaaagacttaacctcttcttgtttcagaggtctcttctcaaacccaggagtctgatttctcttctttttccttgcattgacaccactatggtagtctccaatctgaaccacactaagagtacaatttggagaccttgaaatcacaaacctcctataatccttgtaaaaattggcagtctttccttccttaggcctaaaccgccaagccatatcacagctccatgcttcaggtgcaggaactgatttcccgaaccgatagaaatgaatatccggaaaccgttctatggctgccctcatcatcaaatggaacacatctgggtccctacaatcaattgggatatccacattagcctcacaatcagttgagttcccctcagcagtgccactctcttggttgttgtcaccactactcactttgtccacatctgttatgttgataaaagtagagaacgcagtctgattggaagccatgaaatcctcaccggtccttgtcacagtgttatcagatttgaaagtggcattggaagttgaagtaagaaaagtggtgatcttggttgtagggtgaaacaaaggatcttccggttcataagtcgcggctataatagtgaagattaagactccgagaacaaacaacgtgaagcaaaggtttccaatcatggccatggcatttggacccaaattctcaggccggaagcttccggtcctagaaaactgaggacgacccaacattttcttgaagcctacccagatggatatggatctgtcaaagggtaaggattcagtactctgttttgagcttgtttttgcggatcttaacgaaaaatcaaatttggttttcttcaaattgaacaaatgtaggcaatgacaaaaagatttatagacagaaacaattgaatctaataaagaaagatccaaatctcaaactaataatatatatatatatatacaggattcaatcttctgttactgaaaattaaaatctcttaccttttttgtcagtaagtcgagcaaaatcagcagaaaactctctctctccgagagtttcgacagtgagctgtgaggtatagaagaagcaagcggcttacttagtgcaaagattttctgtgagattttgatttttatatataaatattttttctaataataataataatttaatattttagtcaaactcgacaaaaacgattatatcactgaatctaatcttcttaattgttaatctttctttctaaaaatattgttattttttaaaaaatacatatatattttttttaaaggaaactattgttagatgtcggtcctttttttttttattttggttgttcggtcttcatcactattcaccatatgattaaatggtactcgctattacatatgcatagcatatttggtgttataacttgtatgtatggattgaaaattaagtgtttatataaaaaaaaaaaaaaattacgccataaatgtttaagtttaattttttattataaataaatatataagtttactttttacctagcttcagtaaattgaatccatgattggtctagatcattaattttttatttttttttnnnnnaaatagtttaaatatatcaataagaaaatgacatgtggacaagtacctacggaattctagaattataatttatgtattattaccgctaaaaattaaacttaagtatttatttgcaaccaaaaattaaacttaagtatatatatctcaaattactcaaaaaaatgttattctttatgtaaaaaaagaaaaagaaaaaaattattctttaattgtaaatatatattaaaaaaataaatatgctttaaactacatttatttaatgttttttttttttt

SEQ ID NO: 17532 - DNA, 5225 bp, Cannabis sativa
actaactacactttatattttctttttaaatttatttacgccccctcactttaaattctgggtccgccactgtatatatatatattaatataccagaaatagaaatgaatatatattttcgtgtcaaaaaaacttgagtgaaagatttttcaaaaaagaatgatatttaggttggtcttctttaaattttaaaaaatatatattataatgtagtttttatgaaaaatctttttaatgcatggtacgtagctagctgttaaattaatatattgcatttttttatcaaaaaataaaaaattaatattgcatgcgttcttataattagagaaagaaaaaatactatgcatgtgtaattttcatgcacctatataggctgccatatgacccatatctatatattaatatatatatattaatatatatatatacatatatatatataattggtaaattttacaatatataatatacagaagaaaaatagcaacaataaactgctgcaggttgaaatatacttgatgatgaatatttgtatctgaatttagggtttgctacatgcaaatctcaattttcttaaatcaactatcggcgacatagttacatttttctatataaatatataatatataccaacatgctatatatttatatttatatatatcttctcttaataataaataaatgtatattctcaatgaaaagattcggtttggacgcgcgcaattaataatattaattagttgatgaatgtatatctatccctttttctggccggccatattgttccagttgcagtactttaatataaatttataaaatatgctttgaatttatataaatatatattaattaaatcttagagtaataattgtggttctttcaaatgattcttttgttaggagcattagcatttaaattgacttgagtactagtactgtcccagtttgctccccacgccactcttacaaaacacacacacacacactatatataccaacgtaattagttagtgagaacaaaaataccttggtcactctctactagatctacatatatttatataaatattagtattgttattatttggcacatccaatactgtaccaattagttagtaagcggttcttcatattattaattaaatcaaaatatatatactcctattaaaatacattaataataatatattattttttataatgtttgacacttcaattagcattttcaatatgcatgaaaaagccaattagttagtgctagtgccattcttacacacatgatctcatctaccctttttgggtagttacatgacaagatatatatatatatattatgtgaggggaaatcttttattaaaccagagttttaatgataatttgctctccattcacaaccctatatatcaccatatatatatataatatataatatatttaattgtttggtaattacaatttatttatttttcggcaacaatcttctcctgcatgcaaagagtactttatcataacatatgcttaaatagctagttattgtttattcgatttcatattctatgatttgactggtaattacaatggtccgtacaaaagaatataacaaaattaatcatggatcagtatatatcaatcacctcaagaaaagattaatttatatatttgaagagctagcgtatccggccgatttaaggatcattcttctatatctagctccttttcttaagaatatttttcctttaccagactattatatatatttatacatatatatgttcaatagcaatgatgaatgaagtgatctatatggattaatcacatatataatattatattggactaaacttgcgaaattaaactagtcaaattatgatcttgtcttttcttgaagttataaattgctagctagaccacatttcaaacctttgtttcaatctatttaatctctaaatgattagtaattcatcaacaataataattagcgaataccggcctttattaattaattacatatatcaaacctttacccattcacaaaagggttctcatcatgagaattaattcatgtttcatttcgcaaaaggggaatattttgtacgaagtgatggggtttaagatttgtcttaaatgatcaaacatatatgcatatgcatgcatggcatgctacatagtatatataagaagcaataacatgatcttaattagtatatataaggagatatctatctatctatatcaatattttagtacagtatatatattaggattaggagccgctttatttgactagatgcaattaaggggtagcacatccaccattaaagtgggaccacgtggcagtgttctttaatcatcacaagatgaattgatgatgagtagtagtagtcctacaattatacatatgtttaattatacaagggtctcttttcttcttctatatatatttttattgagagaagatggggactaattagtgggaatataaatcttagctaaaacataatatcagtttaatttcttaattataactagttactaataatattaatgtataaccttcttgtattgctcagcttgctttttaataatcttggtcttaattatcatattgttaaagtgtgatgttacttgtgggggtggttggggtccaattgccgcgcaccattgctacagtaagctctacaacttgcaaaactagataactactatactatttatattacccttttttattatttatttttaatttttcatttacaacaaaaaaacaaaaataggaaaaaggagatagattcatatgcatatggttccccaattttgatattctttttttcttttattttctttttcttctgtaaattctctcatattcttttttcaaataattccaagtttgtcacgttgtaataaacattcctactatacttttctggtgaagaaaaaataaaaataaaaaagaagaagaagaagaagaagaagaagaataaaaggctttgtcaattaataaaagcaacgcaatcggtacttgccaccaaaaagaataatagtatcgttttcggataatggataaaaatatacaataatttaagagcaatattaatatcatttaattttcggaactttatttatatatatacatataattctgtattttttttttgataattaattaattatgttttatattttcatttggatataattttcaagcccttatatatgagcttattaaggatcaaagctagttttagcttgatttgtatgtcaactgcaggtaattaaggcaacttataacataattaataaataattaaatagtttctttctatctcaaacccaatctaccatctactctacgtgtgatcatctcaaaaccagtagatatgcaaaaagtatattcgatagataaaactgatttaatttaatatttaatgaatattagcttgattgaatgactgaaattaattgaatcgtattgaattgtaaaatttaatatctaataatatatattaaatttatctaaatatatctaaaaatatttaatgtgggccaataaaaattcttaaattaatagaatgtaaagttgacttagtctttagaaaaaaaaaaattgaccgagtcatagctaagctaagtttaatcccaataaattaatcattcgatgaatatatatacagaagttaattgcctataaattatccgctatgcaagttaattaattcggtggaggcataaagtcttagttatcacgtgatcataggagattgaattggtcaggtcacatatatagaaagccaatcaaataatttggccaaagacattaattagtagatgagtaagtgtggtcatttctctttaatatatatgggaatggatccatcaattagaattgagatcatatttttttatatatatataaaaaagaatgtcgaacaaaaaaacattccaaagggcagaacacacggttccaatggaataacacgccattttctcattaatatatattagctataattaagagtacaaagacaatgatggaaacctatataaattatcaattatatacgtttacatatacatcctattcctacaggtaggtagccagttacgcccacaaaaacagttgtcacgtatagttggctgttgctttacattacactagctcagatgaattttattaaaaactatttaatatgatcgtctatatattgctatatacatatatatacaactatacaccatattattatgtgcgtataagtacctggatatatatatatatgtacatatgcactgataaaataatgtcgccccaccccaggtttccatctatatttattaatttatatagcttcttttactcttaattaataataggaaaatttacactatacaagtacccaagttttgtaacttatttctaatttattgttaataagtacccaagttttgtactcttctctttgttttagttatacattttaaaggaatattgtatatattttgttttaattaaatatcagatttattttaaattaaatatttgatgaaaatgaaaaaaaaaaaacttaaataatttagattgtacacgtgtcaattattttaacaatagaagttagtgaagtaccaaatgaaattttgaagaagtgaaattttaatttgagtattagtactgcatttttaaaaaaattaaatacttattagtaataaaataaacaaatgaatatttataccacaaattttctaaaataatatgaagctttttttttgttatttagtcaaagggattatatagaattaaaatatgtaggaaattgagttgaccacttagaattactttaccacttaaatgttcccaaatagacctcctgccaaacattaattggtatgtctttttaactatatacactatactagtatgacaattcatcactagaatctctataaggtttttcttcaccttaatgtgcagtcgttgttgtcaaacatgatatatatatatatatatatattttttttttttgacgcgaaacataatatatttatatagtcctaaaaatgtgaaagtgaaaaaacaaagaagaatctcactattctttcctctcgaagaatgatcagtaatgtgtgttattgctttgtcataataaatcaagttgacctgaatagtaaatagtacaaattacaatcacacaagttacaattaaaatttctaattatattttaaaatat

SEQ ID NO: 17533 - DNA, 8498 bp, Cannabis sativa
agaggtatgtttcaaataaatataaaattagaggcaaatttgattaattgattaataaaagggatattttttaacttactccaaaaaattacatcaacaaaaaagggatctctttcatctaaaaaagctcatcatttatttatgtaaaaaaaaaggtaaaaaaaaaaactttgaacgtaaaaatatgaaaattttatagaaaaaaataaattaatgttgtataattatccttattgttttcattttattaccataaaagtttcataacaattgataaaatgccatttatatataacttatatatggttaataaaataagtacaataaacatagtatttctttaaaagaaaaaaaataaccaagaaaataaagcaagtactaaactataagttaacaataaaactaatgagttaggacctcgtttttaattgaaaaagttgaagctaacccagaagtactttacctttgatttaaaccttttaccacacatatccaacaatacctagtaaacaactattttagttttttccaaaaatccaaccttttctccttttcgagtaatttaatttattgtgatatctagtctaaacaaatcatcacctctccaattttcatcatgtctttactttttttggtggggaatgtctattttagacttgatattgttaaaaaaaaaaaattagaattttaggatgcatattgcatgatgccattcactttcatggtaagaaaatttttagttgaaatttgttatgatggtatatattttaattatttaagtatttttaaaaactttaatgtgaaaataatatttttttatattatattattctaattttttaaaaattttataaaatatttagataaattataaaaaaaattaaggaaattattctatatattatttttttttaaatttaaaatttgagttcttagagtaatttcttcggtgagtttttatacgattttttgttgcgatttaagttgtttcgctaattgcaataagaatttttatgtaaaattccataaaaatattaaaaaaaaatattttaaagtgtaaaaataaaaaaatctcaaaaaattaacgaggcgaaaaataaataagaatatatctgtaattcaattaatttgggacataaaaaataaaaagaaaagagaccaccgtcactccaccgagtcaactcgtgactcagatgaaaaaagaaaaaagaaaaaactgtttccgccaaaattgttttaaataatttagttttggccttgttttattataataaattgaaataaaaaatgaatttatccaattccaatatttttgtttttggtttttttcaaacgtaaatgattattttaatcccaccactcaccatacccctttcttctttctctctctctccacttctttttctcactgttctttcttactttcatttctgtgcttttttttttttggcagcgaatacttccacgctttctctgccaaaatatcgctaaaccctagaaaatgcttccaggtaaggcttcggtttcgaattcggtttcagcctgattgccagatctgaaagcgttttctcggtaaagtttttccactgtttcttttttctttttgtcgtttttgtttttgagtttgaatttgtgttcacatttgtttattttttgtaatcattattgccttctttttgggcttagatcgaagttgagctgtgatttttagcttacgcacctgcattttgttgtagatcgaagtatgatctttgtgcttgaggaattggtgttttgtttgtgaaaagctttgagtttttggtacttttggagtggtgactggtgagtagctctgaatgatattatgtctttttttgggtttaaaagaaggtgataaggtttatgggctatttgttaatgtagttgatgtttgaacttaagaccagtgagaaaatggtgaaacagagttagcattgagcttagttgagctctcagtctttgatgtttttatgtttctttctgggcttgaaagtttcttttgccgtttctttggaaccaaacagattgttctgtagtttttgatttgtttttatcggaccaggggagctttcctttgtttctgaacttcatttcagggtgaacttgaaatggaggagcctgtagtacaaactggggaagagccagcagagaaaatccaagttgcagaaaagctagtttcagataattcatcattaggagagaagaaagttgcgaaagctgtgaaacctggttcttctactgtgacttcaaaggcctcggtaccgacgggtgttagtaggaagagggtgattgaccaaaaaaccagttcggatgtgaggaaatcatctgtgactggttcgtcacacagttcgaattcgggtcccgggacaaggcgaaacagcactggaggattggccgagaagccaactgttgcgtctgctgcaaaacagagcaatgccactactgtggctgggaaaaagacaacggagccatcaaggcggtctctccccgagctcaggaggagttcgctgccttcagtggctactaaacctttgaacagaagcagtatttcagaaactaaaaaatcaactccggtggcttcaccagccgaccgtagtctgagaagatctactgagtctgttgtaactaagcaagcaacaacagtcagtggtaggtcaacagtaaggcaatcattatccgtttcatctccttcatcttctacttcttcaagaagagtgacttcgacttcattagatagttctgggggaagcgcgataaggaagacggtttctaagctttcttctccatcttctcggtctcctacagtctctacaggattgagatcttcgtctctgtcttcatctcaggatcgaagttctactctatctggacgtaggaaaacgggtactcctgatagcagggattccaagttcattgttcttcctcaggtggagataaaagctagtgatgatgtggtgagtactacggttatctaaatcgatatttaggggcttttagcccatacccatctcaaatttttgataatgcttcacttagttaatcttaatgatactcagatagtggttcatcttcattcacaatcaatgggaaaagtattttcctttactttaaaatctaaattttcattcttctcaaataatgaaaaagataagctttattagaccatattttgtttgaaaattttggaatattaataatttaaaatacacgctgaaaaatggctatgcttggctatctgattcattcaatctccgaccattgccaacttaattcaattctacatcatttaaattttacacaaagacatacatttgcgttcattctgcagccacatggtgtatgtatcgtgcttagaatcagcgcactgaagttgagtagtgttggtgtcattgcgtgctttacaaaaattgaatatgctattactctggttttagttctacacatgtatgttatggtttctagtgtaattgtagcagtggtaatcgtcctcgtagtctttacttatcacaactcttaaacttatttcagaggttggatctcagaggtcacagggttcgcagtctcacagccaatgggttgaacttgtcatcaaatttagaggtaaacttgtgttatatatggtaattattaattatagaaagttgttactgttatgttactaaatgccagtaaaatctatccggcttgtgttttttgattccttgcctgttgtgttaagactgttatcactggtcactgaatttccttggatgagtcatacttctgattttagaagtatattgtattataaactattgtcttatggtgagctgtttcatgtgcattagtgtttatcccaatttcaaccccttgccaaacttgaagcctttgggttgtgcatgttcatttatggaaagaagttttcaactagcagttttttatactcaaatattgtatcatacgaagtctgaaactggagtattttaaagggttttcgggaaatataaccccttaagatgttattatgcgtcaacagtttttttttttccttgaaaggctttacgaattgtcattaggagtagaattatgaccaaaaggttaagtgacttgcatgaaattctgagccactacttttttctaagtgatttttgtttgttcattaaaatgacattctttgttggcagtttctttatcttagagacaatgcattgtctacattggaaggagtggagattttatcacgggtgaaggtatattacaagtgcctgagaagctttcctgttattatgatcacacctgttataagaataagtaactaatggagttataaaattttataacaatgaacatgtaagcactgtagcttgttaattgatctataattatttcttttaaccaggttcttgatttaagtttcaacgatttcaaagggcctggttttgaacctcttgagaattgcaaagccctacaggtaaaacactaagctgcctatgaattgtcatgtattaaatgctgactcatccatttgtatgttctgaaggttttttttcccacttatgtagcaactttatctagctggaaatcaaatcacatcacttgcaagtcttccccagcttcctaatttggaggtaagagcagactataataagtcttatattgctgatcaggtttcttaatagtaaacttgtagtggtcttttcaatctgtcttagtgattctttattcttgtttgtttcatgtcccttatagttcctctcagttgctcaaaataagctgaagtctttatcaatggcaagtcaaccacgactacaggtctagtttctttggctgttgcaagctaatcaaccttttcgttctttgtttgacgaagtgcttctcacttataaatcatttattgcatttgcaggtcttagctgctagcagaaataaaatttcaactctaaagggttttccttatttacctgtccttgaggtcagtatagcatcttatgttatttgattcaggctagattttagttcactttctctgtactctaagaacacattggaaatatatgaatgctccaccattggttatttgcttcatctgcagcatttacgagttgaagagaatccagttcttaaaatgcctcatttagaagcagcatgcattttgcttgttggacctaccttgaaaaagttcaatgacagaggtattcttcggcactatttatcttattgatttttatgaattggcataatgttgtgtgtgtgtgtgtgtgtgtgtgtgtgtgtgtctactttgttctgtttgagtgtttggacttgtggacatctggttttcctagtactggttggtctctatctctcctgatttttttttctatgtgattaatgggtgtttgctcattttatgttctcttgctctaaaagaaagatccataagattcactgttttttttttttttgtaatgattaatgagctagaaaataatgattaagatttgctgtttgtggcttaaaaaaatttcagcaaattaactagttcatgtgggtttgaacagatctttctcgggaggaggtatcaattgcaaaacgttatcctgcacaaacatcgttgtgcatcagagatggttgggagttttgccgtccagaccatgcagcaggtttgtaattaacagggaatttctatactattgatcactttgcaaattcagctgtagcattgtcaattagagcaccaataaagttatattgagaatgtcgtgttgagaacattatgtctgctgaggttatactgagttgtgtttgttgttaaatgttattaagctgctaaaatcggtttcttagtagcaaatagtttgagtggataacattattcttccctgtgctacgttttcttttcttactttggatattagtttgtattttcatgcaataaaatatggacgaattaaggtttgatttccatgcattacatcgattgcactgcatatatatatatatacaaagttgtatatatatttatatgaatactaattttaagaatgttttataagccatacaaaattcagttaaaatacaaatatattgtcttgttcttggtttatttgcattttatgatttactttactagcaacacaaggttagggatggaaatgaaattagttattaattagtctcttttcgggtacctaggatatatcatatattttatctaattatttgaatgctgtatattgtttatgtctaccatttaatttgcatttcgaggtaccattttgtagacatgaaaattctgcatttaaggttattttgcataagagctaaacatctgttactttttgtctgagaaatgctttgtttctgaattttggtatgttggacagattcaacatttcgctttctggctgaacgatggaaagagaatttgcctgcgggttacttggtcaaggaagcctctgtggatcgaccttctgaagaagatgcttgtcactgccactttacgtttgtgcaagagagcactttgagtgttgattcacagctagttttaagatatcaatggtttgtgggtgacagaacaccaacaaatttcactgttattcctgatgccagggaagaggtaattggtttttttggtattgccgatgtttttgacccttttgatgacaacggatcgttcattgtgttttcatgcaaaggtttcctttgtagtattagcatctgatgacatttcaccaattttattcgtttgataatggtttaccaggtttattggcccaagcatggagacattgataaagtattgaaagttgagtgtactcccgtagtgggagaagttgagtaccctcctatatttgcgatttcttcacgagtttcacgaggtaagtatttattaatttatgcattctttgaaaatgaaaatatgatcttgaagtctagctcaaatagaaaaaatatttttttttcatttgatctgacataaccgtcttgaaaaggaaatggaatcccaaaggttgtgaaccttgaagttcatggggagctagtggaggggaccgttttgaaaggccatgctgtggttgcatggtgtggaggtactcctggaaagggagttgccaggtgagttgtgtatcttgtgtggtttgttggagtgtacgcatgataccatccttggccagtaatacagatttatgcggtggaaaacttaaaatatgtgatgtgatcattggtgctatcaaggaaatacacaccattgtttgtatagcctgcttagaatgctttacaggcatgaaaataataaagccacgtttctactcactttttcagttggttaaggaggaaatggaatggcagtcctattgtaattgctggtgctgaagatgaagagtatttgttaactgtagatgacgttgattccagtttggtttttatgtacacaccagtaacagaagaaggtgccaagggcgaaccacaatataaatacaccgattttgttaaagcaggtacacagtcaattctcagatgatcttgtcttcttatcacatatccaatataattgtcgatcaatggtgttttcaatttatatgtgatgattacacttttttgagtatatttacatgggtctctggtatatacaatttggacttactagagaagttgcacttatattgtgaaacatgagggtgcttacttgaagttggactacaatgaacacgtcaatatatttgtaggaaaaatttccaaaattggtattctaccaagatttgccaagtttactccagattaataatcattagatgtaggtaaaggagtgggcattattttgtttgtattaattgatgaatgatatgcggtaaaatatagccttatttaacaagagaatacagtttaatatatttaaataatccgaaattctggacaaaaatatctgtccatgaaatcagtataaatttgaaaaaaaaaaaaccagtatgtgataaatatttatgtttcattatttcagctcctccatccgtttctaatgtccaaatcattggagatgctattgaagaaactactgtcaaaggagttggtaagtactttggaggaagagaaggccccagcaagtttgaatggttacgtgagaatttggatactgggtaagtataagctcttgttctatcaacaagttgaatgtactctcttgctgtttaattatgtttcttttttctgtttcacaaacttgccttctctgaatgtatagtctggcagttttctgttgttttgtttttaggaaaatccaaaaatgtttttgtttttgttatttttgggttgtacgtttctgtactccaatcctacccattgtattattttctctgtattaataatacaagtagtgttgttttgttttagaaaaaaaattgttggtgaatcacctattttaattcattaaatctctagttttcattttgggactttgattcaatgatgatttttattccctttttttatggctttttatttttcacgaggtataatcttaa

SEQ ID NO: 17534 - DNA, 8447 bp, Cannabis sativa
atataggcctagagtaaagggtaatatagtattgtgagaagagaaagacgcacacgttgtaaaataaaaacaatcgggtgcgagagcgaacaggggttatacaatgcggacgtgtggtggtataaaaataatcgagtgatgtgaaagctttacatattcataagcagcgccacaaagtacaaactcctctccttcgccacccccgccttcttttcttttctttttctctcattttctcgcactttctttctttctttcttcaccacccaaacacccaggtcacttcctctttttcttttcatctcctacctttccttatactgatgatgataataaattaaacttgttacggcaaatttttcattcacccattattttttagcttattctttaaaactttctcagcaaccaaacaggatttttttctctctcttaaagttggctcctttttgatcctttatttcgtgtttctatcaggttttttcagttgttcgttgttttgtatgtccatttggtttttctgcactccttcaagtgcaggcagtgttaaagttatttgtgttaaatttttggcattaacaatgggcatttgtttcagtattttctgaattttttcattcttttattcagaaagagcttggttttaggtcttctgctttgtgggtttttaatctgatttttttttttttttttaggagagagagttggagtcaccattgttgagttatagcatttgagaaaaagaggaaggccatggcagacttggaaaacttgctactggaggcagcgggaagaacaacaggagccatgagaaacaggcatgcaattccaccatctagaaggatacctgtggatgatgatggaagtgattccatggatgaagaagattcagatattgatgcatctgaatcttctttgcagaaaaggaaggaacctactcaaggcagtgagaaaggcaatggcgaaatcagttcagatgaaggtgaagagtctgatgctgggagtgatctttacaggaatgaggaggacaagaaaaggcttgcagagatgactgagcttgaaagagagatgattttatctgaaagagcaattaagaaagatgacaaaagtttaaagaagaaattgagattgaagttgcacattccaaggtcaatggtatccaagaaagataccttacctcctacattgtcatacaattcacgttcatctgcaagaactgttgataggacggctgcagtggatggtgctttgaatcagttgagagttaaacgtctgaaacagcaggattcaaagggtgttggaagctcaattacaattaagaagaaagctcctatttcagagggtttgagtagctcctcctctagtgatggggagaatctcagtggttctgatagtgaagatgacaaaagggttgacagtgatgatgagaggggatttcctggttcagagccaccatcatatgatgatataaagggcattaccattcaaaggtctaagctagcaaagtggcttatggaacctttctttgaggatttgattgttggttgctttgtgagagttgggattgggaagtctacaactggacctgtctacaggctttgcatggtgcagagtgttgattcatcacacaagaactcagagtacaagctagagggaaaaattacacataaatacttggtttgtttttggggcaatgaaagttctgctaccaaatggcagatggcaatgatttcggattctcctccaagtgaagaggagtttgagcactgggctagagaagtaaaacgcagtggagggcggatgcttctaaaacgagatgtgttagaaaagatggacgccatacaaaatgctcactcttttgtgtactcagcaactactgtgaagcaaatgttgcaggagaagaaacatgcctcatcaaggccattaaatgttgctgttgaaaaggatcgactgaggaatcggttggaagttgctgaaagtaaatctgattgggtggaagctgagaagatcaagaacaggctccaagaactagaagcatcaaggcaagctggagttaaagatgtcaaagctattagactatctgagatgaacaagaaaaacagggctgaaaatttcaaaaatgcctcagagttgaggccagcaggtactagtttgaaagctggggatgctggatatgatcccttttcaaggagatggaccagatcaagaaattactatgttgccaaggctgatgttgtggaggaagtaactaacaaagagaaccaagtaacaaaagaaattggcattgaagctacaacagcagcattagaagctgcggctgatgctggaaaattggttgatactattgctccaattgatcaagggacaaactcaaacatgttgcacaactttgatctgtcaatatccttgacgatgcttcagaagttcggcggacctaagggcgctcagcttggatacttagcaagaaaacagaagatagaagcaacagttggatgcagaatcccagagaatgatgggaaggggcatcctctaactttgacagtcagtgactacaagataagacgagggctcctctaaacatgatggggcttcggccaagtaaggtaatggttttggttttaggcttttagcatgaagaagttgaggccatctcaactcagtaatagttttgttttcatttttttttagaacagttctgtattctccaagatcagctagcaccacattttcataacaatgatgcttaagcatttacatgaaataatagtcagggctatattatggattaacaatcaatcaacattgaacagaaaataaagcaaataactattaataaatatgtgttactattaataaacaatctatgtacaaatcttacaccaccaagtccaggtgcacaattcagtacattcaaagtgaaactgagtattactaccaactttactgcaattggatcaactagaattttgatcgaatcgccaaaggatttattctagtacaaaatgtgtatcagaagtataattatttgaaaatgttaaaaattgttctttagcaaatcttttttataccctacactcgaatgtgtggcggctgtacagtaaagacattctacccttaaaaagtagaagaatgtcatacatggcaccattgttgctactacccatggttgtgtgagaagtctccaccagccaaatctgcagagatggtgcccaaaaaagaaaaaaagcattgccctttaaagaattagtgtcattaaacaagaatctgagacctagcagcaaccctggagcacttcttccttccagtcttgccaagtccacaaacacaaatctcgagaagctcataatcttcttcccagaataataaggatgccatctctggattatcaaggagcattttagatgtaaggtacccagcaatggtccatgtttggtaaagtcgggattgctttccgataaatttccctgttctggtgtcataatattcaggccaatggtcaactaaaagcctcttctcagccaaagcaactgcttttcgagctagatctaattttcgcatcttgatacaagccagtgtgaactgcaaacataaaaaaactatggtgagattatggctttactaaacacaaaataacaacctttctgttcctgcaaggtctctatctctaaagcaaaaacaaactatggatgcaagaccttttgttctcgcaaattaaaaaaccaacaaaggcaaatggttacataagctgttcatgatcaatatccagctagaggaagttaaaaaccaatggattgagtaatacaaatcaattgtgtatcaggaaaaattcataaaggtcccaatttctaaatccatctacaaacagaactggtgtaacagaaacaaaatccaatcttacctgccacagaagtgttggccaagacccgccattgtgatatgaccaagggctgtatgagacgagcatatgttagtgtaatgaacaaaaatcaaagcactgaaatcctttagccgtaacaaatatggatatgatgccgtaagcttacgtgttcttagggtcactgccagttattatacgccagtcctccgactcgagggcaggataacaaatcttaaggggcatatgacacacaagatcatcccatttggcttcaattagatttagtatagcttcattctgcctaggagtacccaaagatgaaacaatggaccagagattgccaagggtgaaaaacctaaaatccatatgagctggttgtaaattgccaatgagatatccaccttcctctggaatccaatccattagccatgaaggaatttgttcagggtagatattgaacttattggtagcatccaaagagtactcttctgttttgtaccgatatatctcattgatctttctcatatcgacccaataatattctctaatgtggaatgacagagcacttagcctgttgttgatggccctcaccaaattcttggatccatcattcacagaaagcatctcacgggagcagcgtagagctgagtaaaataaggcctgaaagaagtcatcatagaaaaaagtaagccgaaattcagataaacatcatttaaaggagtaaaaaatcgagaaagatatgttactgtccattacaaaggcatgattagtaataggaacaggcaatgcaaaggcacaggtaaacattgtaaaggcaataaaagtattaattcaaaatccattgccaattacccaccctaagctccttataggatcttcatagagcaataaaaaaaggaataattaaattaactgtaaaatcattggaaagaatagagcatttagtaatgtctcaaacagctaaaaatgtgttagttagcagctcaaagtgaaagaagttacaactatgagagtaaaatcagaatattaaaaagtgtggaaaattaacatttgaagagaacaagaacaagaactaaacccacttcagtccccagtaatgtctaacacaaactatctgaccatttgaaaaacaattcatacagaaggaactcacttggatttcaagtgggtgaccatgaatacccatgcgccggtcaatcatgcaggacccatcagtgaccaacagtgaaggaaacatgtcaaaaccatcagttaaacacaagttcaaaatcatttttaaccctgtttgaacatctaccctttcttgtaaagcatagtcaccagtgatttttccataagccctcaatagaataatccaccataaccctataaggacgtatcaaaacagaaataacaagtcaaaacacatccaaaattacatggtcaagtatatgttaaacaaaatacattttcaaaaagggcaatcttaatcagtacaaaatgactatcccattacagattgctgagaaaacatggtttgcaaatcagacaatgacaaaaaatagtttattagtatagcacacatatactaaaactcgcatacaccaacctgaatctacaggagcaacacgaccaattgcagattcaccaaaatctggatcaagaacttcttcaaaattattgccatcaagaggaacagttctaactttgaaacttgcaggcatcaacccctgccctgggctatagcagtcaactgttttttcccaactctacagaaggcaaaaaaaaaaaaacacttagaacatcagaaaaggagaaaaaaaccatgattgatataagaaagataacaatatcttaggcattaaagaattacctgcaattgcaaggtatggaggaggaagttcctaacaatctctccttctcctttgagcaagaaagcaagtgcagaaggaacaaaatccctaataaagacttggtcataattcaatggcagcttgtcattcggatcatttgcagccacagttcccacagggctcccacaatatgtaacaaccgcatccttcaacaacttccatgcttccttctcaatttgagattcctccctcttaggactttcaaccttgagctccccttcattctctacattcaatttttcaccaacaacttctgtcccagaatcttcttctcctcctccaacaacattctcatctttatcaattctttcaacacctaaaggtttcacatttacaccaccctgaacataaatcctctcaaaattggattcattaacacgggtttcgaccgatgttgagaaatccctaaacctagaagatgaagcattagcaataacagaaacaaccctatttctcatcccaacatcattagaccttgatataataaccccagattggccaaaactccaattgggtacccgaaactttttgcgggcatcatcaacaatacgtcgaaaaccagaaaaactatgataaggactggtgtgaaattgggctttccgctcaaaattgaggcataacttggctgaatttccattaacgcattttgctggcgggaacccgaaaatggcggagtttcgacaattaaaaaggattctacaagtgggtttcattgttgaatgtccaagaaaactgagagtactcataaaaagaataagaacaaggattactcaataaaatcgaatgggaaaacgaggtaatgggtgctacaaccatacataaaagctatacaaaattattatggaggattgtaatgagaatttgaatctgtagaagaattgaaaagagcaagaccgttaatcaatctgagattatagtttataaatagaaagaattgtgcgttgagattttggaaaagcaatgaaacaatggcttcaaataaaacgttaggcgctcgctgcctttttcaattgacgcgcagaagaagaaagggtcagtttggtaattttatttttggaaattgaccctcaagtccatctagaaaaaaaaaaacatgagataattagaatttaaaagcttattacaacctctttcttaatatttttttaacaataaacaaaattttattggaaaaaaaaaattagggttgaagtacaacattaacaagagatggaaaattcttcatttatattagctcaccatttattctaagtgtgtgcaggtaatatacgtatagctatattgaccaaataatttacatgaataaaagacgtcttaagaaaattagaccataaattaaaaaatacatcaaatagagagcctaaatcattacagaaagaaaatctcttaaaaaagtagaaattaaatctaaacaatcaagctcaaaaagagagaaagtttacttctagcaaccaatccaatgcaactattattagaattacaactttcgcctgaataactttgagatttccttaagtctatcttaatccaaccaaaaaagtaagaaccggtactagaaaagttgatacctcaaccaaaaatactaaataaataaatttagtcacttttattagtgtagaggttttaaattatttaaaaaattgctaacacgaaaaatttataaaaacagtcacaagtatgactcgcatgaattttatattgtatttgcaaaaaattttatcgtgtttgtattgtattgacttgttgtaagataaattattatttttagtattattttattgcattggcatgcattttataagccaaattatttttagtgtcattatattcgtatttaagttgttgccacacaaataaagtttgtgcaaaatcatttcctatatagactccacaccaccattaggaattagttaatattatcctaggatttttttttttttatatttttcgtgggacagaattcatatgatactttattatgaaatctagtattggactacaatatattttgggaaaagaaacttattagagtgcaatgttagattgaaaagagacagttaattgtgtatgtggtggtgtggtgggtgctatggattgaggcaataaatatctagctatgtttaacatacatacatatacatgatttattaaaatagtacttttgactcttttgttgtttattacaaatagaaatgctaaattgtattagggatgtttagctcattcttcagtatttatattattattggtataattaagtgaatcttatacaatttaagacaataattttttaaaaatattgttaacaaattatagtaacactagacaagtactaaataccaatattctttatacatataatattattttggaccatgtactttgcaaaaattattaattggactttttattttgtaaaatgacaaaatagatcttgtattttccaaaatagtaaaattaaaattctgagcttaattttcgataatttttttaaaaaataattaacttgaagacaattcttaacatgtaccgatataaaaaatataaatagttttatcataagattaaatttttattaaattttattttaataaaaaaatcaatttagaatcctatttatattattttaaaaaaatacaaattaattttattacttaataaaataaaaaattcaatta

SEQ ID NO: 17535 - DNA, 3827 bp, Cannabis sativa
  modified_base (1863)..(1866): a, c, t, g, unknown or other
  modified_base (3783)..(3787): a, c, t, g, unknown or other
acgcctttgtgagaaggtggtgctgacccccccttttatcctttggtttggagtttcaactaagctttccctttcctcttatttatttctctttcgttggtatctttttggtcttcctttatctatatttatatttatttataatatatatattggtctgtggaactcaactctttccaccactctaaatttatagtctgttgagtactgctattactgctagtctttcctttcttcttacggcattctctatctctaacgccctccctctgtagctttcaggggtgtgtgggccggggttttattttattttgtattttttttttgtaaaaataaaataaaataattaatcttatcatgaaactaaaaatatatatttagagagttaattaataaaataacattgtgtttgttgctttgtgattggtccaaagcatataattacactctgttagtgcagtgtagagagagaataggaaacacaagcaagaaacaagagtgaacacacaacacacagattgtcgaccgaccaaagaccaaaaaggctgagagtatcatcatgataaaaggcttagctagctaagcctaaaaaacccttttccttttctaatttatttatttatttattttttcttattcaatattaaaataaaataaaaactcaaaataaataaaatgatcggaggggtttgtttgggtttccattcttttgtttacctcggtcaattagcccccacgttcttccatactcttggctatttccacgccaccctttctgcttccccaagaccatgtaatcattgtgtcttgggacacactccacatctctctccccactctctctctctctctctatccctttctatctcattctctagtacaacctttctccctcctcttcttcgtatgtttttcttggtttcagcttcatatatatatgtatatatatatccccatataaaatatgttgtatctgtattaacctgtaatagtagttttaaggtctcgtaacttgttgcacctctattaattaatatgcgatatgataccatcagttaatacatggtttaagaattatgagagttgaagaaaatttatgtaaagatttaatttcattttaagtaaacccaatgtgttcattggtatatatgttataggaatataaatgtcaattaattatcttgtttttcaaagctatacaactataaataaaagaaggtagaggaagcatgcaaatctagagttgctttattataattgcagtgatcgctcatatataattttttcttagtaatattaatatattatatatattggttccaaaaaagaatgaattaattcaagtattgtaacccttgtactctaagcaatatgtactcattactattcaaagttgagattttggggcgaggaatatcctctggttggaaacacttttaaagttcttgtaattaagactataaaaacactgtccaagcatgtaaaaagttgaaaagacaaaaaaagaaaagaaaaaattgtaatatatactcccttggatctttgtttgcctaaaagctgtccttctttctctttttcttccctactttaaatgcagtaattctttggctttagtattattgcaacactaaaatctaaaatcgtctacaaaaaaattgtatttcttttttccctttttatgaagtaaactaaagaaagaccatgcatatataaatagatggcctcatgagtactacgaggaaatttggtggtatcgtgactgaccacaaccccaatatatttactaatggaatattagttggttacttacaataagttgattattagaaagaagaacaaaaatatgtaatatattatatatannnntatatatattatatatgtgtgtgtgtcacgatggggtgatttgttagtttgttggtgaagaaatattatcggttcatgtaattaaacttcttaaagagagaggcccacgcattcactaggaattataatggacgtttccaatacaacaagcatttatatgagtcaattaattactaggatttcttcaagatctccctgaaggaaatccgtccttacgtctaataattataagttcaaaaaagaaaaaaaaaaaaaccaaaaattgacaagccgtccaacctgaataataatccaacaaaaaattcaaactgtacaagaaatactaagtaaaatatgcaacgacaaaaaaatatcagtataaaagaatacaccgttgcataaagaattctcgactctataaaattgtcgcatagtgtcacgaatactaagtagaataggcaatgacaaaaaaatatcagtgtaaaagaattcccaacaatttaaaacagtcgactatagtcgagactataagccacggtttaaaaccgtcagtatagccgacgattttaaattgtcagtagattgcccaaaaaaaaaaaaaattcacggtcttcatcctccttgaaaccacttccggcatatgttggagccaatctaaaacttttacaagtttcatcctcctacaccgacgttgtgatcgccttcatcctccttgatattttcttttacaagttttagattgccttttacttgacaatcatcaaaactttttttggattgcaagtttcaaatatatttttaacacattatggctaatagaaatttaaacaacaaataagagaatgatgtgtttatctttgtgctgccaagagagcaaaggagaggggcagagcgagagagagtggaggagaaggacggcgtggcttgtggtcgtgaaggagagagaatcgagaaatgaaattaaatttacaaataattttgaaaaatggaatatgatttttttttttggggggagggggggttatatctttaattggaggaaaataaaatttaagatagagaaaataaaattttaaaatttaagatgctggatataaaattttagatctgaaacgctttaaattttagtatgagaattgccaacagttattcccatttacaaatacatgagatttttttgaggtacgtttgaaaattgtcgcctatacatcctgacattttaaaatggtaaggcatacactatttattctgacgattttaaatgctaacttaattttttttagcaatagttctccaaaaaaatatttttaggaccatcttgaatattttttttgtagtagtgactatatatatatatatttttaaagaatgttatttaattttttattgatgtttattctatttatatttatctaatatttaagtttgtaatattaatttagattcttatatttttgtttgaaatataatttaaatcaaacaattataaagaaaataactcatcaaaccaaagaattttacgaacacaaagtgtggaatcctcatccacataaaattagctaccttttgataacaaagcttaattaattataacatttttaatttggaaaaataatatatttattcttttaaatctcattatttgaacacaaacaactaatgataataataataataaagttttgtttggacaaattaacttggccaatgatatatatatatatatttaaatatatatataatgacaataatacttgatatgaattattatttagtttagtaaaatagttagtaattgttaaaaaaaaaagtataacataatttggattaatattttatccctcaatattacatttaatatcgaattaccatataattaaacagttatatatatatatatgaaacacttcttaatttactaaacaaatttaactatannnnntaattttaaaaatatcaaattatcaaattttgatctaata

SEQ ID NO: 17536 - DNA, 6348 bp, Cannabis sativa
attcttccttttacaatttttgatttgtttttcttctctgtttatttctcgatctaactttgtttccttctttttgtgcatgtacttccttccttcttcctcctcaccacgagagctgcctctctgtctagttttcttcactggatcttggagcaaaagtcactagatcctggatcgggccctctaccttcacatatgccaaacaagtacttgaaaatatgtaagtaattaatttatgaccgaatatgattcacttacatataaaagtaagtacttaccgattattattaaatttattttatgtacagagaaaatttattgagaataatattaatgatgatcacaagtgagatattgatgacatcaactttaaatgtagtagtagttacaagtgagatacagacatttatttttaagttatatgatgattattctatagatttattgtcttctttttattttaaatttagatcgctattttgtgtgaaaaaatttaatttttaatttttttttactataacatacatttagagatatttttgtgtgtgctttcttgcatgggtgttttttgttaatttctttagacttctctttctagaattattattttttaataaatatatatgttaatttaaatattttatacataaaaacatatttgaaattatgtaatgcgattttattgtttaattaatatccatatatataatttaaaatttttagaaatagttgcacgtgcggtcaatttactaatttatactatatataaattatatttacctaattttattaatattttaaaatagttatataataagttgatattttaataaaaaaaaataaataaagaattaaaggttagataaactttaaacaaaataattaataaatttatttaaaaataataatgaattaattaatttaacagtattggtttttatgtttaccttcaacaaagataaataaataaatagatagctattagctaccctaaaatatataaatgaaaaaaggtggttcaaatctgtgttctgttctgtgggcatattatccagtggttttgatatttcatagtaaactccgcctacgtcgtctacataaacaccaaattcttcaattaatcctactcatcaccctaactgcaacaagtactcatacgtccggctggaaaacgactgcgttttgtacctcccaatgcaaataaacgcccacctacttacctatattattatactacacctatatatatatgatgatcacgagtattgctattagataccagtggtacctagtaccttttcgacatgtcacgttgcaatttgctagcgatactcatgtaggatctaatatttagttggaccaatagtgatactaacaccagccttttagcatttctcatatgatcactactctctttagtctatatagtaatactaaccagtaaggtgagtaggccatgcatgcatgcagctttgccaagtgccgatccactttcacgtttatcaataataaaccaatggaaaaagtatagtgaccgtttaatttgcctctatctctaatcttccatcaccatcattccctataaatacaccttatccgttatcttattaagcacttcatcttcattaacctatcttatctctctctctctgaagaatatattataatgagggaaaggattcaagatactcttgcagctcaccgcaatgagcttgtatctcttctctctcggtacgtatacaattaatgttgttggtttttgatcatgaataagatctatagttcttagttaggttgttgatgaatatgtacgtataatgtaggtatgttggtcagggaaaagccattctacagtctcatcagctgacagacgagttgaataatatcgttaaagaagatgaaggaatgcaaaagctcaaggacagtccttttaacaaagtcttgcaatctgcacaggttataataacttaaaacatataattaacatttttaatctgcacacttaatgtatatacacgtagaaatgctaagtgtcatttattaagaggtggcatacttggtgaaatttaatatggggttacaaaatttttaatttaataaatacaatataaaaaattattaatatttattttataacgcactacattgatataatattaagcaacttatatataggacaagattaggaacaccacttttatccatgcatgcagataaggatatttatgattttagcattttaattaaattttttatacatgcacggtccaagactacaattatacactgtaaaaaaaaattattttcagtcacaatataaaaaagttgtggctaataataaattgtcatttgtatcttgtaactaaaaagtaagtagttaaaaatgttagacccaaaaattacagcctaaatgaatttttagtcataatatttgttctgattaaaattttattagtaataacatgtatctaaatactatgtttactcgcaagtaactcttttatcataaatttttttattgtaactaaaaagttgtcacttgtggtgtttttataacgatagttacatagtaagcaatttatctatttttcaaaaaaaaaaaaaatctaaataatttagatgtgtaaaacagagttcaatgattctgtttgctgattttcaccgctgaaaaaaatatttgactacttaagttcaattttttttatctaactattattatgttatatataacaggaagctattgttctgccaccttttgtgtgcatagcaattcgtccaagacctggagtttgggaatacgtacgtgttaatgtatatgaactcagtgtggatcatttgagtgtggcagagtaccttaaattcagagaagaacttgtcgaaggacagtaagccttcttcttaattaattaatcataatcaaatgtttaattgaaataaaaaactctaactaattaaatctatatatatgttataattttttataggaaaaatggaaattatttgctggaacttgatttggagccatttaatgctacatttccaagaccaactcggtcctcatcaattgggaatggagttcagttcctcaatcgtcacctttcttcaattatgtttcgtaataaagaaagtttaacacctttgcttgattttcttcgtgcacataaacatgatggccgtgtaagcttttatatatatattatatttcaaattgaaaatgcttaatttgtttcataaagattaattaattaattatgtataggcaatgatgttaaatgatcgaattcaaaacatatccaagcttcaatctgctcttgtaagggtagaggaacatctttctaagctcccactagcaacaccatattctgagtttgaatttgagtaagcaattattatattaatcttcttcttaagatgaattattataagaccttccaaaatttaattatggttttgtttgaatgaatacagtttacaaggaatgggatttgagaggggttggggtgacacagctcagagtgtgtcagaaatggttcatttgctgttggagattcttcaagcacctgatccttctactttagaaacatttcttgggagaattcctatggtttttaatgttgtcattgtgtctcctcatggctactttggccaagcaaatgtacttggtttgccagacactggtggacaggtacttaattacttaattaccttaaacttatgtttcccattaaaattctctgtttaaatgcaaaatagtttggaataattcaagccctttttgttggtttgtgcataacaatgtagcataggtgcactctctcaatttcttatataataatgtataacatgagactcgaactcaagatctccaacacacacgcactttcttatagccacttgaactagtctgaagtggtttaggtggactctctcatgtgttttataattaggacaattataattctaaatatatatttttttgtaagaataattctaaatatacttaatataggaagaattttaccaaaaaaaagaataggataatttttagtgccaaaattagaagtaaaacatcaggcatgcatgaacagaattttttaccctgtttttcatatcttatgaaatgattaaatattcatataaaaataattcctctttcctataataataagttgaatttctctttattactaatgcagatcgtttacatacttgatcaagttcgtgctatggaaagtgagatgcttctaagaatacaaaagcaaggactagatattgttccaaaaattctcattgtaagatatatatatatatatttgtatatgtcaaattctaaaactttataataaaatccttaagcttatgcaacattacactttattcattggttggttataaaggtcactcggctcatacctgatgcaaaaggcacaacatgcaatcaaagattggaaaaaatcagtggaacagaacatactttcattctaagggtgccttttaggactgaggatgggattttgaagaaatggatttcaaggtttgatgtttggccttacttggaaacttttgcagaggtaattaaataatattatatatatatatatgttttattaatacaacattttttttctttaaaattaatccttgtttatatcatttatatcaggatgtatcaaatgaaatttcagctgaactacaaggtgttccagatcttgtcataggaaattatagtgatggaaatcttgttgcaactttgttatcttataaactaggaattacccaggtttgaattaattcaatcaaattattatagcagatatagtactggtttcaattcactaactgattttctttatccatttagtgtaatattgctcatgcattagaaaagacaaagtaccctgactcagatatctattggaaaaagtatgaggacaagtaccatttttcaagtcagtttactgctgatcttattgctatgaacaatgctgattttatcattaccagtacataccaagagattgcaggaaggtaagacttaatttttaaagacaatgttgaaaaattgtactcatcatatactaattttggttgtgattttgtcttaaaagccacaacaatgttggacaatatgaaagccatacagctttcacacttcctggcctttacagagttgttcatggcattgatgttttcgatcccaagttcaatatcgtctctcccggcgcagacatggcgatatactttccttactcagagaaggagaagagactcacttccttacatggttccattgaacaacttgtatatggtgttgaacagaacgatgaacatatgtaagcatattatgtacacataacatacactttttccttagttggaaaataattgatcttataattaactaatattaactttgatgtagtggtttcttgagtgacaagacaaagccaatcatcttttctatggcgagacttgacagagtgaagaacttaactggacttgtagagtgttatggtaagagtaccaagctaagagagctggtgaatcttgttgtggttggagggtacatggatgtgaacaagtctagagatagagaagaagtagaggagattgaaaagatgcatagtctgattgaagaatacaagctgaaagggcaattcagatggatatctgctcagatgaaccgtgctagaaatggtgaactctatcgctacattgcagacaccagaggtgcttttgttcaggtatgtacatcatgcaacacatttcctctatgaggtgtgctaacctcttagtcaatttttgtgctcgaaaacacatgtcgattttttttttttttcaaattttctttcatggcggtattcttatagttacaacattatccctgtaaatttttgaaaattttcgaataatttacagtgtcgaaaataaatttgaaattatttgaacacgcatagtaaacttaaatatcatgagctctgtttctgatgttgtaaagtactattcaaaaaattttaaaaatttatgggaatattattgttaaaaaaatttgaaaaaatattccaatatgtgatttcgacagtagaaatagactaaaaaattgtaataagagattgtaattaagcatttactctatttttttttgaaacacatcactataatcccattttctctaatttatattaaagttcttcattatacttatattttagtacttttgggagactttccttctcaattttgaaacttttgattcatgtatttttttttctaaacaagtaatggtgaaaagcagtgagcagtactaaagatgagatagttattaatggatgcagccggcgttttatg

SEQ ID NO: 17537 - DNA, 2856 bp, Cannabis sativa
atgataggttgctacacatgcctctgtccatgcgccacttttggactaattgcagaaattacagacaaaggaacaatatgtataattcaccgaaaaactcagttcaacatttttattccataatagtatatttttaagtgaaaaaattaataatgaaaatgatttggaaatggttgcagcgagtacaacggcttgcatactgtactatgcaatggggtttgctcactgcctatatggagccacataccgaaccaaattgagagcattgttttcactaccagaacagccttactcagattgctttgctcattcttgttgctgtctttgcgccatgactcaagagtacagagagctccaaaatcgcgggattgatcccgcaataggtgatacaaacatacttactccattatttcttcctaaaatgcatcacctgctccaaataataagaatttgaaatattaatttatgttttttttttcaaccaagggtggcaagcaaacgttgagaagtgtaagcgggaagggctgaagccaccattttctgatcaaggcatggatcgttaataatgatgtctctaataatctctattgtgtatatttgtgtgaaatttgtggtttcatgtgtgtgttgtgtaatcattattcatgcttgtctttctaaagattttccttagcaattgtttggctgtattgtttggcattaataggagggtaaaaatgtcatcacgcatggctcgtgtagctccattgtatgtactattcaatgaaatgacatcactttttacttgtaaaaaattggtcatttggtcaagactatcttacaaaccaaaacagctgaacatccactgatcattgacaatattaagcacaactccttcatttcttttgggacaaaattgttgaacctttaaaagggtgtgagttataactttatacagacaaatagcagcaaaataacaagagaaggcaatcaaagagatttcattgtttaaaccacttcctatgacgcacccaattacagattctggtgatgtagcattaagcctattgaacggtacaatgcttgccaaaccaaacatggcaagaatcgtcgaacaggatgaccagagctcaatgatccacttcaaaatccttccatttgagaaatgtcacaagtacatcattggactaatcattctgcaatctctccctcttctaagtcatcctctgcgtttgagttttttctgtcatcatcctcatcaaatatactttcaaaatcataaaaaacgccactatagtcatttctgtcatctttttctaagctttttctgccatcttcctgttcttcttcttcttccttgtcaatcaaaccttccaaatcaagaaaatcatccggattaatttctgcaattaaatccgaatattcatctattaacccttgatcaaaatcaaattccatatcaccaatttgtgctcctttattggtgtttgatacaggtgactgtaagccatcttctggtgcaactcttgtagacattgctcgctctgatgagttaactgatactttctgagacatacttcggttggtgaattgatgtggggaagccaagttcattgacctctcatttttcataaaatcaaagactttaggtgccaacttgtcaatctccactatttcttcctctttaaaaggaacacctcccatctttaaatgattatcgccatcataagttttaaggtctggtttgtgtaaagggggataatgatctttaacgacttcaaaatcaatattgtgtgaaggaaggaaaacatatatgacagggtactccaaaatcaccttgtttgttaattgctgccttagtggaaccttaaaatctaactcatagaatggtgaaattgggccctgaaataccacaagtgaaagattgtgtcaatggaacacacttgtaatccaaacaaaaagaccgatacaaaacacaagacacaacaatattattatattcatttgaataaaacatggaacacttagctgaaacacctagctggtaaataaataattttcaactctagtttatagtataaaagttcttctcatcgtaatctgttctaagaaacgcaatagcataccttttgatatttccggataaagaacttgagatttttggggtcttcgtcgcaaaatcgcttcagttgatgattccaaggaccaggctttaaatggttcccaataatggaggaaatattcatgttttcatcaatactgtatcagcatgaaattcattaaccattaagaaagcattttttaaaaaaagaaagaaaaaaatacttaacaaattgctctaatgcttgaagtcaaccagctcacccatgatcaagtaacacaacatccgttgaatgaaattgccactcgatcgtccagtatatgcatttcttcctacggcattcagacagaaaaaactttaaaaatcaataaaggaaaaaaaaaaaaaaagatcaccagtaacccattcatctatgtaggcaagaaattaaaccaaagaatgctaaacagggaaaatatcatattaattcgtgcatattcaaaagttatgatcttttctgtttagccattattaaccttttatcataagtagtttgattcttctcccttttcaccatgccacctggaagaaacaaaatctttgttctcctacttgcagctgcacttctaacactcctgaggaagaacggtagcctatagttattgtatttgcatagcttttttctcattctttgagcagaatcagaagcccttttcacttcctcaagcaaattataatctaaaccaagaaaatatacagcagaacaataaacatcattaaaaaaattaaaaaaaaaa

SEQ ID NO: 17538 - DNA, 9058 bp, Cannabis sativa
aaattttaatttttgtggttaagtgttacaaaccgtaaagttcaggtgatttagccgccaatatccctaaataaaatgatgacataactccttaatcagttgccatgtcaacattacatgtgtaattaatttgaaaaattagtttaatttttttaatttaattttacctaatttttttaatcattagtttaattttaatttagggattttttttaaaatgcctatttttattttttaatgttaaattatatacatagtgttgatgtagcaattgattaaacaactatatcatccttttgtttttcacatgtacaaaacttataaaaaaaattaatttagaatattgtgaatagctctcgaaacaatttataactctaaaaatttgaagaggagaataatacaaaatatgctaaataggtaaaataaaagaatgattagagaagaaagaaaaagagtttaaagaaataaaagcccgcgtttaagaactaaaaacttgtcatcttcttctctcaccacagtaaaaattcgcttttgcttttgtagctgtactatatcactaccactaccagaccccttctctctctctctctctctctctcttgaacccataaaaaaaaaaagcagtggtggttctgcttatcacgagcttcagttcagccactgctgcttttgatgccatgttgccgtgtttggtggaccaccgtagcttatgcaacaccttacttctgttgctcttcttcttcttcttttctgttcttgttacttcttcctcagcttgctccagtggcacttgtcaggttttactttgtattttctcctcttaaacaactcaaagatctaagcttttcggaatttaaatccgaataaaacttcgttgtttacaggttctagatgcttgtaccgcggccgtggactgttccccaggtctctactgtggtaattgtccttcttccggtgctactcagccaatctgcaccagagctcaggcaatcattcccactaccattgtaagagtttgaattttgaaaattaggttggtgggctgtaatcattttgagctgaatttcatgaaaatcatatgactttactgctttttgttttgagatgttgtagattaatgggttgccgtttaataagtacacatggctggtgacccataattcgttcagtaacgtgaatgcagctcctgtagctggtgctcagagattgacattttataatcaagaggacactgtgaccaaccagttgaatgtatgtggtttttgttcttgttcattgcttttatttctttctttctttctaattttgtgatagaattagattagagactctgatgaggtttacctgccattcctttctttaattttgtgccttggaatccaattacagtattagagaattatgcgtgttagtaattgttctaaatagaccccttttgtctagtgtgtttcttacgtttttctttctttgtttaattgatttctgttgtattttttttttccttagaatggcgtgaggggactgatgttggacatgtatgacttcgagaacgatatttggctctgccattcatttaggggccaatgtttcaacttcactgcctttgtaatctttcttcccttattttcattttttcttaagtttgtagtttcttatgaagtagcttcttataagtgttctgttgttatcttctcagcaacctgcaataaatgtattgaaggaagtggaagcatttttaagtgcaaacccgtctgagattgtgacaattataattgaggattatgtgcataccacgaaagggttgacaaatttgtttgctatggctgggttggacaagtattggtatcctgtgtccaagatgccgaaaaagggtaaagattggcccactgtgaccgaaatggtgcaagagaatcaccgacttcttgttttcacttctgactcctcaaaggaggcaaaagaaggaatagcataccagtggaaatactttttggaaaatgagtgtaagttgtatatcagagtcttagtctatgactttgtactgttttagaattttcaccaattatgacatcaattttcagctggagaccctggggtaaaaggcgcatgcccaaatagaaaagagtcgaaggcattggactcgaaaagtgcaactcttttcttgcagaattattttcctacatacccagttgaagctgatgcctgcaaagagaattcaggtccacttgctgcaatggttggtacctgttataaagcagcaggcaacttaatgccaacctttttggcagtaaatttttacatggtaatgatattttgtctcacaatatttctaagaaaaaacaagatttaactaaaatagtttcaattattggttatgcattctttactaagggtgaaatgatgtactgcagaggagtgatggaggaggggtctttgatattatagacagaatgaatggcctgacattgtgcggatgtaatactgtcactgcttgccaggtatctccataagtccatatcacttctatctacttttagttgggtattcatcatccttttttaccatcttttcattcttttctattcccacattggcaaatggcctagatgcagaactggtggtccaaatttcttttatttttctttcgagtcagtctccaaatgttttggaattatagaaactataatacagttattttccattcctttgccaacaaccttatatacggcctcatcatctcgtttaagagcttctctgaaactggatttggaactaaggtcaccaggaactgagttaccatattgggtccagaaaactgcacccacccaatttatatttttcaaagaaattcaacatgtacttttaaacccaaattcttggcctctcataaaattactttgttcctttctttcaatttaagagggtaactctttttgaattaaactgcattttacttaagcatatacatctattttctgaactgtcactgtgtgagattatgcaacaatatattatttcaatatgcctcggacatatctgtttatgattttctcttaccatctccattaaaaagtctctaattccgagtacatgtttctcaggctggtgcaccttttgggtcctgcaagaatgtagctgttcctagtagaagtccaccaacaaccaccaatgcaggaagctttactggatctgttcagtttacaagatctgcttcaactgtcaactcttcgaatcgcttgtttctcttcttagtatcattcccactgttggcattttggttatgaccaccacagccaattagcgtaaatccttgagatggtggcttacttacagtgttttacacgtaaaaatctagtgtcatagcaaacggttcttagtgttataaatttgattatagaggtaaagcttaccgagattttagttaagagcagaagtgaggatatgtgcggcgcatgcatatgaagtagataagttagtgaccaagaaagacccagaaagcactggtttggtttcaggtatacagtacacttcattacagtaaagcacttgtttttatggaagaaaatagaaatattgagattgagatgctgacattttacctagtgttataacaacacccaattctgccatcgtttttttgatcattttatctgtgctgtgctgttgttttctttcagggcacagatagtgtgggtaaccagtcagtagcagtcaagcaaatccatggcacatcatatgtaaaagtacttgtgtgttaaataataggctttcttatttgtattctaacatttttaatgggtgttgtttctcatttcttacctataacataggttatgttatctcatgtctgcacttttgtttttaacaatgtggatcactatgaagagttgaacaaatgatttatttgagaattgtgttatgtaaaacaagaaagaccataaagttttcattttgtgctgtccttggatctcttgtctcaaaaaagaaagtaatgtatgaatcacaagtaattaattacataacaataataacatatgaagctttgttcataaattcataaaagaatacacaaattgcatgtggactatacaaagacagagcttcaatatgcactctgatataatatttttgttataaaatgttgttcttaatgaagatacacttgcaccatacaccaaaccattttcaaaaacaatcacaagaattggataccttcttcttctccttcttcttttttcatacaacagcttgttgaataggaggatttccaacatttaaaagcagtcctcgagatttgatctgaagagcaggactaatagtaagcaaagcaatgaaacagtctacaggaactctggtgccccatacattgatcacctctaactttctacatttatttacaagaccaacaagcccattctctgttatatgacggcagctccaaagtactatagtctgaccaaaaagaaagaacagataaagaaaacatcgtttattatatatcacatttgagagttgcccccatcaaaattattaaataaaatcccaagttgttatgtagtttggataatctacacacctttaggtgtgaacaattatctgcaatgacaaacagagactcatctgtgataaatgtaccaccaatattcagatgctgcaatgaattagctcttgatatctgtttaaaaaaacacataaagtctatggagaaaatcataacaaacatgttatatagtcatatgaatatattatgtgattacgagtgatgtgattcccatccaatacttgcccacagcccacatgttatacctatagtttttctaggctaaaatttagcttatttgatctgatctgaaatgatgtttagcataagcaatatagtacaatcaatcttattgagaataattaaggttgagggagaaagtatctaaatttgaaaatgaaatcatacagaacaagggctgctaattgctaatgcttaacaaacaattttccactctttcttctaagaatttctttttttttttttttgatctctccttttaatagaatagtaacacttataaataaaatcaaattggcattgcaaaatgaaaaaggttaattcttctgaaactaaaactattattcttaccaaatgagcaacacctttatctgtgactccagtcataccccataaggatatggaggttaaattactgacacacttcgccaaagatatttggtaaagtccattgtcagagatctgacaaccccaacggcttcttgaactgaaaaaagagaaatgattaagttaaaaaaaaataagattattacctaattacaatatgaaaagggctatagagataagaagagtacaagtaatttaaagcaccaaatatgaagagaatttagatatacatacatatcaagctctttgaggctataagcatggcggactagacgagcagtagaaacatcgtccattttacagccagcaaagctcaaattgtgtcttccacccaaagactgagtaaccccttttctccatttccggcaaacactgctcaccctgcacgtgttaatatatgttttcatttaaccaaaaatttaaccaaacaacaaactttcccacacaatttctcaggaaacaaacatacccagaaaggaaaataaataaatacatcaaaaaaaaaaaaaaaaaacagagctttagaagctgattattatgaagataagaacaaagcaaattacgtactgggccaaatcagtaaaagaagttatgagaacaaagatatgagctaacaaatcaattggcaaccgatcaatctcagcctcaaccgccattacttcccaaaactcaagctttttttttttcttttgattggtacaaaggctagagtttcttcttattatttgtggtacgttgaagaaagaaagggtcgaagtcgtaacatagtaaaaagaaaaaacttgttaagtgattactttatgggattcgaaaatatactcattattatggcaaactatacaaaaaataattgtgaagaaagaagaggatgtggtcatgtcaaggtcatcatttcataaaatgccttcatttcgtagctcatttttgctttttctttctttttttcttaaagaaagatatttgtgtgttaacatgagttaggtgtactttagttgtggtaagttggattgagtagatgagttcatccatgagttgagtaataatattaatggttaatggttatatcacgtgttaactaattgaataataatagtttgtagcttaatataagtgtataacaaagattccaaacttatcaatagtaaaattaagagaaatgataaagggcactagtgatgtctagcatcttcctatgtgtcaatatcgctattagtgtaactaaatatcgagtctcatatagtttaatataatagtttttagcgagtatcgctagccaatcgcaacgcgacatgtcaagaaggtgctagacaccactggtacctaacagcaatgctctaaaattaattatattctaaatgcttttgcgtggaagattttagcacttggtgtattattactgctagtctcatctagtgatctgtcagatggaacatttgtccagttaattctcaagttagttatttcagttaattaatttaggtattccctattgtgaatattgtcccacatggaataaatagtaaaatattgagtcatatataagagcatgtgctactcggccacttatcaccaattagttttaagatggaatctcatgattctcaacatcccctaatatagttgtctatataagattttgtgtactacttctttaggtggtgatctaaagaggaatttagataattattacgtttggaatgagtgaagatagttgttaaagagaatgtgtgtgtttgatcacatctctctcaagtgagtttatttgtaaggtgcaagaagcacaagacaccattgttgatgagctcaactcttgtattctcctatgtatttctccactattgaagatcgaataaaacttggctaaagggcagttcctctcgccataaaaagagtgatgaacctcgttaaaccttatcactatttcatttagtttattccaaatttatttctagtttatgtcattgtttgattcagctattctagttcttcagttcttgttttgttttgattcttgataggtgttaattcaccacaactggtatcagagcttcacgtttagatcgagaattcaagaatcaagttttgaagtttcaagaactcattaagaatggctactaccggatatgaagtagacaagtttacaagtcttaatgacttcaagttatggaagattaagatgaaagcactccatgtgcattaaggacttgtaaatgcgatcagtgtgactagttctaaggaagaagaagatgtcaataaggtttctgaagagatcgaagtgaaagcacatagtgctattcttttaagtttaggagatgaagtccttagggaagttgttgatgaagaatctgccatgggattatggaacaagcttggatctatttacatgaagaaatttttggccaataagctctacttgaagaaaaaaatttacacaatgaagatgggtgaaactaaagagcttcgaaggcatctagacaatttcaataagataattctggacctgaataacattggggtcagaattgaagaagaacaagaagatcaagcaatacttctactcaatttactccctaaggtatatgaacatttttttggtacaatactttatgggaaagatacactaactatgtctaagttaaagcaaccttgaattcgaaggaaatccaaaagaaagttcataaaagacccaaatcaagtggtgatggtctattaattcgtggaagaacagagcagaaagaattcaagaaacccaataataggtataagccaaggtcaaaataaaaaactccaactgggaagaagcgttattactgcaagaaagatggacactttcgagatgaatgactggcattgaaggctaaattgaagagacaacatgcaagggaagaacaagaaccaaggagaagctgatattgaagatgtatatgaatctacaagagttataattacatttagtttagaatcatatggagaatggatcttggactcaagctgctcacttcaccaaacaaaaacttgttctgcaactacattgaaaaatcatgtggaaatgtgctactgggagacaaaaaggcatgctagatttaaggaattgactccattaatttgatgctacatgatggtattactcgaactatcaaacgagttagatatgtccccgatttgaaaataagccttttatcaagcaagttaggtatgtttataattatggctatttagtcaagattgacaatggtacactcaagatttcaaaggggtcactaatctcaagattttaaactttaagggatccccttttaaaattttacaaaagttgccaactcggtactacatccaatattaaatttgtaatctcaaaagcaacataaaaatatgttctgacaactcagccctgctagtcggataagctgatatgttcattttttgaggaagacctccaactcatgaccgctctaatttgttacttctcttacctacaccacaaagcacccgtgagtcacaaaaattcaggaagaaaaccaataacacaaacattacatatcaataaatgagtataatcaaataaacacattcaaccaaaatcacataaacatatactttattccataaacagcaaattaccttacacaatatgaaacaaactaatactgttaccttataaactaactatttaacctcgtttcttaataagacaaccaaattcaataccattgtctaacaagacaaccgaatccaatatcgatgtctaataagacaaccgttacatatgagacctttcaacagtcttaattggagtaataactctttctcataaatggtaattactgtatcatacatatatccatgctttgaggtaaaattgtactttttcaataattagttttggcatttaaa

SEQ ID NO: 17539 - DNA, 3155 bp, Cannabis sativa
aaccacaccgaaactataaacatcgatcttttcattgattcttactgtatgagcatactctgcaagtttgcaattaaacgtaatataagatgttatgacatagggaagaacaaatgtaggttagttaattaaatttacctggagccatgtagccaaaagaaccagccactgtagacattgtggcaagctctccttgcctgaccaacaacttggcgaggccaaagtctgcgatttttgggttgaactctgagtctagcaagatgttgcttgatttaatgtctctatggataactggtggcacacaatcatggtgcatataacagaggccttgtgcagctccaattgctatatgtagcctcttgggccaatctaggaagatatcatggaccaaaccggagggtgaagtagtgatgtgctgattgtttttgccatgtagccaacggtctaagctccgattatccatgtactcatagactaagagttttgaactctcacttgagatgcagcacatgagtttcactatgttggaatgtctaattaagctcaatatctccacttccgcaaggaattctttctcaagcttgtggtctacattcatgttgttgctccatagtttttttacggcgacaacattgccttcacgattcacagggacacggtagactttaccagagcctccacttccaataagattatggttcttcagtcctgacacgatctttgattctgtgaaagataatctctggaatgaggttagcttccattttgattcaagtccttttttgctcccatgacctctcattatgaagaatatgaaggacacaaataacaagaagaccactgcacctagtgctatgatcaacacaagataaggggttgaaagtttgtcacgttttctggattggaaactacaattcttaagttttaaatgcttggagcttgtacagagaccgggattgttcaagaagctgtcagcaaatgcaccgttctcatactcaggcgggattgttccaatgagattattggaagagagattgagatcagtgagcctcaattgaccgagtcgagatggaatttctccagaaagttggttttctgataggtataaatagttaagagtaggcaagaaacaaaggctttcaggaatttgtccagagatttggtttcgactaaaatcaagagtgctaagggacctccatgattgaatatgtgatggaagatcccccgtgagatggttttgatcaagcaaaagagttgtcaaaagttgaagattggtcaattcatttggaatcgatcctgtcaagctgttattactggccttaaaaaccaccaaatttttccaggaagatgaaccgattggaatgttacctgaaaacttattgtcattgatttccagccgagaaagattctcagccaacatctcaggaagcacaccagtgaactcattgttgccaatcattaagttactcaatctcaacgatgtccacagaccactaggaacattaccagaaaatttgttgttataaattttgactatgttcaaagagctgcaatttccgagtcctttgggtagttcgccaatgaaattgttgtcataagtcacgacatcggttaatatacctccagaacaaagttgttctggtagttttccttcaagcttattggaagagacctcgaatgttctgaggcttgaatacttgcccaaatctggaggcaaaacgcctgacaaattgttcatgaaaagactgaaatccattaaacctggtagtttgcctaacccctctggaatatttcctgataattgattcatgaacaaagccaaacccgttaactcgtttagcttaacaaaatcttctggtatcctccctgttaacttgttctctgagatatcaattacagtcaatttcagagattcaatcacctgaggaatctccccagaaaaactgttcttgtgaagataaaccacacttaaattcttcaacttaaacaacccatctgggattttcccactcatgctattattagataaatccaaaaactccaatgctgtcaaatccccaatactttcaggtatttctccgatcaaattcgcattagtaataaacaaatttactaacttcttcaattgggtatagttagaagggagagttgacggcgaaagttttttattattggatagcgtcagtatttcaagattagacaattcacctaattctggcggtaaagagccattgaattggttggctcctagttcgagttttctcaattcttgaagctgtccgatgactgcggggatgttgccggagaagctattaccggcgagagaaagattccggagctgaatcattcggttgatgtcgcttggaatggttcccacgaagaaattgtcggagaggtctaaatattgaagctttgaacagttgaacagagattttggaaactccccaggaatgtagttgagcccaagattaatatctgtgaggtttttaaggtcacagacaaaagaaggaactggagtggtgatgtttgcatcataaagatgcagagcggtgacagagttagaggtgcaggtgataccaggccaagagcagtgagaagaagagtttattgatgatggaatccattgactcatataaggaaggtctccccactgctgttttagcctcagaagcactgactgttcttgcttctgcaatgactgggagagtactccaccatggctaagaaaaagaaagaagagaaaactgcataatgggattgaatgggctttattcattttgaagagactcatcagattgagagtttttcaatctgtctatttgttttgatggaggaagattgatgtcagttgaagatatgggtttattttttcatttgatatctgcaagtgcaaagtcatggtagttggttgtaactaggtggcagcaatatgagaaaacagaggcagaaccaaaccaagggccgaattttccactttttgaagattcaaatttggaggatttgtgaagcttatataatcaccaaagaatggttttttcgacaatagtaagataagctagaataactgcctcagtaaatcagtcaaataattactatgtagtgtaataaacctttggattatgattaattgatatgaatctcaatctatttaaaat

SEQ ID NO: 17540 - DNA, 1401 bp, Cannabis sativa
taaaaaatatcaaaatgatatttttattttttagcctaaaactcaaaataatattcaaattttatttttgaaaacactcaaccaattaagaatttttaggtagactcccaccattttaattttcaaaaacataaaatagttttcaatttccaatctgatttgaaaatttgtatctttcccaatttatactttgaacaaccctccaaatataagaaaaaactatatttaaagtattaaattgatacatacattactaaggatccaaacccttcaattctatactattagacttctaaaaagtagctaaatgactatatacaaaaagatctaaatgaaaccaatcaaaatataactaaatgacatttataaaaacataaaatatatgcctataactcctccaaactgaaatgccatgttttgggaagtgaccaaccattttaaattggctcaataacatggactagacattgatctccattttgggtaatttttgactttatcttcctataataagtcaatatttcttggattagctcattaaatgtttctttgaaccttctatatcttgttctcgtaattggcccaattaaaacctgtaatgactcttttagtattgctcttttattctcatcattcccttcctcttgaaaataatttgtcctcagatcttcatctatatcaaaaaagagacaaatcagaaacgttaaaacttgcactcacattatacttaccttgaagggctaatttataagcattgtcattgatcttttccaacacttgaaatgaccaatcaccccttgaaagaagtttagattgtctttgaacaagaaatcattccttcctcatatgcacccaatcgtcaagttcaaataaaactttatttcgccatttgctggcttgggctgcatattgttcaatccttttctcaatgtttcataaaactttctcatgaatatgtataacaaaaccagctttcctttttccatctaagttaacacgctcagtcaaagacaacggaattaaatccaaaggagttaatgaattaaaaccatatacaatttcaaaaggtgaaaacttagttgcataatgcacactcctatgatatgcaaactttacatgtggcaagtaatcttctcatattttcattgttagggtttatgccctatatcaagcattcaatggataatatactatacaatatatgaaatacaattataagacaaataaatatgttaattatagaagtaattaataaatatttgaaaattctatacgcacatataaagatggtatgattttgtaaggtagtacaagagaattaagatcatacaatatgaataaaataagtcaatagagtattaaagtatgaaatctttaatatggaattaccaagtacggttt

SEQ ID NO: 17541 - DNA, 8554 bp, Cannabis sativa
  modified_base (4042)..(4064): a, c, t, g, unknown or other
  modified_base (5067)..(5072): a, c, t, g, unknown or other
taatatactaaaaaaaaaatacaaacgcatatatattaataaaaaataattaatcaattaaacgggtccccgtcggggcgggaagtgtcatccctgtccccgtcccatttaacattcgggaacaaaatctgatctccgtccccgctccgttcccaatttagacggggaatctccgcccctttacgggcaggttcccgcggggcccatctccatgggaaaaatgtacatccctaattgggtggtgcttcgcatcgagctgggtgagtgcttttttcactctttatccttttgaaatggaatcatttttgccattttagatgattagactgtctaagtcaaactcagagagatttgtgattcttctcatttgttgtgaggtttttagctagatttttatttgatttcttgaagaattgtatcctttgaaaaatatttctctccaaaataattatatattcaaagttgtgttaaattttacacatgagttttatttggacaaagtgaacttagttttctttttttacaatactagttgaaaatttacttaagctttaaatgtatatttatgttacattttcaatatgtaagtgaataactttaaactagtctttatttacttgttatggataaaccaaccttaattagttttcttcaatattatatgtatactacgtaacttgtgttattatcatcatatattaaatatcctaacatagtattaattgtaacattatgagcataaaagaaacagtactaaaaacagaggtagaatttttatttaaaaaataaagaaaagttcattaatatataaaagaagcactggagagaaagacagtgcaaattaattaaacaagcatgatatgaagttaccaactaacattgtttgaatcaatatttagttatgcaatttttaactgacgatgatggattattatcatctttatttgttggtagcttttcctctcgggctatgaaatccatgttaaaagtattcaaacccgtgaaaatgccgtcatttagcttgtggatgataacacttccgtcatgtaaaacatcgcgctgagtataagagaaaggaacatcacacattccttgcgtcgctataagagtaaccgtggttctagtcttagaaggcactttaaccgtgtaagtagactccgttgcagtttcgactgtcttagtggatgcccatccaatagtcgtggtaaactcgtacgaaaatccaatagtctctttcgcaactagtggtacttctgaaacttcaatagatgtatggacacctatcttgaaggaaccgctggcgctgtaagtagtagctcttgaagttttgtaggaaaacgtgaggtttagagtgttgtcatctttctcgtcatagttttctgctgatgcatgggccttctcgagagcttggacattgtagatcctgccctcgtctggccgaaaatcgattccatagatactcctagacccggcggtctccaccactaccaactttgcaacagaagtaattttggtactattggcattaagaccatcctcatagttatcatcactaaaaatctgagtgtatctatccttggtacttacaggatctttatagagaagggctacggtgttgtcagcgactttgacgggccaaaaaagtgtagcatccttgaggtcatggacaatagcatatatccagtttttgtagctaagcgtccagaacgttccagtggacacgttcttcacacagatataaccatcaccgacgacaaagatctgatgcgctacacccacatctgtaatgtcaaccgagttgaacaacataacactatcgtcaccatagggggtgagatatttgttgttgggaccaaggaaggcgacagttggggttttgggaaatagaacaagcgattgccaatccaagatatcaaacttcgtcattttagcatcaccatctactggaatgcccaaaactgcgtacaagctttcacggtagaatgcagcgcaacgctgagacgcaacatgtgtaaatttgaaactagtatcaccatccttagttacttggaaccaagtacctggttgttctggcgaatctttttctatgggttcgccagaggacgcaaggatgacccacgggttatcaacattattcttgtccacttgcatggtcaagaatttgttgttgtgggagcaccttatgtgcacccattttggatttttcttggcgcttattaattcgaatttcacattagggctcgtaatgtcgttcccatcggaaaggagagacgttggtggcactccctttgctgtgctctcttccttagttatatgtctcaagtaggttttcttgaaatctgatttcacaaccgcaaaccttggccatccactagatattgtagatgtagatgatgacattataaatattattacttataaataatatgtttaaattaatttatagtaataattgggtgagcttatataaactaagttgttatgtgtaaactatttatagagcaccaaaaacaagggcagatcgagattcaataattaattattctatattattgttaaaatttattagtatcatctgcaaatcttattttattttaaataagtatatataataataatatgataaaacaaatggaaatttctgtagcagttgttttggtagattacttatttgttttggcatctaggaaattctttttttactctaatttttcatgatcacatatattgtagctatgtaagatcaacagtaaattttcaaaaaaatttaaatagcttaccgtactaaaaataaggtttaaataattacttataccaagcgtataagaaaaatagctgctcgcacgtagaataaaatatataaatcttattttcggcattataaactattattgaaattttcaaaaaatttacaaagtaatcttaaataattacaacttattatctcgtaaaaaaaaattaaaaaattctcctaaataacaaaatctaccgatcaaaatccactgatacactgtaatcttactcaaaactatattagtatattaaaacatttagtaagtaacgtgaatagatctctacaaaagcaacttgtataagtcattgcatatattattaactaattactatattatattaacaccaacttgtataagtcattgcatatattattaacttactatagaataaatcggatttttacatctagaattagaattatgattgaaaatatatttttttaattatatttttatgatactttcccttctaattatgtaactaattaataattaaaaaaaattagttgcatttcgtttattataattttttgttgtagatattaccacgagtataattataggattaaaacttatttaactaaatttaaattaattagataattaaatataaataataaccttagacattcaagcattaattaattaattaaaattacttatgaatacacacagttccaaattttatactattaatctatataattattttttagctgaactctagctcaaatcataatagattaaccttgaattggcttacaataattatacaactatttgtaaaacgaatcagatgcaaccgatcaaaggagaaatttacaattatttttataattggaagggaatttttcacatttatttagaaatttataacataaacatcattaattattaattatatatttcctacttaataatgcatattttctcacaactaaaatacaatatagtagacagtactttagcattattgatgaattaattaattgtatagatcgagaacgttatcttgaaaataataagcttatcttgtcattatgatcatgtaagtataatttatcatacgctcatatatggcattgactttttaaattactaaacaacataaatattatataatataaataaatatatatttatattctacatctagctagacaaaacgcaatctattgtttcttaatatggccatatggtcatattatataatcaattacaagtgattaaaattaaattagtgacannnnnnnnnnnnnnnnnnnnnnntagtcacaagtaatattttgttgtgactaaaaattacatttaatcacaaaaaagtatgttgtgactaaaaaattattaccaaaagtaagttttttgtagtgcatcttggtactctaatgactttagatcaaatcacgaaaaacaaagaaaagttaaattttgctcaggtgttagtagaagtttgaatgtatgaagatttttcatttactataatgtcacctgcaagtagttttcggggtaagtcctggaaggtcaagagcatcaacccattgcctgttttctcgagagatctccttttctagccatctgaatcttagctctatactcattcattttggattttgagtgtgttccatacaaagtttccaaagcatgctatatagaggttgttgaatcacatcccataacttcaaatgtgattccttcagttatggaaccattcaaccatcccggaagcaactgatcgtttacagttcactgtttaaagccagggttaattaatttcacttgtggacacttcactaccatcaacattagtataaagaaactcgtgtggtctacctacggagaatacttttaatatagcaatcaagtctgtgtctatacactattgtagctagaaactatgatttattatagtgtaaagttattatgatccaacttcaatgcaaacgactcatttattgtgctcccaaaatgagtcatgacaacattttggaatttgagtctgagtgtcgttgttttccagtcactacaaaaaaatttacttttagttacaacaaaatttgtgaataaaaatgaaaatgttatgactaattataaattatcattcttatattgtgactaaaaggaccgtggttaaaattattaatcacaaaaattataatttattgtgactaaatgtaattttagtgacaatacttgttgtggctaaaactaaattagtgactatttgtatctaaatacaatgctttagtcacaagtaatattttattgtgactannnnnnacatttagtcacaaaaaaaaattatgttgtgactaaacagttgtcaccaaaattagcagttttttttagtgagtagcaatattcaaaaccatatatatatgttggtactgtagaagttgttactttctgagcaccattgtcaccttcaatagaggcctctagtgtcttctctcttggagccgccattgatgagaaaggttagtgaaggctgtaataccaacttaaaatcagcaagaaaatgtaattaatgagattgagatgtattggtttcattatataggcaaataccaattacaagaatatatatatattctaggtggccacgtatacaaaaggtaatggtacaatgcatgcagggagcaaaaagaatattctcctaacagaatttgttatgcaatcattacataaattgtgagttgtccaaatgattgggaaaaatgatactttaatcttcttcaatataagcaagcacacaccaactatgaaaataactttgaaatatggtaaacaaaatgtgtattattatttgattgttttgtatatgtaatatctgttgatcatatataatcaaccaaaccaaagaaaaaaatagaacaaatacaatcgaatatatatctgtgttatgtcattattgaaattaacaacaaacattaataattagtttgttaattattatttttatttgtatttcttggttaattaaaccaagaaattatattattagttgatcaatatattgtttcatcaaataatgatcactttttgcagacaacaccacgaccacccattccactaccacactccatacccacaaactcatcttccaaaccactctttcttttcccatcaaatcttgccgccatgcaatccgccgcgaacaagcttgaagcggagaactttctctcaccgccaagcaccgacatgggcactcccatcttcaccctactcacgtagttcttcccataagtctggcccaaaactccattcacttccctactcaatgcaaagaacttgaagctcacatcaagatgggcaaaacaatcttcctcagtgatcccatattgatgaatttgtgactcttttttggtgataggcaccaccgtcgctttgagcttgaaattcccttccacctcaatttccacggaattcacatcctgagtcctcgatacagctatcgaggactctggagactgccacgtagctccctcgcctacagagagcaggataggctctccgtcgaaggcgagggagagacggtcaatggcattgctccatgtagaggtcttcttagcaccaataaagagcttgtggttgtcaaagaggattccgagggattggacccaagtgaagtctctggtcatgttagggtttcgtttcccgatgaagtgggcgttgatgtggaggttcgagtcggagaccaagcaaaagtcatggtctttcttgccgtggaagtaaaaggtgagtccgtcgccgccgatgaagcgtgggtcttggcacacagctcctggtttgttacaatctgaatagtttttttgaaaatttcatattatagtatataataataattatgatattaatattatatttatcacgatatgtaatttgtgaaaatagactattttgcaaaagaataataaggaatctcaatactatcttacatgatatatttttaatgtaatttaatttaatatcaaatttcacatattttaatttaaaataaaaatatcgtaccctttaaaacataatataacatatatatataaagtatgaagcaccaaaagacatagtaataaattataaattggtataattagttattatcgaatttcacacagtttgactatacaatatataacacgttaaattgatatagtattgttgggcactataaaatacttaataacaacgctcgtaaaaaaaatggtaattagaataaatttagagttagcttaagaaaattaacttactgcaaacaggactacatgtaacacaatccacctcgcattgatcaggacaagcgctagggcaagtatgttccatgccataacaactcggataattcttattcctacatctcactcttttacctccggccgcctcctcagacgggggtggaggagattgaggagttgcgggagttggtgttggtgtttgtgttggtggtggtggaggataagcattagtagccggaggaggaggccatgaggaggcttgtggcggtggtggagaataggtggtggccggaggaggaggaggagagcgaggcttacgctttgggggtggtggaggtgaaggtggtggttgagtgcataagggttggcacgtgcgacaatcgacgaagcacgtgcgagggcatgattcggggcaataaagatcctttttgtaacaatctggataccatttgtctttacacttaattttctttggcttttttggtttatttggctctgcttgggttagggctagcaagattgagaggcttataataagaagcaaaaccaaattagagtatcgaaccatattaatatttagacacaaaatatatatatatataattatgtttgtatgtatatataattgagttgtgagaaatatactaggtatggaggatgtttatatagctctctagagagagagagagagagagagttgttttaatattatatttaataaaattgcatgaaataatttacgttagtttttacgtgtatatatataatatagctttgctttatatcctcattgataatttcgtacgtaataatttttctttttcctcctcacaataacatgcatgcatgcaattaattaattaattaactaattaaagtagtaattcataagtcaaaccacttaaatgatccaatctagctatatataaaatttgttagctagtaattataagatattaattagtacttaattaatcatgtgtttgggtatatatattctaaaaagcttaactattaattagcaatttatcctcttgttctttatgagttattattagaaagaacattccttcattcattttaattattaatttgtatatattattttgttttaatattgtagaaactcttttttttattactaaatattatttttctatataaagttatatctaattccatcattttcaaccagacacatatcttgtgtaataagtaatatatccatttaatctattcagaaaaaaagtaaggttattctaagtaaacttatttaattaagtaaaaatttaaagtgtaggtaaaatgtgtggacacagatagataacaatatacagttatattgagtaagagatatacaattatttatatttaaagagctaataatatattgatcatatatatacatgcatgtatatgcatattgcaaccaccattttttaattataatatttttaatatttatagacccgttgagcaaatatatatatgtattcacttttattatgtgatcaattgtttactaagtaa

SEQ ID NO: 17542 - DNA, 3836 bp, Cannabis sativa
tgttagattttgaagttttctttacaattcaacaagaatttctggctcagttttcaaaaggggtccccaaatacagagaaagatacataagaagtttttggtggtggcctaagtgattatgttcctaacgagaaacgagcctgaggtcttggcaaggtcacagccgacaggtttagaggtccagacaaattaagctgagagcatattttatttttccattactgttttgggacacaaatctgcgcaccagagagagacttgtgctaaaatacgcgtgcctgcacacgtcatcatctaatccctcagatctttcgtccaataaacaaatgcttttttcaaaatttcagagcaaagggatcaaagctgatacaataagagcgacagctttgttctttttggattttaaggcatttgttttctagctcatgattatggaccatagagacaacctttattccttttgccacattttcccaatgatcattaccacctttcattttctatatcagttcaaattatgtactttcttacttccgagttattcaagccctttgccatttacttttctttctttctttttttttttttttcattttccaagtgtgaatatgtgattttaggaagcatgcattaacaagaaggatattcagttgtaatagaacaacataaggtaagtttaatatcatcaatatatggcagtaaaggcaagttgcacgctttgtatgaagaatgcataaatgtgatttgcgagcataaaataatagtttatgcataatggcatataaagtaaaattcagaaccattcaaccatgccctcaacctatagtatgcccatttgctttcttttgctccctccattaagataagaaggattctgcctgtttttctctttccaaaaattcaaaactaaagggaaagtgttagctcacatcaacatcaaatgatccaaagtaggattctcccacttaatgatgatgattacatccacaatccacttacttcattagattatctttaaggaaaaggactctacttactaatctttttggggttttctagtaccacattaattcacaacagtattgatcctcgttcccactgtatattgtgaatttttgtggaaatctaaacctgtaagcttaagttaaaagttaatgaaggcctctaattgtactgatgcttatatcacagttctgaaaagcattagataaagctacaaaaagagataaaaacatcttcgatgcattagtaaaatatatcagaactcggtaaacagcttttgactagaactaaacattctttccagacatattttaaaatacaaacagatgatttccaacacaaaataaagatcatatgagatttagtacctaatttcgtgaatcccatgaggcaggcagaaattgaattatatcctagttatatatatagagcataattaatattccaaggacctagatgaatgacaagattagcaatacagcatcagcaccagacactgaaccagagagcacagctattaaagcttttactttatttatttactagactaggttactaaaccttcctaaccaatcagccaaaagtgaataaagattacttactccacacttggaatccaagaaatttatttcaataaaaaataatattttccaaaacttttggtgggtcatttcctgttgtacaatagtcgtttcttttcttctatgtatgaagagacctacactaatgggaagcaaacaaacagagtaacaacagaaaaataataataaaagataatgctaaattgctaatcagcatgatgaagaaatttccattattttgccttgcagtagcaatttttatagcacaaaaggcagttttatctattagattgcaaaccactgccaccataatactgcctggtggtttcacgggaaaattcagcaaaagtcataccgtcctttaaccgagacgatagaggtggtacaatcttctcgatttcttcaattctctcaccgaagccttcttcttcttcctcttcggaagtcaacaggttcagacatcggtcctctaaacttaagcacttcatagggtaacccgaaatgcacagaactttgtcccatgctggctgtaagaacaccacaaaagtttctctgctcaaattttcatactttccaggtcttgaaacagagtgtagagtcgcccgaagcttgccttttgaaagtacctcagctgattccccaacctgaatgataaaattttcaggagaggaattcgccatgaaaatacctttcttgttgtgatcgtatatttgcaagcatgtgtggccattggggtagccacattcttcataacgagactccattaaatcttcttcttcttcaatttcttgcaagagaaaaagaggtgccgtcagaatagtaaaaatcccataatcatagtgccattgctgccataaatctgaaccaaagcatgcctttgaagctccctgctcgtcatgggcttgctttctcttctgttcatgtttcgaattccctctttttttcttcgcactatgtttcagaagaagccgcgtatctagcttcgaatgataatgaatgagacgccccttggacgcacgcgactctaacaaactctgctccaattctcggcctccaatagcggaatcgcagactcgagcgagtcggagcccgagttccatcatgaaaaaccctagctccgtcaaatcacttcccaggctctcaaactccttcgcccgatcattaaacaataaatctcctcctgaattcgaattcttctcgaagtacctcagttgcatcgcaaaagatgacacatttctacacggattcttcaacgggacgtcactccccaatttgttatcctaaacccaacaaataaatacgatcataatcgaaaaatcgattgtagcttctagaacccaatttccattactcaccttgagaatgcgattgcgttggtcggaatcgataagagcgagattgcgagcgagtgggaggcaatggcggagaacggagtaattggggacgccggaaactgataataggcctggacccatgggccctagggtttccattatgtgtcgtttgacaatgtctagtctctgaagctctgccggagacgaagaaggcgattgaacataatctgaggataggattaggagatcagagtaatggagttcgaaaagctcaaagccttcggctttttccatgttcgctgaatgttgttagtctcgtctaagtattggagatcagtcagtataatatttttcaaaagaaaaacaaaatcgcgccattttttatatttaatcataaatatatggctcatttaccgtatttttcactcctatcaatttttagaattattacatagaaaatataaactaatatcttatttacaaaaatacatttataaagtatggacaatatttataccttttatataattttaaattccaaaataccacatacattattacttacacaatcacacggtagtggttgcgcggtggttgcatcagacaaaggtttcaatcagacgatggttgctgggtaattggtcgaaggttacatcagatgaaagtttcaatcagacaaaagtttctaagtagttgttgggtggttgaccaaaggttgcatcagacgaaagtttcaatcagatgaaataattgttagcaaaatatttatgcaactataatgcaactgttgtgaaacattaaaactcagaacagtgttttcacgtaggtataattatatctacatgtctctttatgatttaatatgaacaaattcaccattagaaatttaaaaaataacgaaaaatacaccaggataaat

SEQ ID NO: 17543 - DNA, 3205 bp, Cannabis sativa
ataattaaaaaataattaaaaatccattatccttaatgacatttcttataaaattagtggaggaagttctttattttttttctcccttatttaattaagttctattcgtaattaaacaaatataaatgaatgattaccttcccattaattgtcattacttattaataaacatgcatagtgtaactacacaaaacttttgcaacccatttttagaattttttttacaagggataaaaatttaaggacaaaactctaagagtctcataaagatcctatttattcaaatttaaatgatgataatttttccacatcgccaactagtcttcctttcatacttcactacctcgcccctttagaagttgcagaacaatgaaaccttcttaccccttttcttaatcgttatatatttgcaggagaaagggatagtgagagagagaggagagagggagagtcatttcatataaaagaaatgaaactcttcattttatttcccttcgattgaaaaagacagagaaacacatatcatcacatataaacatattcataaaccctctaaaccctggttgaaccagaaccatcatgccctgttcgactctctttcacggctatatcagaaccatgtctctcggacccactaccaccaccagttctctggctcttttcaagacccacaacaaaactattgcagttaaacctcctctgttgctgggattcttcgccaggcaccggacctaccgtactcataatgttggcttctggaatgtttaccgggcgccgcgtcacttgtcctgtcgagaactgacatgcttgtcttcttccgggaccgttgaggtggatgggggtcagaggcggcagcgccaccggcataaaggggctgctacgctgccgttttggcagcagcagagtctgaattacggccgttatgcttatcaggatgtgtcgagcagtgaggattccgaccgcgaattagggtcttctaggaaagaagcggttagtttttttgtctatccattttgttggttctgtaatttcaaacattgattaattgttgtctgaattcttatatctataagataaatgtttttataacgttggagtatattatcataatgttggttggattgtagctctgaagtgatgtagtgtgttttagttctcttgctttcgttatctttctggaatatgatagtacctcttgatgttcttctagataatttaagtggtttttctctagcatgtacattgtaaaatgatctaagttgtgttcatgatttagtgtggttcaacccttgataacattgatgaatggagatggaagttaaccatgttgctccgtaatgagaatgagcaagaagtggtttcaagagagaagaaagacaggcgtgattttgatcaactttcggcattggcagccagaatgggtttatactggtatgtttgtttctaagcgtctaaacctgttcctgttcacttccttatattatgtcatttattcaaacacttgtttaatcttttatttaatatttgcagccgtcaatattccaaagtagtagtctttagtaaagcccctctaccaaactaccgatcagatttagatactaagcgcccacagagagaggtattattgcgattctctgtgaagttgacccactgagtttcttatattactgtctttttttttttattgaaaagggttatgttgatgatgatgttgagttctttattttactttattaccatcagttactcatttcaaaatcatatttaggtgataataccatatggacttcagtcagaagtagactatcatcttagagctcatcattctcgaaagtcaagcagcagggaaggtttatcagataatttattgtcaagatcaagtagcagggatagcattgtctctgatgagaggtttaatgagcagcaggagccatcaggccgtcgtagtgttgctatggaaaaaatccttcgacagaaaagtttgaacatgcttgatcagcagcaaaaatggcaggtcacttgtacttccttctcttttattgtcttttcatattacatggacttagctcctcatttattttagctttttttatataggaatctcctgaaggtcagaagatgcttgaacttcgtaaaagtcttccagcctataaagagagggaggcattgctaaaagttatatcagaaaatcaggtctgccatgtttatgatattttgattgattgatcatggtttattgtttttacatttatatgctttctcacccagaagtgaagagtagcttaagagattagctcttaaggtgcaatcctgttactcaacaataaaaataaattgtttatcatttgatttacactgggctatgtttatattatattttctgatcatctgtgcatggagaaatttcagtacaactggttgagctagtaattgatataagattcttttgttcattgctgcttttccattttcttttcagataagaaacatggtttgattatatctagatgaaacgagagtaaagatattataatagataaatttgcaaccatgtacgccaattcccaagtaaataactagctcaaccagttgatataatatcgaaagtggcagttgaatgagaaagaataaagcagctagatagtgtgaacatagtggaggatggcattaagtcttaaaagaagagagggagaagcgaaaaggtgaattgtcccaaatgatatttagagaggaacaagcacttagattaacaataacccaaggagggagatgggaatacaagattttttcagtctaatgaatgctagaaaagcaaaaaacattgtctcaaatattgagcgaaatgacgaaaccgttttagatagagaatgagattgaggaggaaactgtgggctaattcagatccttgtaccagtcagtccaagatacatttgtcagttttgagggactggagtggagggatactctcaaatcctgtctattcagttggaaaggcctttttaagaggatgaaattagaagagctgtttttaagtacgatggtgatattcactgaatttaaagagagtggggtggtgaattgaattactaaggagacacacattcatttccaaaattttaaaagaagcaacttcttgtaagattaaaggctttaggccaatttctttggtaacagttctttacaaagtcatatccaaagccctttc

SEQ ID NO: 17544 - DNA, 2991 bp, Cannabis sativa
tttacaaggtgttcatgaacacatacactccactcatgaagcaaagcttcaattacaactcatctcaccagaactctctctatgttacaacctaaactagctctcaaaaatctctctcttaaccattgtccaaaatgatgtaacagatggctatttatagcattggccttatgtcttgatcctaactgtcataactgacagttaggtaatacagttggaattagttgccaacatcttagccaatttgagcagtcctctattagtggccaaacacaacacctagggtaccgaaaaattcttttggaaataaacaaaataatgaaataggcaacgaataatgtttttaatgtacccactatgactaacctttgaggggtttactcaacgcaacgtggactatattattttctgacaatataacaacacctagtccaactaagctcgtggtgctcaataacgcaaaaatttcatatgaaaacttttatttctcatgaaaatatgaaacaatgaatcatattaccctaaataattaggggcaagctataaaaataagtgcaaaagccttgaaaggcatcaaagccaacaaaattgtggtgcaaggaatcttcacaatgtataaaatattaattggctaactatttgactaataataattgcttacagaaataataatagaaataaatataaagactattataacttaatgtaaacttggggaaagaaaataaatataataattatatggtaaagtataaaattattaataaaattacgtaattaataggcttaataaattttaataaatgtcgaatcaaattaaaaactagtagcaacaaagggtgctacttccctttcagtacaagcacgagaaatattgtgcacagtagcccaggctgctagcttgtgagccacaacattggcatcccgagatagccaagagacatttaaactagaggaggttttaagacaagaaaacagatgcaaaaacatattagagaggttccaaacaggtattgtaaagtttctaacaacattaacaagctgcaaacagtcagagaagaagttagcatccttgcagttcaacttcaagctcaaggagaaggcgtgacagagagccatacactcggcatggaatgctgaagtagaaggcaccttggcagtgagagcatccataaaatctccatccttgttgaaaataacaacagccacataagcccaactaattccacgaaccgttgcgtcaatgtagaaattaaactccttcatcacctgttgagcgtgattaggaggatcaaaaattgattcctagaattccacagagagaaacacaagtaggcaacaaattgaatgtaattcttctcaaaataaatagtcatattcagggctggttttaggttaaggtgtgttaggtttgcacttaggattcacttattttaagagctcaaataaaaaaatactttttaaaaatatcatttatttttatagtaggactcaaaaaaaaaaaaaaaaaataccaatgacttatttcaacttagagtcgtcatattccaatattaggtgactagaatcctcaaataaaacataaatgcctattctaggcgagagaagaaacaaaaatgaaagaagacccttaagtgctcacttacttaactaaatataattagttacttcaatataagtaagtatctatttcttatattagttattgaaaaagatgtattgtgaaagtagaaaataatgtaataggtttcaattgactttaaggagggtccaaaagtaaagaggaaatttaaggaggaccaatgataaatgtatgtatatattttgagaatagaccaaagctcattgatgaataaaattaatacacactaaaatatgtatattaactcattaacagtccaaattacaaacttagctagactactagcaacattgttacaatgacaccatctataaatgtaaaaaaaaaataaaaaaaataaaattaaagtaattatcataagaaactatattagcaagactaattataaattttttttcgaattatagagataatttgatttaaaaattttagtccaattttactaatagaagtttaagaaaaacaaaaaacacgatttgatagatattaaagttcgggagtacaatttaatacatagacaatcgtcactttagtaaaattaaacaaaattcaacaaaaatcattaaattcaaccatctcaaaaattgaaaagaatttttaataaacttaaaagtttaagagacttaattagttccgcggtgcaaatcctaattaacgtattagtaaatagtcaccaacaataccttaccaattgttaccagtttgacaataagcaatttaccatccttgtttaaaatattacaaaaataccacaaaatatatcaaagtttgaaaaataccattatttgtttcccaaagagaaaattggcgtaggctggttctaagaagcagaaacaaatatgagaagaaagagaatccttacttgttaagcaaaaactctcgttagcaacgcgtattttccatacccaaaaaccctatcttctccttccttaattactgttttctgattgtatacatatacaatatagattagtagttgtagtagtagagcaggtaattcaggtcacatcataatcatcatacacacacacacatatatatatatatatataatagtcttcccattatctaatctctcatccatttcgtttcagataagttttttcttttgccgaaatcttcaaatttggaaaaagggtattggggttttggttcttgattttgtttttgggatcttcttcaaccatgtccatgctcgattcattcttcaacaagggtttcaaagctgcaaaatggtatctaatttttttcattttttaagttattattgtgttgtgaattgtaaagtttcaattttgatttctgggttgatgagaattatgagatcggaaacttggttggtaggatcc

SEQ ID NO: 17545 - DNA, 7180 bp, Cannabis sativa
gtcattccaatgaaatgccctttccaccattttggaatgtaccattttttttagcacactactaaaaatactcttatttataattacatttatttttaaaatattttaattgaatctaacaaatacttaaatttcatcctctcattcttctttgcgtattcgaagatgtagttgtgtaaatttgtgttttcttcaaccccagttcaactaaaaagagccaaaccataatcgaatctagtctaactctaacttaatatgattttctaaaaaacaattacaaaagattatagttgtaatatgatctttcttctttcgtgcttaatattttaaaaaaagataaaaaaaaaaaaactaaatagtaaatatagctttgctttaggtgaggataacagacatgttagcctaacaaaaccgcgcaccaccgccagagtatctgatctcattacaagattccctaaataccacactcaccgttttattttctagaagaaaatctccaattcaagtaatcaatcacaactaactaccctatgaggaatgggtataatcgtaaattcacattctcacgcaaactcaaactccctcccctctaactatttaacaccaatacttttatcctaaattattctttttgactattattattattattaacagaagaaaaattttcagttttcacgcgcatttaatagaaagaagaacatcagcacgtacatcatcctctaaattacccgatttcacccttcacttaggagtcgccacgtcatcaacagtagaagcttaattccacgtgtttatatattattggttgaaagatatagccgaatacttccttaccaagtatattgctgcgtataaatagtctgaaaactctcaacttccctttcctcccaaactaccggaccagactgatacaattctctttcgccatgagagacgaagaagattttcaacgccgtgaaattcctgatctgagtcttgaccgacttaaggttctctccgctctcggccgaggagccaagggcgttgtgttcttagtcaaagataaagaccgcgacgagtttcttgctctcaaggttatttccaaggcactgatcgagaagaaaggaaaagcagcggcaacagcagaaggagatgagtaccggagagtctccttcgagcaaggagtcctcggccttcttcgtcacccgctttttccgagattacgcggagttttggatactgataagcttgttggttacgccattgattattgtcctggacgcgatcttaatgtccttaggaaaaaacagagtgagaagatgttctccgatgatatcattaggtgagttgatctatcaatcaatcaatcaatagatttgaaggttttattgttgattattttgactgaattgaatttgatttgatttgattttattgttgttaggttttacgcggcggaactgattcttgcattggagtatttacacaaattaggaatagcttacagagatttgaagccagataacgtaatggttcaagaaaacggtcacattatgatgattgatttcgacctctcaacaagactctccccaaagtcgactcctgcatcgtcaccgagttcatcaaactcagtagcaacatcgcgtaactcagtaagcatcaagaaacgacaatcgccgttttaccgactctgcaactcaggaatttcgccagaagactcggtctcacagaacggacacagcgaaaactcagtacgagccgaatccgactcaacagaaaaatcaaactcattcgtcggaacagaggagtacgtagcaccggagatcatctcaggcgaaggacacggtttctcggtggattggtggtcacttggtgtagtcctatacgaaatgctatacggaacgacaccgtttaaaggttcgaatcggaaagagacattttaccggattctgacaaagacgccggagttgtacggagaagcaacgccgcttagagacttgataaagaagcttctggaaaaagatccgaagcagagaatcgagttggaggaaatcaagggccacgatttcttcaagggattgaattgggaatcggtggttcagatttcgaggccaccttttattccggagaataatatcgattattatgatatcgaaaagaataataataataataacaacaatacgaatattgacgtggaatcagttgtacaaggcatattccaaaacgacgacgttgaaaaaaatcagaacaaaactgatcaaaaacaagtctgggatggagcttttaatcatcaccccactcaaacagaaaattttcttgttttttgatttttttttttaattttaattagaaaatattctttatttgtttatataaatatttgtacgacttagatatatagaatatcaaagaataattatatttaggttttgatcatttacttagctcaaacttttgcaacctcaatttttggttgaattatatatgtataaagttttaatatgcataattgtattataaatttatacttattataacttacaagtaagtactctttggctgggatgggaccaatttcaaattttcaattcaaaaatgaaaaatagagttggttaagtttttgctttcataataaatatagcacatgattcttaaatattatagtgtaaataaataatatattattacataataatttttagtcggtaccgccgataatacattatgagcctcaaatttgtgaaattaatattggaccactagtactactatattattatatggtgtagtaattaattgatcaatttcttttaatctatactctatagtctatacccaatatattgactggtttgtgaatttttatatttgtttttgtaatcgagttatcaatgattattctcaaggaaatttctaattggagttggtgctatataacttaattgttcaaatgtgtgcctccattatttatgcctaaacaagtgtattccactattatatagttggacttgttttgtaatcattcaaaagatatatggggtttcgttttcggtcatatttatcagttgttggaaaaagaattatcaatttttgcatggaaaaaacttacatgtaaaaaagaaaagggaaaatatgtggtggaatgcataccaagaatttttcattgctaaactagctataggctttttaataatcacattgaaaattgaatgcttccatattcaagttattaaatattcatttgttaatttttttttttttttttcatttcaaccgtttgtgggatgtctttgaagagttgtgtgacaatatcaaagatttgacagtctatctaatgttatttatttcttaatttttcctcttttatattttgtttcgattgttagggatttctttgctgaattgtgtgactgatctatcgaagattaatcgacagttataagaggttatgtccttccaatcagggtggtggtgtggattcatgcaaggtcggtgatgatgtagctctgtttggatccgaagtgggctcttggatatatcttcttgggttggggctacgttatgggagtttcacaaagaagtggtccatcaatactagtgtttcaagattgaggggggtggccatggtttgagatttgtgtcatggctctgctgtgttttttatattttattttattgtttctttgttttttgtattttcaataagactctcattattataggtttaattagtggattaccactttacgtggagtgtttatcatctatctttaatagtatggtgttcttttcgtaacaattgattcatgctactgatttagtggctcataatcatgtgacaaaggttgaatcgaccgaaagcttttatgttgcgagattaaatgtgcatatattgcacttagaatactgcatgtatgttgtttaaccctttaaaacatctccactagagatactattaaagatgcttgatgatatggatatatttttgatattttttaattgagcctaccattaaaatgaaaaaaaaaatggcataccatagcataatattttatttttttattattattttatcataaaataagaaactttatttatttactatatattaaataatagtataatattatcttcataatttttagagatgcttattattggattattttagaacaaaaaatatcaaaaatgatttgtaaaaaagataaaataaaataatatatttttaagtgatgtgaaaatttttaacactcttaaaaaatgccaatattaaaaatgttcttaaatatatttgacattcaattgttaattcattttgtgtgagatttatcgtgccttctttagcacggactattaacaatatatatttaaattttatcttatgttaatttccaatgttgctaacttaatatatttatttattaattattaaatacagttatcgaaagttattattttattattacttgttacgtacgtactactagcaaaggccaataatctataggtcagcagcaaccggccgtttcttaagttaattatagtacctacgtattgaagatctaaaagaaactaaaacatttgaccatttcttattcaaatttattgtgccccaaaatatagtttggtttttaatttcagttcaaaaaacgaaacatacagtgaaatttccttgtattgactaattatttacaatataaaaaaattacaattcatgtcaatattacatataaaatggctaataagacttaagacttaagattttcctttaaaaaaaaacaaaaaaaatcgtgcagtcatgctttgtgcataatatttggaaattattaataaatctgatcaattcaacgtcacattcacaacatgtcttattcttttgtcacgtgtgtacgtagtatacaactaatcaaataattaatatgtattttttaatagattaatgtaaaagaacgtaatacgtaattatgcattatataatgtggtaatatggttaaaaaaaatatttgagctacatataataataataatacatacagctttatattatatatgttgtcaattcacacaaaatatataaattttatataatgacaattcacataataaaggggggcttctctctcttcaataatgatgagcttttggcctgcttattattattattattaaaacctttaaaatgatgctcttggatcggtattctgtagtcactatagtaaagtgactgtgtctgaggatgaacttctgttttttaagaaaaaaataataataaataaaaaattgataagatatataagatggatttatatatataattaagaaaaacttgacaattcttcataagtgctgttaacttctattttttttttattttgtttgaaagaccgatttttcgaataataatttgtgagaaattattcataacttgatcattttctatagttcttaatttttttcttccatagatcaagtttctcttttcctcaatatgctatgctatgtaaaattatgtaatgtaatatatattctcttatgttctattgtgtttgtgtgtatatattgaaatttaattggcaactctaaaaaattctctatatttcaagtattttgatcaagtgataaatttccatcttctttttgtttggatagcattttttttccaattaattctaaaaaaaaattataatattttctttgaataaatccatatatatatataaacttaagtaaaaaataaaagtatattaataagtcactcataaaagtggatatattttaataaaatataatataaaaatattgttattaataaatacaaaaaagagatatttatcaacttatcacaagataaagatatataataaagcattcttatgaggtactaaggtctattaacactattagatgacgtcttataatctttaagtaaaatatgtggagcccaatattgaattacactaatagcgatattacatattacattcacaaaggtgttaggcaccataaatatctttagtatttctatatataatatattgtggtttcataaataaatatattttatatgtgtattatatatttttttatattgttttgggtctactagattatctgtagacataatgaacaacccaccaaacctacattttcaactaacattatatggaattttctgttgattttatttatttatttatttttatataactaggttaccaaacttaccttttgtcaaagtatcaaaactctaatatgaggcttagaagtattataaaaccttcaaaattactcacatgagtaatatgagataaaacacgtacataatttatactgagttgatgagtgtacaaaatacgaataaattattactattcatatatataagattgatcctaagatgagaaattcacttgtaactcttgtattgatcacacattattaatgtaataaaagagttgttaaataataattacatgtaacaaatgatgtttaatatagtggtagagattgttatttttagcttaaatgatcaattctcaatttctacatgctattatttaataataattaaactaattatataaggcctaaattaaaaatcaaatagtagaagcctatgtgataatatggggttatgatgggtttgatccgaacttaaggtaaaacattgtacataaattaatttaactaattagttttatttaagaggagtttcatttataaaaagtgaattgctacgtgtgttataattatgtacaatttatgtgtatatatcattactcataatatatatataaataatttgtattaatgtgatttcctacttataacgatacatggtgaggaaaaggatcccatattaattcccattatgatatagttgatgtgatgtgacatcataaactactactatattattgatcatcattgaaaacaatgaccaaattattgttattattgtgtaatttattgtatgaatgtcatttcccacttataattaagcttcaagtctatagaaattatttaacatctacgtctcttaattaattaaataacttctgacaaaaaaaaaaaaaaataaaggaactaaaaattaatgtaaacttactagttactacttttgtagttttggggttttaattaaataataatgaaacatatggtcttcacctattacttttctaactaattaacg

SEQ ID NO: 17546 - DNA, 5308 bp, Cannabis sativa
aaaaaaaaatgacgtgaaaatttcaagaaagacaaatacgtaatgatcaaattaaaaacaactgtcactttttttttcccaaattcacacgatttcttatagtttccaagttgctgttggaatgagttcaaaacaggtatagtattagtcgtagtagtcttccttccacaaatatttttttattttttatttttctatatgaatttccatggagagagttctccacgagaaacaaaggagaagagaggaggaaaagtccataattgcttaaacgctttgctctgtttctcaggcacagcaatgacagcagtaaagctgtttgtcgttttgttcatcttctttcccaactattcatcagcaactgacaccgtaacgccaagcaagcctctcttagacgatggccaaacactcatctctgccggtgaagtcttcgaactgggattttttagcccaacaaattctgtgaaccgctacgttggattatggtacaagaaagctccccaaggcatgattctttgggtcgcgaacagagataagccgcttaaggactcatctgggagactatcaataactcaaactggaaaagtagtcattctcaataaccattcaagcactcccatatgggcttccgattcttcagccaaaaaccccactttacagctcttaagcacgggaaatctcgtggttaaagatggcggaagtgggaaattagtatggcagagttttgatcatccacgtgatacgcttatagcaggaatgaaactgggatggaaccttgaaacacgtcaaaactggatccttagctcctggaacagccccaatgatccatctacaggaaattatacgtacgaggtcgaccctcgtgggcttcctcaaataattcagcgaaaagggtcggaggtacaataccgaagcgggtcttgggacggtgtccggttcggtggagaaccccctgtgggaccaaaccccctaattacgcctatttttgttttcaatactagtcatgtctactatacctatgaaaacaatgaagcttctagcttaacagcgttcagattgaacccatcgagcacaattgaacagtttagttggaactatcaacgtcaggagtgggtttcggtctacactctgcagaaagatcaatgtgattcttttgagcattgtggtccaaacggtgtctgcaatgttaatttggatcttatttgccattgcccaactgggtttgtgccaaaaatgcctagagactgggaaagattcgactggggtagtggatgtgtacctaagactaaattgaattgtagctcagagaagggtttcaagaagttttctcactataaattgccgtacgggctaaagtttttggctcaaagaactgtgttgagtattgaagattgtaaagaaatttgttcgaggaattgttcgtgttcggcttatgctctaagtggtgttagtggctgcatgttgtggtttgatgaagacttggttgatatgacagaatacaatgttgggggacaagatctgtatattaagatggctgcttctgaacttggtacacttaaactaattgacaaattattattatgtttttcttacttgagtaaatttttttttttttttgcaaattatttcttacttgagtaaatttgaacaagaatcttcatcaaaacttgttgcagcaccagaaaatgatagcagacggactgtaataagtatctcagtatcaataatcacgattcttgtattattgatttgtattggaggctatgttttgtggaacatgaagaacagctcccacaaaagccaaggtgaaaactttcactcatacacaaaaagagatatgataggactatatggtgtaattttattttattttataaatatgttgtcaagctattcttttcgtaaacagaacataatgtgtttgtctttagtacttaaaataacccaatactggtaaaatataggataacgatttttaattataatgtgattattcgtttgatagctttgatgaacactagtttcttagaagagtcagcacgacatttgattagaaattatttgtattgataacacattacacttgcataccagttttctgctactaatttctgttaaaacagtgtaaatttgaatttagccttaattaattcatgagaatgaaacaataaattagagattagtagaagtgtaccagagttcataaaatcgaactttgaatggtatatttttcaatttattgcattaaaattttctctagaacctaagtttcttgatgacggggtttcaagaatgaaaagatacgataagatgcaaaattagggaccattatccgcgaaaacagttagtaatatttattaactatttttaatttggtacctcaaatcagaaattttctaattggtatccacatattaaaattataacaatcatgcatttaagtcacaatctttatttcaaaacagatcacataaatatgacttctttatttgataacgcaacacacatcttatatatacaattgtgattctaataaatttctaacaatttcttgctgtgaattttgtgtagctgagagaatgttacctaatcaagaagaagagcaacattctgatgccttgacagaggatgtagagcttcctttatttgatctaaatactattatgagtgccactgacaatttttctactggaaataagattggggagggtggttttggccctgtttacatggtactcttcttctagtaacattttgaacttaaccagagctttacatgaatggattaactcctcttcttatcctatgcataattttatcatgcaataacaggctgtgctcccaactgggcaagaagtagcagtgaagaggctatccaaagattcaggacaaggagtcatagagttcaagaatgaggttattttgattgctaaacttcaacaccggaatcttgttaggctgttggggtgttgtattcatagagaagagaggatgttgatctatgagtacatgcctaacaaaagtttggacttgtatttattcagtaagccatatcttctgtattctcagttttatttttcttatctgtgccttttgattggcaaaataaactttagctttaacactctaagcaaaaccaaaagaaaaggattaactaaatataaaatgggacagatcaaacaaaagggactgcgctcaattggcagatgcggtttgatattatagttggtattgctcgagggcttctctatcttcaccgagattcaagattgagaatcattcatcgagatcttaaagcaagtaacatcctcttagataacgaaatgaatcccaaaatatcagactttggcttggcaagaatatttggaggtgaccagaatgaagtaactactaaaagagtagttggaacttagtaagtacaataacttttgtctaatattttcacttggtttttatactccaatcctaatctgagttcaaaaatcactcgtagtggttatatgtctcctgagtacgcaatagatggacttttctccgtgaaatctgatgtatttagtttcggagttatgattttggagatactaagtgggaagagaaacaggggatttcaacattcggatcatgacctcaatcttttaggacatgtgagtggagagtacttgtcagttcatgttttctgttatgctttattaagttaacatccagtctttctaaaatttaagttttggattgttttaggcttggaaattatggaatgagaagagaccgttggaggtggttgatgttttggtgaaagatgtcaatgaatcagaagcaatgcgatgtatccaagtggggctgttgtgtgtccaaaaacgccctgaagataggcccttaatgtcagccgttcttttcatgttggatagtgaaaatccctcgttgcctcaacctaagcaacctggattttatgttggaagggtctcttcagaggttgattcttcatcatcttgcaatcaaccatttacttctactgaactaactgtgacaaggctacaaggaagatgagaaagagaaaaaactctaagttggtttgtacagtccacaaaaccaaatgcttaatttatttgatgttccatctaggaaagtagtgccactaatggaatatagtttattggtgtaaatttctcttcaaacattagatttttgtaaattgtttggttcattttatgctgtactgtacaaatgcgaatgttgcaactcagagagatgcagggaagaatgcttaactagactagaacatctatattagagtgcataggaaggaagggaagttctaaataataaaattttagataaatggtttattttagcgcttttaaatattttgaaatgagaagcacacttataagtaatgaattattatttttgctagaagtcatacttttaatatattttattgaatacttttatcagatctcagtaagctttggttgccatttaagtcaaatgatcagtcgacagtcttaattcatcatcacgatttatttaattaaataagtcaaaatatcaagcaaaactacagtagatttcaaaggtaattaagcctctcctagatgacgacatgaacccaaaattttcagattttggcatggttacaaatattgaatggagaacaaattcaagataatgcagtggttacatgtggtctgaacgcgcaatgtttggaaaattctctgcagagtctgatgtttttagctttggggtcctattgttggagactgtaagcggtatcaacttaggggacgtgaaatcatgatctaaacaagcacgggttttggaactatggaaagaagaaagagtgttacagaacatggatccattggtgggatcttacttcttaggattgtgatgaagttttggaatgattaatagtagtttataatttgtttctttgtgtccaagataatgtaaaccatcgactgacgatagtactagttctcatgttgagcagtgaaatcaagtgagaaggttggccgattttatgcgtagttgcattagaatttgaagaacaagcaccttatttttcaaataaggtgacaattagaagtcatagctcgctaattaatcattgatgtcctccttaaggatttaatataattaggtttggaagtgtccatacgttataataattgcggtttttgatccttgattgtaactttcttcaacttcattgtcaaaccctctggcatttcaacgttgctgactccaatacgagccgcacgaggttttagaaaatttcattctagaaaattaaacaactgaccacatc

SEQ ID NO: 17547 - DNA, 5713 bp, Cannabis sativa
  modified_base (1180)..(1204): a, c, t, g, unknown or other
aaaaaaaaaaaaaaaaaaggtgagaggttagcaaataaaatataggagtttaattgtaaattacttataattattataaacttatgttatttgctatgtaaaaaaaaactatgttatttgtataccttttataaaattgaaatttgaacactttatatcattgctttttttttttttttaattaatgtttatttttttttggaagaaaatatagaacttttattaatgtgtcaaattagtcaaaagacaagactgtacctcaataaaaacatcacttctattgaactctcgatctggaaaagaacaagatgctctagcaagactatgagcaaccatgttagcagatcgtttgataaaaaataaagaaacattgtttaaagatgcaagaaatttatgacaatcttctataataaccacaaaagaagaaagcatatgtaatgaatttcgaatagcttgtaatgctacatgcaatttgactccagctccatttttcgccatgattgagtttgaattcagcttagcgttttttttataccaattgctttagccaaattcgaagcgcctataccagcaaaactggccgacttagccatcactaattccccttgagagtctcaagcgactatgccataatcaaacgcagctcgataatagaaaatggaggcatcaatagttatcttgattgtattctcttgcggcttaacccgaaatttaactccatcaccaacttcaaaaattgaaaaagaagcctctatatctccactttgggccaacttccattgcacaagacaactcgtagatgagataagaacatcatccactgtagcatacttttgattccaaaccaaatcgttttgagccttccataacccccaagacaacataacaacatcccaacactttattaaataagttagtttatttaaagggtaaataccattttgaacgttatattttgcaaaagttacagattggaccatctgttttctttaatgacaaaatagactctgtatttccaaaatggtaaaaataggatcctgagcttaattttcgacaacttttttttttaatataaccaacttgaagacaattcctaacacgaatagatacagaaaatgtaaataactttgtcatgacacatttaaatcagattattattatattttattttgacaaaaannnnnnnnnnnnnnnnnnnnnnnnnattttagaaaatacaagatctattttaacagagtgttcacttattaacttttgcaaaacagagagttcaaaatattatttacccatatttaaaacataaataaaaatgtcattatgtaaaatttttaggtgtgtagctgctttgcttcttccatatcttcaattcaacttcaaccctcccctgcaggtctagtgtccacgttttcctttggaccaaataagaaaatgttgaatggatacttaaagttcccttgattgagacattatgcaaggaagagaaaaaaggggtttcaaactttcaatactttataagaagacttgtttaatttttatgcaataaattaagaattgattaagggtatacaagtagagcttagattgatcttacgtcagatacatttggagaaaaaaatacatattcatacaaatacatcactactacgttgatttgtatagacagtatatgatgctcccacatatatggtgatgccacgtgtcgtatgtgaacaccctcttagctactcccacttggaaaataatccaagaaatttccaccccaatctgttttgaagtctcaagtctatgatgtgaaattgtttacatagtcaaatttggctcttgttccataaaatcttctttatttcactgttttgggtgagagaacagaacaggagattcggaaattttgagatgggaaagatgatttgctcggagtttaatgaaggacgtttggagctgactggatttatggtggtgattcttatagctctcctcctcgtgctcatctgcaacccatcgcccaggcggagagtcttagtggtgcaccgtttggcttgagaattctgttacctgcgctggccaaagatggagattgaactcaggctctggtgctgttcttcattttagatactaatagaatggttggtacttgatgtcataatagccataataaggagttttatatgtattggtttgagttgagttgagggtattgcaaaggtggctgagtcttgggattcatttgaatcatcatttcaacgaaataactggtggcataccagatttttggtattgtaaataaaacatagatcatacatcttcacatgaatgaagattttcttttttctttttgccaaggttatattcatgtttgccaatcagtaataatgttattgttacagatgtttgaagaagatactgatgaagtagaagcatagcatcataaacaactttctaatcaatgtgcaatagggttttgggacacgtactgtgagggtattcataaaataattaataaaatttaaattacagattaaaaaaaaaaattaatcaatgattcaaatctaattcacatatacttatatactatttaaaaaaaaaatatacatccaattaatattttagtataaataataataatttaaaaatttaacacatgtaatataaatatattttaaaaattaaatatatattctatttttatttataagtaatatataatctaaaataaaattacacatttttatacatacaacttttttctttttgttttaaatttattaactttgtttatttattttaatttttattttgttattagttttgcaggaatttttttttaataattattaaataatttaatattaaaaaataactaattcaaaataatcaattcggtttacacttttgtgaattaaattagaattactatgtaaattgaattgaaaacaaaatataaacttgcatttagtgcaaatgaatacagtgtgagcaaaatagtgtgaattgaataagatgaacaccaccagaagaaaatattgctcattttgtctctatagttctattctcataagatagaaaggatataatatatctaagaaaatactagctaataatgcaatatcattatttgagaatcagtctgcctcaaaagattgtatcaaaatttaattgtatagcattaactctttgctctctctattaaaaagctacagcatcaaaactttagttcatgcaaaaagttgacaatacatgtataccataataccaaacgaagtttagcaattaagattagtgaaaactgattaaactagtaattatatagtcaaaatacaaaagctaaattctatctccagagatgtttaactatagattttggaaccttgaatcgtttccaagagatgttcaattctatacttcataacaggttgccctgaacgtgtcttcttaaacatcttttccctagtagcctttctctgagcattggctttatctatttcttctttcttcgcctgaatagctgcttctttttccattcttgccttttcctcctcttcgcgcttcttttcatatatttctctcaaactaactttcgttttgttctggctcttcttgtttttcttattcatttcaacctgtgaaaacaatgagagtaaatgcatcacttacagaatgtatctctataagaatacattttacacatgacagtaatcaataatgccaaaacttatatcagtccttcaaaaatcatacaaacttactctacacctctaaaatctagaaacccagaagaaaatattctgatgtagtacttaaagtattattaagcttgagtttgttttcacacaagaacaaatgcaatgaaaataggcaccaaataacttgctcttataaccaacctcgctgggcatcgaagcagaggaaagaccttgctgtttcattgactttttaaacttgctcacatatttagcatttttatagaactcctgctgcttctctgcaaaacacaataaagtaaaattactacagtgaaaaaactctagatatagtatcaattttagttatatttcacaataaagttcaagcattagttcatctactaccccacacgagctcaatcaaatagatcctataaccaggtctatttaataatgctcttatctctaagacatcataagcactaaatcctaacacaatcacaagcaattcacccaatatgtacttgaattttcatactgaaacttctaacaaggagccacattatccaactttgataaaaaaaaatatgtaaagcactacaaaacataattgctattatatatatatatatattgaaaactgtatcatcaaaataagaaacaaagcgtagaagttagtacttattgaagctggattgtagtggcttctgttcgatcgggcatgggcgaaggcttcgagtgaaaggcctttcctcgtgttattggggttctgattccttctcttcatgtttactgaatcagggacaccaattccctttccttttcgatcctcgcttggggtccgattcttcatctgaaaaaattgttcaattagggattgtagaacggggatgagtcggaaaccctagaattagaaacatacctaaaaggaactgtgtgggtggtgccgactgccaaagaaagggagagagaagggtggtggagatcggcgccgacgatgagaactgagaagtggacggaagagagggactgagggtgaggcgcacaaagagagggagtcgtcgaagatgaggcggagagattttagggtaatttttgttttattattttagataatggcgcgatgcaacatttttttttttaaaaaaaaaaacacaaaataaatatgtttcaaattgattttgtttttttttttaaattttaaaaataaaataaaaaatatttttttttttgttaatttcttgtcatttttatttttgtttttatttttattacttttttttatgtgagggctgagaaagtaaggtgaaagaaaatggcttgaagtctaggtccgggtccacggttaggattctaggttcgggtaggagtttttattggaccacttccagtatttttaagtctattcaaattcgatataattatagatgggatgttagattttaccatctggtctgatcaaatttatttgtagttatccaaccaattcaacatccatcagatatgggatatatttcatgtacatctatttttttaattcgagtttatctaatattttagaactaatattttttttggatcagatcgaatccatttaatattttagatctagtatttatgggattgcacaaaaattatcttaatctaaaataaataataaatgtttttatttaagacaaaactttaaatggagggtttatttaaaaaaattaattaattaaaattatttttaattaattaaaagggtttaaaaggtatattaaaataaaagttcatttaatgtaattaaataaaattattttaattaattttgaagcttacgatgatctataaaattacaaaaatgctcttattgtgatagggattagtttttgtaatttattttctaatttcaaatattaaaaaaatagaaatacccaattaatacccgattcatcatcattgtttattttttacttttaaataaatattcattaacagttgattaataacatgctcatgcattagtgaataacatctctctctctctctct

SEQ ID NO: 17548 - DNA, 5743 bp, Cannabis sativa
  modified_base (2870)..(2872): a, c, t, g, unknown or other
tattgcacattttactctattgtcttttccaccaagtagatgaccttgagtttaaattttacatctttccttcagtaatctaatatttgttgatgctattgttatctcttggtgtttaagataccttcataagcttttacctctaataattttatgatgtctctttttaacttcttattgtggattctattcattacactacactcctttttatatgatggcatcatcctctccagactcatttctataaaaaaacttctctctaaagtcttcacgtacaatattcatacttcttgccatctattttatgagagtgtaaattatagaatatccaacaagatagtacttgctccttaaagatccattctttcatccttcttaataagttagtttcgtaaaatatcctatcccactctagaataatgtcaactattctaagtcattccttacttccaatttgttgtgcttcatttcataaatatgtgcggagattgattcttcaatcgttcgtagacaggtgaaagtttatgcgtcagtatttggttggaaactggtacatttcatcatgtgcttcaagttgcactactagtgctgacaatctattgtgttgagcatgagaaaactctttaaccaatcgtcttagttgtgcttgtcatcctgctaatgcccctatcagatcgttagccttaaatgctattgggttttactaaacatcaaccatctatggattagcggaacaatacatccttatgccccacctttattagtcgttcctctcacattgattctaactgatcttttagttgtaattgcgagttctagtttaagcctaaacttgagaaacgattgatttaatagaatcaaatgagtttcattctaagtagagaaaattacatgtacatatctaaacttatcattgtcaaacataactattaatgttctatttatcaaacaaagtgtgatgaactcctaatataatttattctaaatgttcaagaaaggaacacggttcttcctagttttgattaaagacaataaataaatctaaaacctatccatcttctttgtaaaaagtgtaataaatcataagggtgaggatactcttgatgtctctaaccaccacttcaaatgaggctctaattctaagaaatatatttaacaaaaatctgtgtatcacatataaaactattaatggtaataccaagccaattaaatctaacacttacattatagtgagagtgatcttttcattcttctgtatgtatggtgtgagtatctttcaggctaatggagtatcggctctgataccaactgtaacaccgtaatattttatcttattttacaaaaatactaatttagatgcattaattgacaagatttaaaactgtttcaaaatacgcaatgagttttataataaatatgaaaaagggcgaatgatcattaatattaaaaacaaaataagtagttgagtgcggtttcaaaataaatttacacatcccattgagctcatattactttactatataaaaacaaaaccaaggctccaccggcattttggactgtttgctcgtccatagcccctcgcagtatacatataagaactaacccagctcatcaaacttacattcaatcttccatgtctttaactgataacaataagaaataattctatacattaaaaattatattacatgtgtccatgctaatccaaaatcataacatcatacgtagagatcataagtcttatataatactcatagaataaacataatgctatgaaataatcatatcacaattatatcataccatttatcatatcatcatcatatacatcactcagatttatattggccctacaataacctgggcacatttagccctacccttgctatagaataaggtatctctacattcaacagcagtatcgcccgattataccttagcataacaatgtcatacacgaattagataaatgcaggatagagtatctctcaattaaatgatcttatcccgtatcgtaccccctaatggcccctcattagtacatgaggcattagcatacaaacatagaacaaacaacatacaacatataacgtacactatatataaattataccaaccataatatacattgaaaagttcaaaactagaggatagtatcttcttgaatgttttacaaaatttaattctctttccaatgacactaaaatcttagaaattagaattatattcagagagatattgcaattttaccaaaataatttttaaagcacaacattcaataaacgaatcacaggataaagaagaaaactaactttttgacataatatgactctgaattaacaaaaggtttcttcatgacacttatggaaaattgaataaaatttaaaactatatatagatcatcaaaaatggatgagaattgagagagttattatattttatgtgaaagtgcttttctagaatatgaagaaaaataaattacaacaacagcagaaacataacacagaattggtaaatagtttcttcataataattttagatcatcgaataagttttccaacgatacaaaaatttctgaaaaatggatcaatatcgagagagatatcgtaactttcaattttgatgtctcaagcccgcaagtcttgattaaaaatccaaaacattaagaaagaaggtagaaaaataagaagaagtatggaagagttaagaggagcaaccatgaagatgaatgaggctttgaataattggtttggagagaaaaaataaaactatgatagtttggagtttgataaaaaaaaaatcctgtactgaagagtatgagatattgtattgcaatatgcttaggttaaataataataataataatnnnaataataataataattgtaataataataatgctgaaatattttttttttgggaaatcagcaagtgttcttcattattccaataacacttttagatttacagactaaacagtacccttttattcaaggtcctgaaaaagtgctctatatagtttacaatgtattaaaccatgctaaatcttctaatgatactttgtgaggccagacactatgtattctacttttactagtatctttcaattgttgtacaatagcattcagattctcatctatctgctgccaaaatttcctattcctagctttccaaatgaagtacaccaaagaagtaagagtagctatcataaccctcttttagaagccaaaaaccttccttcacccaatacttttcaccaagctatccaaccgggttgctgaagccttccatcccagccatgttttcatttgttgaaggcaatccatagcaaaagggcattcaaagaataagtgatcacatgtttcagcacctttatcacacaacaaacattgcacatctgcagctactttgaaccgaaacagcctttcttttgtcttcgatcttttttggattgtaagccatattacaatgctatgtttgggagtactaattctaccccaaacttccttactctacttcacttagttctcattgagacataacaacttatatccttcagcgattctatatctgctttgaatgaaagaggaaggagtagttaaagttaaaatggtacctttcaatgcaactatcttcctccaataccagctaccttgctgaggagctaaataactctaccattcagcttgtttgatgtatacactatggatccatttgacccatagattgtcctcccttgtttcaattgcccaaacgtatttaaacatcgctgccttgttccattcatcaactctcttaaagccaatatacctcctgctccttaagcttgacaaatgttttcccaagcaatttgacccggtcctgccatcaatcactgccctttccataagaatgccttacatatggcttatatgtctttgataatcttctttggaagaagcatggtttgactccagtatgtatgtatggtgagtagaaccgaattgatgaccgggaaaagaaatgtgcctggtgctccatgttctaattctgtgagtcatcttgtaaactagtataccacactcctttgaggagagtctcttagggctgatagggatacctagataagtgaatggaactacacctctctggaacctgatgcatccattatacgttgtacttcagagtctgacattccattgcagtaaatagccgatttacttggattaggctacaatcctgaagtttgtgagaacagttaagcccttgtaatagataatagatgcttttataatctccattgcagaatagaagaacatcatctgcaaaataaagtgatttagcttcagatccttgcatttatcatgaaagatgaactttggtttgtgcccaactttcttcattattctggtgaggtattccatgccaagtacaatgattaatggagacattgggtcgccttgtctcagacctctccttgcagcaaagtagccatgaagagatcaattaatcataagtgaaaatttaggcgagcgaatgcataccataatcagctgaatgaaggaattagggaagttcaaaccatgtaacatttcttcaataaagtcccactctaccgtgtcataagctttctgcaggtccaacttgattatgcagctagattttgtcagcttccttccataatgacgaacaagatcctgacaaatcaatatgttgtgggcaataaatccaccttggttttgtgataccaagttaggaagaaaataattgagccgtgagcaaagcaatttagtggctactttgtatattacattgcagcatgctattggcctgtaatccttcacagtgtttgggcatttaagtttcggtacaggtgtaagaacagtgttgttaatttctttcaaaagcaacctgtgttaaggaaagaaattatggcttctactatctctactaataatgtcccaatttttttggaaaaggtagcttccaaaaccgtctggaccatgggctttaattcctgggattgccaacaccatcttcttaacatcttctctagtgaaaacaattgtgagaagatcagctttgtctcgtgtcaacacatttccttctcttataatcccctgcttaacattcatcctattatgcatacaagtgcgcagtaaccgcaaataataattaatgaaagcatcttttacttcatttggcttattaaccctcttcccgtcagcattggtgatagatcatgctaagataggccaccattttttctcacgagccatatattcccctaatacatgatttaccacaagctctgagtcactatagatctcaatgtattcaacacgtacctatcgagcaagccttaacccaacaatgagtgcttcatactctgcctcattgttgaaggctttaaaccaaaatttaattgcttcgtgtaagggttgtcccataggtgatatgagagcaattcttgcatcgaatagctgatcggtggttgatcagtctgcatgtaacttctagataggcttgtcttttctagtttgtcctcatagggatgcttattctatttctttatttggcttgggattgtcttttgaactgtctgattctttgccagtgcatttagctacaaaatctacaaaggcttgcccttttactgctaagcggggttggtaagttatttcatattgacccaactctatatagcccattttgattagttattgagaagcatcgaacttttcctaaatttggcgtaatg

SEQ ID NO: 17549 - DNA, 6597 bp, Cannabis sativa
  modified_base (1415)..(1415): a, c, t, g, unknown or other
aggtttcaatcagacaaaagtttcagggagcaaaatgtttatgtaactgttatgaatcattaaaaatcagaacaatgtttccacgtatgtaactctatctacatgtttctttatgatttaatatgaacaaattcaccattagaaatttagaaaacaatgaaaatacatcaggataaatattctactatagtattgatataattttttttttagattatacttgagttggattgtttgggaactcctattcaattttttgagatctgtcttttatggatctgaaaattgaagtcgggacattagttttatgcaaattaaactgcatttctggttgaattttagtttcatagtaggttttctacacttttttttttttcatgaattcgaagcagcccctattttgattgattttgatcatcttctcaggtgaagtcgccggaattaatggtggttctctttccggctgaattttcgtttgcgttgggttgctatgtggttgcacaatagttacccaagaaggatggatcttgagttgaaggtgtgtataaatagtatttgtgtaatatttactcaattaccaaaaatcttaagatctgttaactataatcaatcgtattattgttagttagattaaactaaaaatatacccgaaggcaagttataatacataaaataaaaacaagcctcaacctacacagaaatactcaacctacacagaaatagtaaccataatatcctcaatacaatatatatatatatatattatatataaatttcaatgattatatatattcatagtatttatctaacttttaaaattattttatgaaattatagcttggtatttatgaatgtaatataaatctcacaaatcattaaataatgaaacaaagcacacacacaaaattcctttctttttatttttttttttatttttttttatgagacactttaattgttttgaaaaatatactgaagactttaaagtttaaatgtagtttttgttttgtttggaaaataatatgaaaccaaatctatacttttgtgagtataatattaaatataaatatatattgcaaaatacagctatataattaaatattttgtcaaaataaataaatatattaaatatattgcaattaattttaaggagaatatataataattatgttgcaatatttgattaaattcttgctcaacctggaatattgcagatttatagaatatcattattaatagagattctccataaatatatacatgatatcttgtaattaattgtattgtatatatatgcatagcccgcacttgcccttggcttttattccaaataaaaaagaaaggaaattataattaattaagtgtaaacaatattggagttgaagagatatcttatatatacatatatatatatntatatatatatatattagtatcacttttacagattcagtaatgattctctcaccccaccccaccactgatcttaatttgttctaattaatcttcaactttatggcgactagtactacacacaataagtccacatctaattcttattctaaaattctcacatggagatgttttaagggtgaagatgtgtgtatataaatatataattaatatatttgagaacaaattaaatattatatgtacaatcaagatgctagctagcttcttaaattataataaagaaaaattctttgtgcttttgatttgacctcatgcacgatctccattctacgataacaataaactttttatgtatagctcgcaaatattaattccataggataatatatacttatatgcatacatatataatatactttatgttataccttattaatatgtaaaaagataatatatcatatataaaatatatataaaaattaattaattttttaaataaaatcccatacatcttattacatactcactttcatcctattttccagaccacatgtatttatacagctaatgtatactatatatctaaagtatctttttactagtgttgattagtcaaattatgttactcgttcatcagttaagtctcttaattataatagagtcatgaaatatatgatatattatctacagatacggatggaccaaaatatatatatatataaacgtaaaataaatataatttttattttggactgtatttattttaattaatttacctataaaaaagaaaaactagaattaatattgataaattgtgttcatagacatccacacttcttctcacaagcagggaattccaaattcaactccttcctccccatatataaaaaaaaaaaatatccataaatttaaagtgtaggcacattttttttttacttcaattaggactgaaaaatcagatatgaaagtacttaaattttttttgggtgtatttaaacatatagcaacagctagtagtaatgaataaaataagagaaccgaaatagtaatttgtctttataaaataagtaatgaatattttaaaataaaataatgaatttaaaatgagagaaccaaaataccaaaatagtaatttccctttataaaaagttgcagaggatattatcaaccaatgaagcaccactcacaaaaatactataatataaaaaagttaatcagggaattttgtacatgtataaataatgtgttattctctgacttgactcattaaaattaaggtgaatctggctttgtgttaatttggtgggatataatataagttagtgacccttttatatatggtgggatcatttcatcaccataaataatgctgaaatggcctccttaaatgtcttatccaacataaatttgatctcatatatatgagttaatgttgatgataatgaccccccaaatccaacaaaatctacttctcatcatatagtgtaattctttgtggaacagcggctgcatgcctttgatcatcaacttcataattctcttaaccctataaaatgaaaaaaaaaaaaaaaaaaaggaaaaagatatgtattcgatcgaatatgccatttctgttactttgatcaatttgtcaacttaaacataaatctttttttttttttttggaataataaatctttactttatatccttcggtggcgatagtgggacgtgttattttgacttgtttctttatatatatttgaccattttgatcgatatcaaattaaggatcgagagaggtacgatcgagcacttaatccattgtggttataatttgattctcaacaaaagaacaaatgtatagattaattgaaaatagttggatagtgattgcttataatcattataacttatgtcttttagtatttttattatatggatataaattttttagacggtgtatgatatagttgaatttattaccttttatttttcttaaaaaaaaattagaatgctgaaataaaatttcaacaagcttatttttccgcatatgcttgttttgaaatttatatgcaaatgcagtactttaatgatataatattagtattttaaataattatcaatttcttaattttttttggaaaatcccgtaaataactactctgtttttgaaagacatgcataagaccatttttaatagatgatataaaatttgtgttatatttgacatcaaaaaataactttgtaatatatttgcattaatttttaatattgtactataatatattatggaaatattctataactaactgttaaaccataatgttatttcattgtattttcttgcttttattgtatggtgacatgtgtcccttctttggtctccacttattataaatatgtggtactatgtactcttgtattttgaggaatatcaatacacttttaattccttctgacatggtatcagagccaaaaggctctccatggcttcaatagagtgtacaagctcaacaccacaaatggaaaatgaaaatacccaaaacccccttcaaaaccctactatcactaacacacaaaaccctaacaccacaaccgcctctcctctttcagcttcatcttcttccccaaccttacccccaaatttcccctccttcaaccaaacaatttcagtcaagttagatgataccaactaccttgtttggagaatgcaaatgcagaatctaatcatagccaatggtcttgaaggctatatcgatggaaccgtggtttgccctcctcagtttcccgatgaaacgtcgagccaagtcgacccttccttcacggcgtggcacaggtacaaccgactgttaatgagttggttatacgcctctctctccgactccatgctcggccagatcgtggggttcactactgctgctgaaatatgggtttctcttgaacgcacgtactccgccgcctcctttgctcggagctccgactttcgcacggcgttgcaaaacttgaagaaagacgaactcagtgcatcggcttacctccaaaagctcaaaactctctgcaacactcttgcttccgttggagaacccatctcctcacaagaacatttgacttacctcttaaatggccttggaccggagtacaatgcctttgtcactccgatcttagcccgaccagtcaaacccaccatcgaagaggtatacacgcccttcttctcagctatgaagcccgtttagaccgccaaatagctgctgcctcattgagctcccttcaagccaactttgccaacctttcttttcccaaacagggacctaaaaacccttctctcccagccacttctcaacccagattatcctcacaccctcagtcaaatcgtccacccaatatcccttcatttcatcaaccccgacacaactatccaacaccccctcgatctcccacaccctggttcccatctggttctacccgtcccccttctagaccaccacgatgccaaatctgcttcaaaaccgggcacacggcattcatgtgttaccacagaactaatctcagttttcagcctccaccacaacgcccttttaatgcctatttcactcaacaacaactacaaaccccttccccacctctgcctacttcaccagccacaaatccaccattacttcccactccttcatccataagtactctcatggatcccgcttggtatatggactccagggcttctcaccacttcacccccgatttgaatcttcttgaatccgccactccgtatcatggtaatgaccacattactatgggcaatggtaagttttcttcaatttctcatgtgggtactgcatatctaccatcatcatcatttccttttattaaactaaatcgtatttatcattctccttcattgtctaaaaatctgcttagtgtctcccaactttgtttggataataatgcctatgttgagtttcaccccacttactttcttgtcaaaaatcaggccaatcatgaagtcattctcaaaggccttcttgatcaaggcatttaccgagttcactccgcccctgccttcaaccttgctgcctccccacaactcctatacacttccaagaattccattgacttatggcactctcgcttgggtcatccagccgctgatattgtttctcgcatttccacttcttgtaatttttcttttccaagaagagattgcctaaacttttgtactgcttgtcaattaggcaaatctcataggcttagttttaacaactctgtatctcgggcttcaaaaccctttgaattaatacattctaacatttggggtccggccccggttacttccattactggtgttaaatattttctcttatttattgatgattacacacgtttcacttggttttaccttcttaatacaaaagatgaagcatttaacacatttctcacctttaaaaaccttgtttccactcaatttcaaagcaccattcaatcggttcaaaccgattggggtggtgaatatcgctctttgtctcggttcttcacccaacatggcattcgccatgatctctcatgtcctcatacacctcaacaaaatggccgcgtagagcgtaaaaattgtcatgttgtcgaaaccggtctcactttgttagctcatgcccatcttccctttcatttttggccttacgctttctccaccgctgtttatttaatcagtctccttcctactcgtgtacttcattatgacagcccctattccttactttatcacaaacctcccaactactcattactccgagtttttggctaccaatgtttcccctttctccggccttacaacactcataaacttgagtttcgctcctctccttgcactttccttggctatagcagcaaacacaagggctacctttgccttcatcccacctccaggcgtccttttatcactcatcatgtcatttttaatgagtcatgttttccctttgccactccctcggccacttcaccaccctctcatgctcctcactccgtcattacagccttacctctttcggttcctaccaccacaaccattcccaatgtaccttcacctacattcccacacaccccttcctctcattccacttctcctccatccacccgaactcagtcgattcccacttcaccctccacatctcatgttccttctcttaattctcccgttcatacaccctcctc

SEQ ID NO: 17550 - DNA, 2219 bp, Cannabis sativa
aatattaaaattttagtgttttttttctttgaagccaaaatttttagtgtttaatgtccaaaatttcagtgttgttaatgttaaatacaaagtttcaattttttttcttgtcaaaaagaaaaaatataaagaatagatttttcagctttggttacttaagaatgaaggtataaataattaaatcaacaggaataattctcaactttaattgcttttttctttcttctacttttaattaaaccttttaatgtaatcaaaaatcgtgactgtacatatcataataaattaaaattctacaaatgtcgagctaaataagacaagaaaaaactttgttgttattcctcatatatctttacaaaagctaaaaaggtttcatctttagcacgaaaatcgagcaaaaatcatattaaactcgagaagtaatcaagatttgaattcatccatcatttaaattgacaagactacaaatgtaacatcctttcttcagtaaaatgtactgtaattctttctttctgttctagactagagtaaaaactctaattctctacctcgttaaactactctatattgcactgtaatgagtgcaaatctacagaagttatgggcacctttatacatgtaaaagctaaaattactcaaaagaaaattaatctgcaatctgcaaaagtactacaacaaatgtaatgcaattacattacattccttgttttactttttcgtttctgtggttttcatgaaaatgaagcatgatcttgctcctctatctttatgacaagaccctttaggatcatccactttattctgtgtattgtgcagattggagattgtgagatcaagatcaaaggtgaaataaactttgatccaaatgtaacagcaacaacaacagcaacaagaagatgttatggtctaaaatcctctgaaaaatttaccacctctctttcctatgttagctccaatgacacttgatgcaagaagagatttggtgtcaggtctccatttgagctctttaagcatggagaataggctagacaatgcaggagagatttcctcatccttaatgtttttgcagcctaccactttgagactcacaatctccttccatgaaaggatcactgactctagaccatttgtcgttagcaatgagcatccttctaaagacaggatattcaccctcctgtaatgacacaaacacctcacctcatattattatactgaaaaaggtcataatccctgcatattatatttaaaatgattaaaaagctgttatgttaaatggttggtgagtactattgagtgtatttcttacacctttcacatggatctaatcataataagaccattgggaccttgcaataaagcaaaatgaagatgattgaataatcatataattattttagcgtcattttcgccaataaaatagtcaatctctagaaatccacctaatgaattaaaagcaagcaaagcaagataaaccctttacctgcaaatgcttgccaaaatgaacacatcattctccaatccccaacagtcctgcaagacaatctccctaacagccccacataaggtgaacaaatcactagctgtcttcttgtcccttagctgacacttgtgaaaatgcaaacgctcaagagctggacataaaccaaaattctcatctgtttccagactagaatcaatctttttacaagacacaaacttcaaagtcttcaagttctcacaatatggaagtgcagataaccacccagcttccatcctatgatcacaaatgatcaattcctccaacatttgacagcattgcccaattgctttcatcccaacaaagcttccctcacaaccattgagctcaagcttaactagtcttctacacccttgagccaaaaatgtcagcccaatatccgaaaccaccgaactataaaacccatttaaattgccaaccagcttgagtatttgcaaattcttacaagcagatataacatgtaagaggttgtcattgcacttgtgcaattccagatcttgcaaagtcgagcattcttcagctaaactcagcagacccagttcagtagcaccaacaagtgccactttgccaagattagggcaaccgtttgctaattcccgaagccctctatcaataacctcgggtgaaagcaaatgggtttgaaaagcttcggattccggcgaaaaatgagaaccgatgtgcaccgaaaacattttgtggttca

SEQ ID NO: 17551 - DNA, 8689 bp, Cannabis sativa
  modified_base (8378)..(8379): a, c, t, g, unknown or other
ttttgatattttgattttttttcacgtataattctatttagttataacctctcaattagaatattattttcttggtcctaagtgtattcttgaatagaggttctgctgtataagttttgttttatgcattattgaatgtattttaggctccgtttattgtatttttattttcaaatgttaatatttatggagaccaccaaatacataatctcataggtagggatgtacacagggtgaaaaattagtagagagtgctcccgtatctccatccctattaaggattttaattcctatgatgggtggaaaatctcttagtaaaaccgggaatctcctaatataaaaataaaaaatttattaatatttaaatgtataaaaaatattaaactaaataaaaattaaatattacacattatttattttttagtatactaattattattcaaaatacaactttaaaaatatactaatatactaattatttatatcctcgctccatttcccatttagactgggaattcctatcccattagaagtggattttcacgtacctatccctattgagaaaatgtgcatccctacttataagtctcaattaaaataagtaattgtagatttgtaaattgtaattgcactaattaaagtaaatttgtatttgcgtattttgtatcaaatgtttgagaaaaatgatgtaatgatgtatctctttatgaatatttattaattttttataataattattatagagtaaatactatttttaatattatattttaaaaaaataatttattagactttttattttgttaaataataatttaaattttatgtttttcaaaataataaaaaatagatcctaatcttaatttttatcattttttaatataactaagctaaaatcaatttctagcatgtacggaaacaaaaagaatataacaagtttagtcataaggtgaagttattataattttatttcgataaaaaatcaaattaagatcgtattttgtactactttaaaaaatataaatttctattatcatttaataaaatataaggtttaattattaacttttaaaaaatacaaaatgatatttatatattattaaatgagaatatgccaaacctaatatttacttactataatacaatatgatatttcgtgataatgactagacaacttatatttaaaagagtaatttatcgcatacataattaagtttaatttttaattgtagattaatattcaagtttaatttttagcagtaataatacttaagttattttttttagaactctatacctacctaatcattaaatgttaagtcattattcacgtgttatttttgtatagtatatttaaattaaatttttttaacaaaataaaaatttaatgacttggaccaattaaaaattgtcacgtgacaatttacttaatacttaacatctaagtacttataaaaaattaaacttaaatatttatttataatttaaagttaaagttaaatatttatgtcacaaattactattaaaacacaattttttttaatagggataaaatgaaaacaataattacttctgaataattacttctgaagctgaattatgaaaaaaagagaatttaaataataataataataataataaatgttataaccttttggataagaggattttgttgaaccagagagtgaagggcataatcggtaatccgagagcagttgatgagagccagagtgttcaacctacctctgctcatggaagctattcgcatcaaattctgatcagacaatcgacggtttagaggcctttcaacgacgacgtttagccacggaagaacgtcgtcgtttttgacacaatcccttagcgaaacgcagacttcactcattgctaaaagctctaacaccggaagataagctaaggccaggaacagagcttcgtggggaggcccaggcccaggcccaagcccaggttctggctctccttcactagtttggaaaatctccattgaatttgtagaaagaaagagagtgagtcatgggtttatatgtgtatataatttaatttgttttcttaatttgcaagctacccaaactctacttgtcaaaacactgtccatggaaatacaaaaaatatatttatgtttattattattttcttattattatttatttttctttattgtaaactaacaaaacaacaaaagcaattagagcatgtttggtttgacagagcgaagttgtaatgaaattattattaacattatattgtttgttttaattttaaagttttgtaatcactttacatatcatatattgtaatatcctcgtgaggtgattacattgataaaagacttcttttgccatgtttactgtagtgttaaattaaatatcataataccaattttattacaattttacattacctaaatgtgtgaataataactggtttttggatctttattgagactagactagtttagttgagtgggtaattaaaatttttagttctcgaacttttatatgtactacattatgttgtttaaacttttcaaatcattaaaagtttttcttaaactatagatattgttaaattaaagacttttgtacaattttactaacgaaagcctaatgtgaatgaaagttcagaaaacacaatttagaacatgcaaagttcattcgagaagcacaatttcataaatatcaaaatttaagggacacgatttaatacatagacaattgacaagttagaaaaattgaacaaaatcggacagaattccttgaattcaataagtgacatatgtggttagtaaatttcttaatttaaaatatgtgagatccgttattgagttgcacgaatagcgattggaaaccaactatagtgttgcccttttatcatttctctttaatactaacccaaattagttcctcaaagatgataaaatgctcaccagagaagaagttagtgacatccattgtattatcatagcaagccagccttacatttttcatgctttaattctgagaatcttaagcttgaggaaagtgaaacatgaatacaaagatacaaaaactatgacatatggaacttagatgcctatgaatgtttcaagactataattttacatgtaattaaattgatatttcagatttgtaaaaaccaagcagacaagcatttatcatagaacttataactattgctccaaaggctcaactgcagttttgaaaagaaggacgtaaaccttatcgatcgaaaaatacaagaatcccccgagcgaatgcgtgacataagaaccgaagcttgttcctacaatgcagtgccaagcagggccataggatgagtcaaattcctgtcaatgcccaaaaaaaaacatctcacaatgagtatccaatcaaagggtagtaactagtaaccaacttatacacctattattttctgttactagttactacttatcctaaaatgaggttacaacataagtggttgaaagaatttcaaggtcttccatttatagttcaaaaacctcatatcatgtgcatttatacaatttgattgaccttcaaacttgggataagcttgaaaaagtgtagtgtggtcttacttacacacacacttgttatttaatagcttagctgcattgaaaatgattgagagaagtttctatacagttgcatttatttgccctattcccttaaaaatggggttatcagtagacaattactgcaccaactaaaatgttcaaaaaatccttatttattattattattgttacttttgtcagaattcagtaaatccttattgggcctacaaattttaataacttatagagagctcatcagttgggtatataggatctttctgcaacaagaaaaatttagggaaaaggtattataggtaggctagtggttacaaagctattgagccattatgatttgaagtttgagaaatactaaaaggtactacctttaggtagtactatacaattacaattaagtatctaattttatttgtaaaatattaataactaatcataaaatactatttttagataaataaacactattgatgtccaataataagactctttaaaattaatttagtaatcgttctagtaaaatagaacacaagttgcattaatttcgagtattgttatctaacactttaaggtacttaatactatatcgacataacaccctattgataatcaaaatgtgcaaaattccataattaaatgcattgataagagtaagtcactctactaacatttttgttctaataccaagcaaactataagcaagtgagaaaagactgctatgctttttaagaagtttggttaactaaacttaagaaagatatactaacataaattctaaaaggtctttgttaccaaaaatgatgaatcaaaaccacaaccccaggtaaaaaatctgaccctgaaactcaagggacaacatacattaatttgaggttgaacaggtcaaagtaaacacaaaacatgacccattattcttgtgaaacaaatagtaaataaactaactttactaaaagttaaaacagaaaaggaaagacagataagttgtcagatatttgtctaactaattaatattaggtttagaagaattacatttgcaaattaaagtaaaaatagcaacttggtcaagccctttatctcattaaattctttttaagaatctacctcagattttgcagatgtcagatacttgagagaagaaataaataatatatatattaatcctcatttataagtaaataataaactagcttcatattcatatatatatatatatgaataatataatatattattcactttcatgttattactataaacaattagagcaagaaaatgacacaatcatgatgagaatgaagccaagttgatcttggagcttacttaaggacaaaaaaaaaatctaagataaaacaattaatgtggaaactttggattagaaaaaaaggaaaatttgttaaactaacaagaaaaaattgttacactaaacacatgtaaaataataaaaattataaaataaccctactcaattaactttaaatctatagtcataaaaatcaattttttttttataatgactattttcacaaaacacttaactacacaggaaaaaattagcaaaataaccttattaaatttataagtcttccctcaaaaaaaatttataagtcttcatgttcaaaaaaaaaaatttataagtcagtcactcacactataatttatagttacaaaaatagatttaattttaattataaaattttatttccaccttaaaaacttataaatacaacttattttaataattttattttatataaaatatatacatttaattatattaattttttttatatataatttaactgttttttttttctttgtttttctttttacagaaaatacctttaacataaaaagcagcttcaaaatccatatcaatggatgaaaaaggaaagaagttgtctttctttgaacaaaacataaaaatctcaaagtaaatcaaaacaaacaaacaaacccatgaatgaatcgacctcattaaacaaaacccaaaaatcaaaacttaaaaaagatgaattttctgttcaaagttgaaacctttttaagtgcgagagcgagacgtttactgtcgagcttgccggaagccatggaatcaagatggtcacgagcacatcgaaaggcttgactctgcaaaggaaaaggcatatctgaagctctgacacgaacattaaggttttgattctgttcatggtgttcctctgcttttttcttctgaatcaagctatggaggaacttgcttcttctctctaactcctcctcagctgatctctccatcaatttgtttaactcaaaactcgttcttgccttgtttaattcactcactcagtctcttcatatgatcagttttgttgttatgtgtctcagttgtttgtggctcgaacagcgattttgtcttccatatgttcgaagaaatgtccaatagaccaaaaaaagaaaagtgaaaagaaaagagaagagaagagagagagagacaaaggtctcgatcgtaatgtaatgtattattttatttagtcatatatacttgttttcttctcttttgtttgtttatgtttggtttggtagaataaaatggtaaatattaatgtatagtacattaaaggttggtttaataacttgtattaattttattactattatatattatatttttatgttaaattttactttatatttaaatattaaatataattggataattattttatatattaatttttttaatttttttttttaaatttacggtttgaattaatttctccaatgaattttattttacaataaaaaactttgtgcaaataaaaaaatatctttttaatttaaatttcttttgggagaaattagctaggagttaggatttcttgctatggaatgattgagataaatatatagatgaactaaaaaaaaagtttaatgtataagtaatttatagttaagatgttacaatattttatatatggtaattaattaattatttgatttataaaatataattaattaaaaatattttgattatagtccttagttaattactaaatattttaatttttaaattaattgttaaaatattctgataattaattgtggcatagatactaaaatatttcacacatataaatataagttacctgtctccaagctcactacttattctgtaaaaaaataatacgatctatctaatagagttcgaaagagcttgaaaatctgaatatccacacaaaccaaattttattattttttgcaaatcctaaaatcgtgtgtaactgaaattcaaatgatcaaaatatgttcgatttaatttcgtatttcatacacaatcatatatatatcatacataaaaatatccaaagatacacatattatatagctaggtcctaggtacaaataaacatataataatttttttaggtatatttttatataaatatggttggtatatttacacatcgagctagttattattaattatgaaatcatgaaattgaaattattggttgaagggtgggagtagtagggactgtattagcttaggtaataatcataattgatcataatatttcaattagctttttaaaaggagagagtaataaatcataccaaaaattcgagcacaatttgtcaaactttctaaaagctcctttaaatttagcattaataacaatcattaattactacattcactcatcaattatgatcaccttaacttaatgttcatataattgataaataaaaatgttatttccatacacagatatataaactgttatttttgtttttgcatgcctccatcccaacaaaatcttcttttttttttctttctttttaatctatagatatttgtcttgtttttcttattttgtaggacaaaaatatgctaagaaataagaaaattttgtatgaattgaaaaaaaaattacataaataccattaacatataaatgtttttacttttaccttttgtgtttttttatttaaaaaaatactttttccaataaaaataataaactatttttttggttgttttataatttatctatagttgtatcataaaaaaaaataaatttctattatgtcttcgcattcgttatagatttcttggcatattagagttagtcccactgtagagataaattgtcatatataaaatgaatggactactattttcattgccaaatagtttttgagatgaactttattcatcttatcccgaattctaatatggtatcgtttgtgagcaaacaaatacttaccagtgttgggtctttgatctgttttaaaaatcttcaaatttctcgacgtgtacatccacaaatttctcgatagtccggtcatggtctattaaaggtcgttcgttatacccatactttttaggtctaaacgtgagaaatgtgtattaaagttaatctcacattgctaatgtgtagagataaattgtcatatataaaatgactgagctactcttctcattgtcaattgattttgagatagaacctcattcatcttattctaaattctgacaagaatgatctttggttaacagaatttgcaggtagtgtttattcataaatttgtcgtaattttaattatgtaacatttaaactttttaaccgttctataaattttattacctataatcttattaagatgattctttttaacggtgatttatctaagtttgtgtaagtcacttcgacttgtttttaggcattgccttattgaacatttcatttcattaaaaaaaaaacccataaatggttttacaaagttgtgatcaaattttttttttttaaaaaannaataataataataattaaaaattgcaaaggactcaataaacaatgtattaagtgtgggtccgtactaatgagacatgaaaacgataattgcggagaaaaaaagagtttaatttgatggttcttccaaacgacagaatcttacttacaatgtcttcattttattttattttatttggactttgactaaaactaagtaagagaattggaaatggtgtgtgggtcccaccattattaccacatttcatttattattctttttctacttaggtgtcacgaatttggtcatgtcctcttattcaattgtcaaatt

SEQ ID NO: 17552 - DNA, 4220 bp, Cannabis sativa
ccttcttctcagcttttcttactgacttagtagcctcttactgaatatgggccttatagtccatatactttcccaggtaattagtgtcccacctcttttcctcaacagataacttggcctcctacttttcacgagtcatgtaagcgccgggaacaatctgagcttcggcctgttcaaccctgttgggtaaagcctcattcttggaggctaaagattgaaccttggcacggagttggcttaactctatggtcatgttcaccgcttcccaagtggccctcaccaggaacaacaccatctaaaaaaagaggacaagagtaaattcccagggttatcccgagagaaaataaaaatttaagacttacccctgagtcctattgtttgacggctatcgatagggtgtaagggtcagtactactgctcaccgcccacttctctgaagtaagttcactgacactacgaccaatgctatctctcatttttgccgtgtagggagcaattgctctacccaccacaggttccagatgttgattcaccatcagaaggtccaacacagagcctgggggtaacgattggcgagtcccctcagtaatcgcaactgtcttaatggaagacaaccaagttgccctcttctgtagagtaacgtattcttgctcatggctcttcctcaagacggtggccttcataagacattcatggtcgacgagtggcataatgggaaaggagaatcccagtgaaggagccttaactttgttgatggcttgaggtagatgagcggcggtcggtcaggcctgtggctaagctgggggtagagtagattgagaagcgactattggcgagtggcaagggtacagagactgtcgttgaagtgggggggacgcttgcccagatggtgactgtgagtggtgttgctgttcattttgtggatgttgctggtgttgtggttgctattgtggttgctgttgttgttgcaatggttgttgctatagtttttcatattgttgtcgaggttgtgacagagactgattaaaccatagcgtatcatccatcctaagttcctagatagaggatcttgctttttttacaataaggtcgggagaggaccccaactcccttcgtttcgatttcaccagagtcctttttgatacaacctcttacatctgatacaacctccgggactaagttttctacagggggaactacttaaaaggttgttcatccaaagaaatagggactttgcaaggtctctaggaactgttagacctccttcccccactacctgacgaagaaaggtcgagtgtggtacgcccaatcattgcggggggaggaatttcccaaacatctgatgacaaggaagtcgatgggggaggtggtttatgagtccaagaagcccttgttttgattttcctcttccctttctcacgggacttcatatcctcgtaaaccacagccttgattcgggtgttccccgattttaacattttggattatggggtgtctgcacaacaaggcaacgatgtaagcaaggaaccaaagctgtcaccagccacacgatcataataaacaatagcaacgataaggaaagaaactaatgtgaaagcttgtgcatgggcacgaccatttagtgaagtgctatagggttttccccgagaaaaagctaaaatactcgtacaacccgtgaagcttccgtattcttcaaattcaagcaagaacatggttgttagagggtcaacacttaaaatatttgatgaagtcccaaggttattagggccctaattattagatctactttctctatgtactcctccatgaggaatttacagaggtttctacctaaaaaatatttgttaaattctccctagttccgccgagacatgcaactcaggctgggggtacgaaaaatacagaagggcttgttacctcttcctgatgtactagcctatggtacctcagcgcaggcggcaacaaatctctctgagatttcctcttccttagccaaagggttagggttgcgtgacacccattcggagtatctatactcttaaacttagtgatcagagccgacctatggtgaagctcaatcatcactaagcctttaaccttcaattgctctttgcaaaaggccctatattggccctctttcctggctatctttttcgtgttgatgctctattggggaagctcagctacaaaaggaaaagaaaatgctaagtcacatgcaagaattagcagaatccgaaaacaaggcttgtaattaactattaaaatacctggaagttggaagctaaattgaagaggtggcaccctattaatagagaacccgaaggaaaagaaccaatattcccggagatcatgggtacgatccgttggcaaacgggacagtaacagttcaggtgtttatccagtcggaaaaacatgaacttagacatattcgtccttgtgggattggccttaacacagtaaaagtagaggatttcctcaatggaagtaacttccagtttattaatcttgcaaaatacatacaccccagccaatgggctataagatgaagggattagctagaaggacgcaatcctgatttttgcaattatatgcacaaagtaagtccttaaagggagatgagcaccgctagaaatgtgggaccaactccatgcactaaaaccatcaactcccgtggatgcagattctcctaaaatggagagcctgtgccacatcagaccaagaacgttacgaaggcccgcgacctcaaagtatgcttgtaacatcccataggatcggaagcagttggcctcctagtccatctcccacatagatttaggacaaacctaggccagtaagggaaaccccctctcctggtaattacgggtaaatttttctccgcggtaggcccatcttcagggatggtttctaaaatctccacaagctgaggtgttcctatggagattttggtttggtcttgtcccccaagagatattttagtagcctgaacagagtccctggcggccggcataactacattcgcaagacgttcttggttcaaatccatggaaggaagggtaaactttttgaaaaaatgaaatggatgaaaaggcaagattttattttttacgcacacagtctcgacgtaccacccaagtacaacccaggccctaacctagactaaaacctttctttccctaaataaaacatgctaagaaactcaaatagttttttagagcacttacttgatggaacagaaagagtagtcagtgattccaaaaattttgtcctaaaactctatagccaaccaatgcaatggtcgcaatcagcttgaatttcaaaagtcccctttgataaagaactttgtcagttcagttgaaggggagcagcatttgagaaaagcttagcacgaataaagagtagatgctgaatcaaaacatctaattctttctgcatgcaaaaaacagaacatagaaaaaagaaaagcagttgcagagaaaaagtgaagctttgaataaaaggattaaaaaaatactaataccaccatagacagtctttatgtcaaaaaggaaaaggaactccaccagatcaaccgcatggataggtcacaaagaatccaatgactagggaaatgaggggtcccacatgctgatcttacccacaaaaatgtcgaggtctttttcctcatgtcattcaaccgtcagaagcactcctcctttcttgctaagcacgctttaccatatgtgaaagagaacaaggaacacctccaagcgtaccgcgtggtcaacacacaaaaggaggaaaatgccataaatacccgtcgaagaatacggttcattctgggaggtatctgtgatcgcaaaattgtagcacatgtctgcaacaagtattgaagaaaatagctagcttccgtgacccaaggagtcttgaaagctgggggtaaatattatccaaattttccttttactagacacgtggcatgatcaagataggacacaatgtccacacaaggcactcacgaaaattatgagaaatgactcatagacccggtagtcgataagaggtaataactaccgggagcaatctcctttagtgaggaatctgaacagtgatgcaggttccagaatcttgggacacgtcaaatccttacaaaatagcactccaaagatggttacacctttttcttacacaggatcagatctcgtcccctgtgccagcccatggtagtgcgcgtacataccctc

SEQ ID NO: 17553 - DNA, 5461 bp, Cannabis sativa
tatatctttgctgctgtcttcgtgtagaaattctcttcgagaactagattatctcaccaattttttggttcaatacaacaaatatatatatatatatattcgttacaaatgcagaaatatgtatattataaatacaaagacaaagttaaaagatgatcggagatcccgtgtgctacgaagaaaatgatcggagctcctccacgtgcacaacgaagaagatgaccgatgctcttccacgtgcacaatgaagaagacggctagatccagtggtggtgaagacaagggtggtggtgggtttcatgggttgcgagatagagatgagagagatgagggtggtggtgggtttcgttggaggcgagattaatgagagagatgaggagggtgatggcttttatgggaggcgagattaaggagaaagatgagtgtggtgatgggtttcgtggaggagaggagggtggtggtggtcgtcgttgggatcgagagagagaaattagaagttgagatgatgaatgaaggaaatgagttataaagtgaagcgtgtaggtttttattgggtttggttatacacgacggtttaaaatgtcgggtatattatagtcgacggttttaaacagtcggctatagtatacccgacagttttaaactgtcgagtataactccaattaaaaatttgcgttttagcttaaaattgtcgctaatttccataatgagtgttctaaacggtcggggatatacctaatttttccagagggtttaaaacactcatttaaatttcttagcgatggtcaaaaaaaatatttttgggaccgtcgcgaattctaacttttgtagtattgaatgaatgtgagcaaatttaaagtatatacaatcgaatgtgaagtttagtaagaatttaacacctctcggtcttttatcgaacttttttatgaaaaatttgagtggtaaatttgagaaatgtgttgccagtaatgagaagactgcgtcaaagggattgaaatgacagatattgaagctgaagtattttactaggataatttgttatgttcttgaggctaatccaatttgaacgtgctagatgatttgcaagacgagtttagaagaacaagggtattgacaaaatgggattactttctcatggactctttattaccaatttctgtcgatcaacaccagagatgagattcttaatgggggttatttattttttgacaagaaacccgtgtatatgaaaccatatgggatctttatactgatttcactaaagatagggttaatagtgtgccaacatgggtccaaattcctggtttagatatcaaatattgggggggacagatctcttttcaagatagtaggatggttaggaactctaatgatgttggataagattaaaaagaacaaagttcacctgaattttgctagagttttgattgaagtgcagctcacacaagactttccataggagagttcctttaccaatgagattcagcaagatatttcttactcgtgaaatatgaatggcttccaataatatgtgagaactatggggttatagatcacaattcagctgtttgaaggaaaaaaagaagagattacaaaagtatgggttgagaaagaaaaggttaaaggaaaaactatggtagttgagactactgttgaaaaagattgggatggtttttagccactaagaaaaggaggcactactatgaaaagggcctttagaggcgattttttcgaccctttagaggtgattttgaagaaattcgcgacagtcgttgttccaagggttgcttgttagggctttattagtactatttttaagtagatttttgaagtgtttttagtaaattttaattttgtttttgtgcaattttacgtttttggttgtaatgtttttcaaaatttagtaattaaagaggaattgaacaaattcgagtaaatatatatatatatataaaaaaaaaaaaagataaaataagtaaagcattgtcgctagagcaccaagagaagaacttgtccagttggcttgtttttgatgaaacaataatgtttatgaaattcaagaaaaacaacattattcctagttagtttatacacactaataagattttttgtaacagaaggtacttcaaggatagaatttaaatgcaagggagaagcattagaagaaagtaaagtagctaaaccaatatgagaaatgtgcaatttcttaccatttgcaatagctagagtctcacttcatatttatggcattgcagaatcaagattgtccaaggaggtagatacatgattgttggcaccaatgtcaatataccaagttgaatcatctccaaaataggaaggataagaataagtcttattcacttgagcattaaattcaggacctagttctgtaggaaggctcgagggacattgaagttgggtttgggggtaacccaatttttattaaacatgtaatgacaaacagcgattgtatgaccttttcatacacaccttacatattagcctggatgatgatacaaaaccccttcaaaaacgtctcccaatagccttcttggaattctcagaagaattttcttgaccacctggaggataggatcgactataactagatcttggacacccaaaagccaaatggtcttgcatattgagggaaagatcatcaacagagtgatggtggccaaattgacttctatgagccatgagcaaggcttaaaccttcgcaagacttaaagaatcactcataaaagtgatgtcggagaccacagaattgtatttcagggctaagactatttaagagttagggaataacattttgctcaacaagattggaccctgcaacaacaatggagtcagcgagagtctacaccttatccgcacagtcggagatcgattgagcacccttatgaacatgcaagaactaacctttaagttgaagcaatcgagctcgagatggggtggaaaacttttgcttaagtgctttctaaacagagaaagaaatgatgaagttaggaacagaaccaggaatgccttcaggcattgaagatcgaagccaagatagtaggggttgatctttgcgcttccatattgattgaacaaaaggtttggttcactagtaaccaagaattgcaaaggagcagggacaccaatgaaaagaatatcatccagatcatgactaataacagttggtacaacctgcgattcccaagcaagaaagttagtgtgatcaaacttgatcgtgaggggagaagtgagagaaatggaaaaaggattccaaattgcagggacaaccgattgaggagcatcagcgattgaatgagctagctagcagaagtatttggattgataagatcgatttaaacaccaagtggaagtctttcttgtgaaagccattgttgacagaggttagtggcgattgataccatgtgaaaacacaaactaagtaaaagcaaaagagaacataaaatagagaatgggtaagaaaagcttaaccaaaaatggctagctttaatttttatttatactaactaagattacaccaagagtcaaaaaaaaaatacaagttgataaagttaactaacaacattaactaattctgattttaactactaactaactttagttgtaccgtttgcaaacgtgtaatatttgatttaccgaaaataaaaaaaatgaataataaataaatttcaccatatgcattatcctatatatataattagcttcgtcactttaaacaaaatttaaattataattcctatgctgtgattaaaatgttcgtgtttaaatatattagtcaaaaaattataatttgttatggcaaaatatgttattagtcacaatactttattgtgactaaaattaaattaatgacaacttgtatttaaatactatattttaattacaaataaatttttatcgtgactaaattaaagtcccatctagttaaaaaaaaaaattatgttgttagtaacttttttttttttgtattgggtataagttaatagcacaatcattttttattttaatatatttgaaagcaataattcgagatatatggatacttactactgatgatataaaatcaagtctaggacatgacatctgtgttgaagctgatcaagttattattattaattacttcaaaccattacatacgtgatcatcaaaccaaaagcaataataattattcaacaaacgaaaaaccaccaaacacttaacacgtctatatatataaatatgtattataattaagcaagaccagccttgagcttttgaatggtggcaacatcagttttgaaagagatagccaaaacctcatcatcaatatcagtagcaaacaaagccttgggaagtgacgatgtcccagcattggcacttccaaacgccgaaagagcaagagcagtttccttagcatcagagttgtattgaaagtgcaccaaaccctttgggaacacaaaaatgtcaccagcttcaagtgtctgtgtgtagagcttattgttggctgtactgtccacaaaacccacttctagagttccatccaagaggagaaggagttcggccgagcgggggtgaacgtgtggcgggttagccgtgccagccgggtactgaagcacggcgtaactgacgctttggccgttgagagctgggaactcagccatacttacttttgtgacactgaaggttggagttccttttagggttctgagagctgtgtaagtgaagaatgagccagttatgtttgttgcactcaagtttggtggtattacaaaatctgtaagtatatctgggtctccaccctttgtcatttctataatggcaaatgaaaatattattagtgagaagattttgagagaagttgttggggccattttttcttgttttggtgggttgggtttgtatatatgtttatgataatatgggctttatatatatatgatttgtatgtttagtttgataaaccaaatatgtgaggttaactatagagatggatattacaatgtggatcgctcgtgttacagttgttttgagttcgatatttaatgttgttgtatagttctatgtttttcccttggtggaatagagaattagatatgctaaagagaatattattttacatgcataacgtcacaatatttatcttacaattttatgtacgacattttctaaaataaataaaggaatatactttagtgatttgattggagaaaactacatgggttgcttttgatgtgtaattaaaatggataaatataacgaatgtagaagaaatgttaagtagatggcgtacaattacattgcaccatattataaattattctctacattattaatataatatatttataataaacaaataataaaatagaaatttcattttttgcccttaataaaacccacaatatcaaaatttagatcctccactaatttgtacaaattaattctattgattacatgaacttcc

SEQ ID NO: 17554 - DNA, 5604 bp, Cannabis sativa
tatcacattttagatatgccgtcatacacgtgcatgacacgtgcgcataagctagtaaagaatgataagacaataaacacgacactatagcattgctatttggcattttaatatagcactatgtgtccgcttataattaattagcaacagcggttgcgtgcttggagctagttctctttaacgtaaatagtgaggaggcaacacggagacaattgtgcagacagattgagagaaaaaaaaaaatggaggtcatatcagaagaacccatagctgcagtctcatcaatactcgtatatccaataaaatcttgtcgtggaatatcagctcctcagtgttttcttactcctactggtatgcctttcatcttcacactagtttcattcatatttccttgaccggtttttgcttaaaaattataactattttctttaggacccagaagggaagaagataagtactttacttaagttgtttatctctgttctcttagatgttttctatgatcaaggggctgtattatggtgctgctagtttttactcttttttttttaaataaataaatagtagctagaacatattctaggtcattatttatgtggttttggtctttattcatttcgcagtgtatgtaagaaaattcaaattatcatcaagtaattttttttttcattgattccttcatttttggtaataatatattggtacgttccaggttataggattatagtgacaatttggatagacagtgtgtaatttatgtgtatgcacatattaataaaatattccacttctctttgatttgtattttgtaggatttcgatgggataggcaatggttaattgtgaacagcaaagggagggcatatacccagagagttgaaccaacacttgctctcgttgagactgagttaccaaatgaagcatttttggagggttgggaacccaataaaaattcctgtctaggtaatattttcaaaattatgctgttgaaattattttttattgtaagacaatttactttggaggccatttttttttggctagtatgtcgtcttcattgattatccatagatgtttatctgtttttgcaatgaactacattatagcttaatctggctttactttttattttgtagttgttttgcttgtgcaaagggtatctagaatctgggtttttaataatagactttagcatctatttttcgtcagaaagtattattcattttccactgcttaaggaatgcatccccatccacgagtcacccacgatctaaaactattgctatgttactcatttttccttccacactgttgtcgtattgattagcttgtggagggatgactggcctgaaaaactgattttctagttttttttctcactagtcactacccacgcttagcattgatggttaagcggagttagtgttttaaagctataaagttacccttcatcctccattctcagtgataaaagcacctggcatggatgagctgaagatttccctgaccccaccacaagaagtagctgatggtgtctctgtctgggaatggtttggggctgcattggatgagggagctgaggcatcaaaatggttttcgaattatctcggaaaacccagtcgacttgttcgttttaataccggtaagtatgctatacaaaattaatcatatgtggcatgtattgtcagactagtgtggacttttaagtggaagaatttcagttgaagatgaaaataatctacatggttgcaacactgtatcgcaacagctacttatgtatactaggtgttgcctgtttcaagctatataaagttacacatttgttttgttgcattattttcattcagcttcagaaacaaggcctgtggatccagaatatgcagctgggcacaaagtcatgttttctgaccagtttccatttatgatactgtctcaggttaggtaaattagagaatgatatctaacatgttttcagctcataagctttgaactgcatttgtgaacaaatgtttcgcaggggtcaatggatgcactgaatgcgcttctcaaagaacccataccagttaaccgctttagaccgaagtactgattctttatattaatatatatatatatatgtatattattcattttatgacattattttttatgtcttgtgttgtttctatttttctcatagatggacaaccaatattagattggatattaatagaaaataaggatgagaaattgtccaaacctgtagaaaggcaagaccagagaattgcatctaaatctaaataataaagcaaaactagatcattttagcctactctagtgagtgtagtctagtttctccttatttatatcccacacacgcatagcttaatttgatttaaaacatttgcagcattgttgtggatggatgtgaaccattttctgaggatttatggatggaattcagaattgacaattttacttttgaaggtgtcaagctatgctctcgctgcaaggttaagaaatgtacttgttgtctttattagataaggattggtaacttgtgtcataaccgcacttttataaaagaatattctagcacttcacattgtaaatgaagcttttatacagtatcttcatgtcagagaattcaggattttacttctagactgcatcaataccacatcattgacatgacaatagatatttttccccctatttgtgtagaggttactttgcaatatgcatcagcaccttaaggtctaaaattgagatgttttaaattttctgataccaactactaaatttttgggtttcctattgcaaatgatactgaattactaatatgagcatgcaccttaatctatgtatttaattaaacatttagagaaaagagaggctaaacagcaaaaagttcattatgaaatttgagttctcagcatgattttgactatatcagttgcaatgttttacaggttccttccatcaaccaggaaactggcattgcaggaccagagccaaatgaaacccttatgaaaatgcggtctgataaagttttgcgccctgataaaaaacagcaaggaaaagtaagatgaaaattccgtagaagaagcatttttaacaatattcattcagataattaattgcatgtaatttgtggctggattacagatttactttgggcagaacatggtttggaaaggcaatgttgccgaggggaaggcaaaggtaatgaaaattggcgatcctgtttacgccatcaagaagttctctaccgtggctgaagctgcagcttgagttttgtagaagtagaatatcatgattctgttggggtttatgtgctgtttaacgaataataaaaagcctagaatcaagctacttgtttagtaaaaggacatggaggagtttactttaaataaagagagaaatagaaataaaatccattctctgatgtaaccaagaattatcactatcttatgcaatcctattttacgtttcagtgtttcctttataacagaatctgtttaaaattaactaaaccaaagatgaaaaatctatacagtagctatctcaataaccccccagtctgatggtgagaactaagtccaactgccactagaataggtgggtagaaatttgaaatggatcatctaaatcaattcaatctaaacttttaaaccataaaaaatccatctcaatttattattgaaatataaaaattcctcatccaaatccaatctaatttgactcgcctctaccatgaaatctaatttagtgcatttatgtaaaaaaaaaaattaattttaacgtatactaaatattgctcactatagcttataatcatgtattttgatgtttaataatatattacaataggcaaacacttactttttgtaatctttgtatattttatcttaaatttaatataaactatgaactgccatccgtagagtgagcatagctcacatgatgacgagtagaatccaacttttaacaatatttcaactaaagtgattggaggttgagcactctctccatcaccatcgttactctatgagaatagaaagtatgtttcacatttaagtttcagctatagagaaacaaaattcattcctcttctcactgaagacaacagaattatggctaaataatcataccagcctactcagaaagaattaagtacaactgctaattgaataggtgagtagaatactagtccaacattttacataggacagcatgtcttgcataattcagttatacaggctgctttgacatctgccaattgctatttgaatcttttgaggcttccaaagttgttggagaactcttgcccaagtggagggttttggttgcaaaaactttctgaccattatttgtataattgtggaagcacctttaatcttttcctgcttcagcaatcgaacaacaagctcatctaggaactcccctccatcttgaggtggttgtagattttctcttaaatttctcaataaaatattgcatgtaattaagtcaggatcacatcctcgatccaacatactgtttaaaagatcaatgatccgggaaatgcttccggttttgcaaaacgcattgaggagtatgttataagtgactacatctggttgagaattgggctcttcacaaagcatttcattgaaaagcttgaagccttgttccaccaacccattgttgcagaggccatgaatcattgaactgtaagccacaacatcaggtttgaaccctctactaaacatgtgtttccacaccatcaacgcctctccgagtttcccatgctcacataaaccatgaattagtacactgtaacaaaattcattaactgataaattattacgccccatttctttccacaaaagaattgccttatgggtttggcctgtctcgaagaaacccttcatcaaggagctataaatatagtaattaggcttgaaaccattatctaccatttctgcaagaacttcctctgctttgtctggcttcctttgtcgacacagaccgtatatcagtgcactaaataagacagtgttgggcttgcgccctttttccaacatatccttccacaatgtcattgcctcttcatattttcgttccttaaacaatccactaataagagtagaataaatgtgctcatttgcacgatgccctctttcctctatagaaatcaataacttaactccatcaacagctcttctatgcttaacaagcccattgataatggttccgtaagtaatatcattaggcatgcatttattcatcaccatgcgatctaaaaggctaacagccttctccagcttacccttgagacacaaaccatggataagggcgttgtaagtagcctcacttggaacacaacctttgagaaacatgttatcaacgagcttcgccgcacgtcccaaatccccactcttgcataacgcactaatcaaaacattataagtgacaggactgggaaaacacccttcaatttgcatctcatctaacaaagaaactgcttcatcgatcctattctctttgcacaaaccatccattaacgtagaatatgtaaacacatcaggattgcaatccctaaggggaatttctctaaacacttgaactgctctatcaacca

SEQ ID NO: 17555 - DNA, 4538 bp, Cannabis sativa
ctctctctctctctctctctcgccgcatgaaggaccaacccaaccagccacctttctctggccacaaatgacccaacagagggcaaatttgagccccataccctccaaaacctccaggtattatttcatcttgttcttatgtttttttttttttgctaaaactcggattgtcagtcatcattttggatctctctcctttcttttctcaggttgatagagctgatctgtggccattcgtcggtcacggtgcctctaggatcttggcgtttcgtggtgcacgaagcttcgttattggtggtccttgatggggttttttttatgatgtgaacccttgatgatgtactaatttgtacattttgatataaatttttagaatctgattgtaaaaattgtttcaaggaactaaaataattttttttggattttattttttattattattttgacttttaatcccggttatttcataaaatcgggataaaaaggtctttttatcacagtttttatgtaataactgggattaaaagtctctttttatcctgattttatgtaacaatcgggacaaaaagtctgccttttatcctaaattttcaaagactttttatacccactggcatatatcccaatttttattttagcgaaaaccgtgataaaaagccttaaaaactgggattaaaggcctttgtttgtagtagtgtttaattaaatttaagagtataggaaaaaagtaaattttcgagtgattaagctatttggagcttagggatcgggagcttagttgcgtttctcttggagaaagtttgacgatcctgacgaggtcgggaccaaattttattatttgacttaattttatatgtgttgaataacatttgatatgtttaaattttattgatttgtataaaacatttgaattcaaaacttaatctgcatatttttcttgactgttatggggcactgagtgccaaatatatttttgtatataattatgcatgaaactattgatttttgggttttatcccgttatagtagttgttatgcttttgaattttctaaaataaagggaatatgtacttttgctattcttgttggttgtatttggttttactaatgagagctaaatttatcatgactttttcatatttttttatttcacaacttagtcttatgtcattatgggtagatcaggtgtgcactcacttgtagatgtaagcgaattaaatctgagctctagtattatggtagttatgaagcacaattaaccagtttaggatgttgttttctatggcattgagagtaaggtgtttatttcttgtgattattatatttgtggtctctttattttgtttatatatgttgattatgagatgttttattttaaaagctaaccatagaagggtttttgttaaattactggtcatctaatattagttatttttctactcgactttacaaactcaccccattatatctttttctaggaattcagtttggtacttgtagatgtgagatgaataacgatgagattagctaagtcctattttaataattgttttcttttaaagattatttatgtatctaaattttgaatggatggtttgtatcacttaaattgttaagcaaaagttagaaatgagtaatatgatggatactaagtattatttaaattattaatttaactatttggtgactacataattgtgtggatattattattgggtatatatataatgacaaacgatcctactttattactaatatttttatttattataattcactacttaaattcttacttttactcacaacaaaacttataactaaatgtaaaatagttgtgattaattataaaccatcattcctatgttgtgattaaaagatgtgtggctaaagatattagtcacaaaaattaaaattttttgtgactaaatgtacgtacttttttgtaactaaaactaaattagtgacaacttgtatctaaatagtatgttttagtgttaagtaattttttgttgtaactaaaaggcatgtttagttacaaaaaaattatattatgatcaaaaaattgtcactaaaagttcttttattattatttgtattgaaaagttattccattattataaatatttattctatataattttgtaatataaattaaaagattatttgtaagtattattattttccaataagagttaaaatactatatttgacaacctaaattatggatattatatccgtctagggatcgagtgatgacatacacagtgtcacataaaaaaaaaaaaaaaaaaaaaatcaaactagacaatggatccgataaaaaaaaggcagaccccaattatatatagttctaacataaaagtcatagatatatgagaaataaaattaaatggacaacacattaattattccatagatttcatggacaaataacatatgaatacaatcatagaagattagcttcaatattttaagtgtttatatgttaatatcaagagacacattaatttaacttattttattacatttcttcaccattataccacacagcggcaataatttaacctcaggaaaacagcattatagtattaaacattgactcgatcggtacttaataataagataaatatatatatatggtggaccaagacttgtaataagtctcagcgtcgtcgaaactaaccagaaaccttctctgagaaataattacgaaagtacaacgtacgttgaacccagaaaaagtggatcaaaaacttattccttagactatatatgttatgaaccttgatcacgtgtattattacttgttcacaactcataatatatatttatatatttatatataatgacactcaggttacttgtcatcatcagtattacacttttcgcaatatatcaagccatttcaaaaaatgaaggtgaaacacattatatccaggattcaattagtttcatataatattatgtccaaactcattcattattaattatatatttatccaatgtattttgcagcaaaaagttgtgattgaagtggacatgaagaacaataagcaccggtccaaggccttagagatagctcttctgaaaaatggtaggcttgtaattctttcataacaaatttcttataatgaatatatggttacttttttttctctttctgtttcttcaacttttacgtggttttaggtgttgtctcagtggcttttagaggggaaaggaaaaatcaacttgaaataattggagaaggaattgttgatgcaactggcatagctgaaaatttgagaaagaaggttgggtttgcaaaattagtgagcgtggaacagctcaattaaatatcaacttcaaaagaaaacaaattaaaaaagagataaaagaaagatggagctggtcttcagccttgaactgtacaatgttcttagtccaattgtaatttttaatcggtcacaatttccatacatatatttcgttgtatgttccaaacattatgaataactttcattaattaataatgaaccattattaatatagagtttacgttatggcattttttcacatgaagagtctcttatgaacaatgatatgcataaagactaaaatacatagatgttgcagcttagtgaatttcctaattataaataattaactgcaggtttctatttgctgatcacatatagtgctttcaatcactacatccatgaggcatatgagcatttattaagcacactattctgaatcatggtcatcttgtctttaagttctaatgccatgaaaaattgagtttcaaacctcgtgtaaattttcgtttatggatttaaatttgtgtgtttgattagtttacctgcttatgggtttattttcttcttagcttatatcatactacatgatagtttatttgcaataatatgataacattatatgttattgcaaatgtaatattacaaaagagtggtacttttgttgtgcatacattttggtaccattaatatctttattaattcccaattaagcaatgaaaagtttaaaaatgagatggatgtgagtagtgagttcaccattttcaattcatcaagtgttcgagcatcttcaaatccacttaggcatccaatggtaaatattaaatttggtgttaaatctacaccaaaataatagaattttaacactaaatttttttctattccaatcacaacactaaaaattacactaaaattaaattttttattattatattttttttattatattataaataaacataaataatatatgtacaaaaaatttacttataaatatattatttatatattaaaaagtaataaaaatatatttagtgtagtgtgtcacaatgggacgtacactatagacaatgttataaataggaaaggttttagagtgtggttggaatgaatttggtgtaaattttttacaaatttagcattttagtgttccattagagtttggccttagaaaccttttatcttatatatatatatatatggtaggacctagcaaaagtttcctaccggtagggaactttt

SEQ ID NO: 17556 - DNA, 2336 bp, Cannabis sativa
tatttgtacattgttgtgtttgtgagacaagtcacgctaaactcagccaaattttattttattttttttttttttaaaaaaataaaattaaaagtgaacccgccatttttttgaaaagagaatttggtttcttgggaaacaaaaatggctgaatttccatctcctcgtgaacgagttgtagcttcagctctcctcctcctctctactatgcctcccctaccttcttcctcttcaaattcttcaatgtcaaccaccgtcatcttcacattttcatttcatttacatttccatttacgatgttgttattcgcatcgtcacgctctgtttttgttcattttgattgtgcaggtacgtattcgagttcaacgatgaagaatcgaatcaatcgagcgatgtgcgtaatagcaagatcaagaactggcgcgggagcttattttcgagtgattctaaatcctgtgattcctctatctctactgatcggtcgactgaggagaattcaatacgttcggcgatgatcgttcctgttgcatctggtcggaatgagttgaggtttacggtaatataatcttcctctctgtttttttgaattactgtttgatcgaatattgactcaagaacttgaatctggttttgaactctggattttagtgaatcttcggacgatcattgttgttgttattagaatttcttgaattgtgttttgctatttgagttctcattcttgttctgatttctgatcaatattctgtttctagttcgtatattactaattgacttcgtagaaatcgagttctccgtttcaaattaattttctagttcattttttttagctctgtaattcgttccagattttcttcgatttctcaacagattcttttcttttctttttatattaaattgatgttcggatattttttctccttgatctgattcaaaatcaaacgagtttcgattatatctcatttgaattggagctctgtaaaaaatttgattccaagatttctcgtaggccttacgcaagaatcggtcgaaaatccacaagagctcaaatagatggaaattcagctcaggcgagagctcgaagatgacttcgtcattcggatctggatccagggatgtttcctgccagtccagtagcacaatttctatttgtagcgccgattcgagcacgaacagccgctacacgaccgtcggcaagggaaggctatcatctatggttcgtgcggagccgagaagattgcacctcggctcggctcacattcgtcgtcgagccgaaggaattctgaatttgctttcctatggttcttactccgaagtaagcatacgccaagttctcggtgacagtccagacaccagcaaagcccttcgaatgtgagaaatctgccttacacgtttctgattaaattatctcaactgtttgatcaaactaggtacggaccactatgacaattgggtctatattttgtgggtctgaatacccacttgagtaaattatatagaaatatatcaattataaatgattatattattgtatatatggttcaaaatcaataactattttgcttgtactcaactcaacaggctgttaaagcttgaggaggttaaaagatcaggcataggagggcgtcaggacccttacatttacaaggtatatatatatatatatatatatattctcttttcatcctcatttgcttaggccttttacagaagtataccacttgaattatatatgcttgcttactattgaagtctagaaaattattgatttttcagcagaagaagttgtggtgagtgagaagagaatatatgtttccaatatgtgttgtttattcattttattttgcagattgcatcacattgtaggaaatagagatgatctgatcatttacgtacagctgaggttttaattcttcattacccattaattggggaaattttgttcctacggattgctatatgtggaaaaaatatatatatagctgaatatgccaaataagattaatttctgtaagactatatatagtctatagtgatgattagagttaagcttgtatagtaaggccctatttttcttttaaaatacatatgtcccagatgtgaagaatagaccctgatattgaaaattaacaaatatagcatgcatattgggaattgtcagtctatatataaatatatatataagagtttcagagagctatacaattaattgatatcattctatgtaaggatttcaatctcaaacatactactgcatatacacatagagtgcttagatggtaaatatttattaatttagatcaacttgactaacttattttgaaagaattagttag

SEQ ID NO: 17557 - DNA, 5665 bp, Cannabis sativa
ttaagacatcttgtaaaattttgataaatttaaaataatttataatatagaattcaatattcaaaccatgatgtcttaaataactaccacatatatacaatcatataaaaaaaattcagactaaatttttttctagttgctgaaaaagataaaaatatattggtgcacccctttaaaatggtacattatagaattttcctatgtatttactactatcatcaattcatcatatcatataactttagagttgatcacttaaaaaatccagggagtcgatttttagaaaaatttcaattagctctcgtgcgataccttgcctttatatattacaaaaggaatattagtacaaacctttctagaaaaatacagttcatcaaagtttgttacaaaagggaatatccctttgacactataataaaaaataaaaggaaaacaatcattacaaatgatttagtaactatgccactacaactgtacactaaggacagagaaaaaagctgactaggattgacatgtgatttcattttctaacacctcctctcaaactatgtggagtttgaaccacacctagtttgtcaataagaaaatagaatatgaagcttgagagactcttggtaagccaatctgcaacttggttgtaggatggcacatatcgaatttccagcttctttctcaaaactttgtctctaacaaaatgaatatcgagttcaatgtgctttgttctggcacagtatacttgatttaaagctaagacactagctcccatattgtcacacaatgtgacaagtactccagcaagaggaaactaaatttcataaagtaattaagggttgaatccatgtgatttctattgaaacttaggcaagatctcggtattctagctctctactagatcttgagactacagattatttctttgaagaccatgatagtaatttatctccaaaaaaatacacaatatctagcaatagacctcttgtcatctgggtaacaagcccaatcagcatctgagtaacttgtcaatgagagtttatcatagaatttgatatgaattctatagtccaaggtacctttgaggtatctcgagacccttttttccgttgaccagtgataatactattccattacaattaatcttattccattacattaacattcatattaccattaccattcccattacattacattatatcaaagcaaacatcacctaagtttattgattgtgaagctgagatcaggtcttgtgtgagttaaatattgtaaagctccaattagacttctatattctattggtttttttgatggagtgccatctgtgattgacgaaacctttcccactgttatggctgttggacaagattttaggtgtagcatgtttatttttcttagtagctcaataacatacttggcttgtaagagatatatctctatctcatctctgtgaacctctattcccaataaatagtccaacaaccctagatcttttaaagagaaaatttggttccacttgacagtgaactgttttagcttcttagcattgtttctagtaacaataatgttatctacatagatcaacaataacatctatagtagttttgtagaagaataaggatgaatcagctttggaattgacaaacttccagctttaggacttgctttaagccatacagagacttctctaatttacaagcataatttgggtaccttttgtatacaaaaccagcaggttgttccatgaacacatcttctgttaactgaccattcaaaaatacattgttaacgtctaattatctaacatcccatgatctagatactgctttagtaagcaatatcctcattgtacaagccttaacgacatgactaaaagttttctcatagtctattccaggtctttggttgaaacttttagtaaccaacctagatttgagcctttgagtgctcacatcagagttatatttttccttaaacacccatttgtttccaactatattcatgtgaggagttctaggtactaacctccatgttttgttctttaacaaggctacatttcatatgtcatagctttattccagccaggatgttgtaatgcttctttaactgagcttggttctccttgtcttacttcccactttgattgatcaatgtaaactttaggcttcaagattccagcgttagcacgtgtgaccttgggatgtgagggaattgttgtgcttccatttttctcacagtttcactttcagcgttctattcattttcacttacagcaggaatctcattgttgaattcagcaacaacatcgaaatattgaacaccaaatttttgggtgttgtgtgagttacctaattgagacaatgcttcaagagtggtttgatgatgacctatatcaccttcaggatgaggattctcttgtggttagttaggaggcttttcttttgaaacattaacaaatgcagaccaagaaaggacctaaacttgaacactttcttcagatttgcttgtgttaaaaaaccatatttgaatggaaaatcgagttcattgaatatcacattcccagatatgtagactctccctatgctatttaagcatttgtaacccttacggctatcactataccttaggttaacacacttaattgagtgatattagaatttatgtgtttgataggggcgcaaacatggataacaatcaacatcaaaagtttttaaaaatttataatctggttttctagaatgaaatttaaagggtgacatattgctcacagtagtgaggagtctgttgatgaggtatacagatgtttggaaagcatcccaccaatattttgaaggcatgctagcttaagcaagaagagtaaggcccatctcaacaatatgcatatgttttctctcaactcttccattttgagctaaagtgtgaggacaaggatgttggaaacatgtaccatgttgagttacaaagtcaacaaaggctttgtactcgccccttccatatgtttggagctttttaattcttctgccaaattgattcttgactaaggccttaaactgagtaaatgccttaagtggatctgatttcacttttagaaaataaatccatgtatatctagtatggtcatctacaaagtgtatatagaatctaaagtttgtattggacataatgggaactggcccccaaatattagtttgcacaagatcaagaggaaatttagctttgttttgattgattctaaacggaagagagtgtgatttaccaaactgacatgcctcatagaaattatgttatttatcattgattgacacaacatttgaaaattttttgacaacagacaaagacaacctaaagctaggaattgaagacacaacaaacactagataaaatttagataaatataaaaaggaactaatactatttggagaggaggatttggaacttgttgagtttagaccttctttaagccttccttgaagcaccttcctcctttttattttgtctttcacacaacaattattagatgagaactcaacagtgacattattattatcattagttagtttagaaatgctaattaaattttgagtaatcttgagaacatataaaacttctttcaaaattaaaggatatgagttagtggtaggaagaacacctatactaacatgttgaataggtaacttattaccatttccaactgtaatagttttcttaccactatttcatctttagattcacgttgccaagatctgatgtaatgtggttgttggcaccactgtcagcataccaagcctcatcttccgccatatctagagtagcaatgaaagcagcaattatctgaccaaattttttcccatctgaggtgtttctagtaggagttgatcccatgtaggacttatcatatcgattataacaatgagcatctgaatgcccataccttccacaaacttggcatgtaggtttggggccattagatctgcctcctctgcctctattgtttggtttgcctctactgctattgtggttattgtgataaccacctcttcctctaccttgttgtactggtttaaaaccagtactagatccagtgtttttgtttgccaaattagttgttggtgtagatgaattgttgagggatttaccattattagagaaggcagttaacctctccactttgctgtcaaaactcagtaaaatatcctgcaattcttgccaagaggttgactgtcttacctcaacctgcataacaataggcaagtaatccagatctagaccatataggacattagagacaagttgagcctctgaataaggggcacctgcaagggctaggacatcagcccattgctctttctgtccaaggtagtctccatgttcatggctccctttttgactgtctgaatttttgttctatactaatttattttggcctttgaatgagcaccatacaagcttccagagctctccacaactctgctgagctcgagcaaccaacaacttcagttgctacggtctctgtcatagagccatacaaccaccccataagaagttggtcatgaacaatccattgtttatattctggagtaacttcactaccaaaactaggttatccttcttcactgataggagaaatgaactcttggggtttagttcttgcccctgttaggtagtcatctaggttttggtccctaatgatggtagtgaccatttgtttccacagtgtgaagttgttcctatccaatttgaaagcaaaagattgattgagagtgctcccaaactatgggacaacaatgttcgaaccagaggcaccactgtgatttccaaacgatcgattaaccacattgcttcctgtctgaacttgagctaatatatctccctacaatggagtttgttctcttgtagccatggctccaagggtcactctgataccagcttaaaaaatgcaaggagtagattttttaggaaaagctcattgaactctggtgcgatgtcttgcctttatatattacaaaaaggatattggtgcatacctttttagaataatacagctcagcgtagtttgttataaaagggaatatccctctgacactataacggaaaataaaaaaaataattattacaaataatttagtaattatgacattgcaatagtatactataagaagagaaaaaaactgactacgattgacacatgtaagttaattttctaacatgatcaaattcattagtccatgtataataatcttcagaaattaataaataatttttaaattaatacacacaattaatctcccacaaactcaaattttgttgtaccccatcgggctccaataggactcggtacaacaaatttcgggcttggggttctcctccatgcggtagtcggtcggaatactcggttgactccgtgcggtaatcggtcggtctgaatggtgggtgggggtcggtcggaatggtgctgtggggtgggcgttgtgggtcggtgtgttcttgtgatgtggtatgcacgggcagagagaggttagagggaaggagagagaaaagaggagatgattatgggaggagtattttttggaatttaagtaaaatagtcctattttaacaattactctaagtttttgtttacctaactaattatactttaaaaaatggaaaaaaatttaaatttcccaaatag

SEQ ID NO: 17558 - DNA, 7665 bp, Cannabis sativa
  modified_base (237)..(248): a, c, t, g, unknown or other
aagagtctgtattgtattgtaaagtgtgttgtcgtattacatgtgcaacaatcttgtttaattaaattaaatggtctactatatatatacatcattaactaaatgcaaagagctttctatacttggaatagtcatcactttcccaaaaatgtttaatactgcaaacaaaacagctgtcctcgtgtattaattttatagtggattctattttcccattcaaaaaataataataataannnnnnnnnnnntaataataataataagagcattgttattagagaaatgttaaaaaagtattattaattcttaatattttttttggtacgtggtataagttagtatcatgtctcatataatttaaaacaataacttttaaaaaatatcgttaattaattgtaaaagattacctataaaaagtgtaatgctcttattattaagcactttataatatcgtactgatatgacatgttataagtgtttagtagttttttatgtgatgcttgacacttttaatattttgttttgatactatgtgatataatgtgcactatctaataataatttcctccatgtccttaaaataacaaagaatttcttagtgtctctaaatttgctaggaataacaatgtgtatttttaatttcaatgctaatatttgttttgtcaagaaagagatgactcatactattattgatggggatgcacaaaaatagtctatatactttctattcttctcaaattggacctatctcttcaagtcttaataataccacaacttctgtttcaagttgtattagatgtaactctagtatgcaaaatgattttaaagtcacttttacatatatcttatttagttactattaatcttgtttatagtaactataagtatttttagtattagagttgtattttttatgtaatacttgcatgcatttcttatcttccatcctttgttcaaagcttaatctttaggagaaggctcaggaatcaatgcctccattccatataagataattgaaattaaaaaaaaaaagactatatatgtcaataagtaaaaacttatcttgaaatgaaaagagatttcctaaaaatttctttatgtatttatttatttttaaccccaatttatttttgaaaagaaaaaaaataaatttgttctcacaaaataaaataaaataaataaataaatatttatagtttgtgagataaattatcgttaattttagtgacaactcaatcggttgggtggtgaagttgaataacatgaaattgacgacgacgacgacgcaagttattcatttgtaacaaagagttcaatcaaacccaaactaaagtttcaaacttgattacaacaatggctatggataaaccccaaaaccaaaacccaaaaccctgattgattccaacaaaccctcactctttcttcttcttcttcttcttcttcttcttcttcaattttcagctccaacactcatcaaatggacctcactatctcctccaaacccaacccacttctcttttcttcactcccaccaaacccaattcttttcaacctaccattgaaccaaagacacaaactttcccgccacaaactgggatttcgtgttctagcccaagcaaactccaatgggtcaaatgggttttcttggtcaactctctctcgctccctacagcaaggctcggctcggttctggtccaattttggtgaggcagtcaagaaggaaactgggtttgattttgataatgccaatgtgaagctcactgagtttactggccgagttagagatggagtgaaggttggtgggagtgagttggaacaggttttgccggagtttgttaattggaacaagtggcaatattggaaggtaatctgatgaaattaagattactcttttgttttgttttggtttctcttttgattgtgaggattcataattgagtcttttgtttgctctcttggagattgttaaaacccaaaatgtcttttttatttgcttgtgacatgtaaatgaatgttaataatgtcatttgatcaatatatatttcaattgaagatgttgctttgccaacatttatagtttgaacaaatatgatcatgtgtggtactttgtgtaaatttatttaatttgtatgctagtctatgatgagctaaacaatgaccaaaagcataattattgttcttaggattggaaggcatgggactctaaaagaattgctgcattgattctgtatctctttgttgctgtaatgtcgtctcggggattatactctgcgattcgagctccttatatcgatcgccagaaaagagagttaacagaggcttatatggaggcattgattcctgagccttctcctagaaatgttaaagagtcagtaatttgatcattgttttcgtatcaatgatgattcccagcatacattgacattctagttattttaaagaattagagtatctggtttctccacaatctacctgtactcttttatggcatcttattttccttgaaagaattgcaggttgaagaagagtatgtggaggaagaacatgccgaaaggcctcaaattgaagaagtttattgagaaacctgatggaacagttgttcgtgatatttcttacgtcggagaagatgcatgggatgatgattcaaagcccgaggacagcgtaaaacaaatccttgaaagtgatgcaaagttaaatgcacaagaaaagaaagagcttacgcaagaactgggaatttcaggtttgttaggatccgtatgcatcacactgcatttctctttgatttaagtttgagttacatatcatctatattttctgtaatgatttttctgtgccaaggagagacatgctattcggtacttgtgccttggacttgtagtagtttattttctcctttcaaacttaatctaggggatgtatgtttttatatgaactcttttgttaaaaccaatcattagtcaatgtagggtcctaagtgagtttattggaatactgcttcacatgagtagagtacatttttcatacatgtactatctatggttcgaaatccaagtagcattcatctatgttagattttatctgtgctcggcaggtgaaattcaagaagatggaggaacttggcgtgaaagacttcaaaagtggaaggaaatcatgcaaaaggaaaaattaagtgagcaaatagattcacagaatgccaagtatgcagttgaattcgacatgaaagaggttgaaaacagtcttcgcaaggatgttgtggaaaggacaacagatacagaaggatctagggccttgtggatatctaaaagatggtggctttatcgtccccaactcccttacacttattttcttgaaaaacttgatagttctgaggtaagttgctgtattcctgcctgtgatggtgtagtctcgctagttttctttgtacgttctgattctgtgattctgctgtacaggtcgctgctgttgtctttaccgaggatatgaaaaggctgtatgttacaatgaaagaaggttttcctctagaatatgtggtaagtcaatcttttgattgtataaaatttaaatttcatatttccttgccttgttaattcttaaaatttacttatgtttcattaggttgatattccattggatccatacctgttcgagactatcacaagttcgggtgttgaagtagatcttcttcaaaagcgccaaatccattactttttgaaagttgtaattgcattgctgcctggaattctaattctttggctcttaagagaatctgcaatgcttcttctcatcacttctaagcggtttcttcacaagaagtacaatcaactttatgatatggtttatgcagaaaatttcatcctggtaagccttctctgctcagtcattttccccgagcttttgtatatgtcgatttctaagtttcattttgtttagtacagccagttggagatgttggtgaaacaaaatcaatgtacaaggaggtagtattaggaggtgatgtttgggatcttctcgatgagctaatgatttacatgggaaacccaatgcaatactatgaaagaggcgttcaatttgttcgggtattttatttatttattttgatgctatgtttagacaagttcagcttcggtcaaaatacaaaatgattaattttttgtaccagggtgttcttctctctggaccacctggaactggaaaaacactttttgcaaggacgcttgctaaggaaagtggattgccgttcgtttttgcttcgggtgctgagtttacagatagtgaaaaaagtggtgccgcgagaatcaatgagatgttttctgttgcaaggagaaatgtgagcattcttctctcatgttttctgttatgcttttaaacaaagatcatgaacccatatagtacactcggagggtaagcttaggagcatgctgtaaccttaagttttggtaaattcagtaaaaagttttgagatttttcaatgagaaaaccccctattccgttaacacttcctctcttcatgattctttcttatgccttatgtctttgcaggctccttgttttctgtttgtggatgaaatcgatgcaattgctggacgacatgcaagaaaggatccgagaagaagggcaacttttgaggctttgattgcacaacttgatggggagtgagtatagtggtgcaactttatttaattattcagcagaaaatggtgtctatttgtgtttttactcccttgaactctaaaggcgataaaaatgcataacagtgaagtcctttaatttgcaaggaaaagaaaaatcattcatttataattcgttctttttgtctcatttatgtcagcaaggaaaaaactggggttgatcggttctcgcttaggcaagcagtgatattcatctgtgcaacaaatagaccagatgaattggacctcgaatttgttcgtccaggaaggattgaccgtcgtttgtacatagggttgcctgattcaaaacaacggattcaaatgtttaatgttcacagttcaggaaagaaacttgcggaagatgttgactttggaaaagtaagttgttcatgttcctttttggtttttggtttcttaatagtcatggtctctgatctcctttcttttatggactcgtcagcttgtattccgtacagttggattttctggggctgatattaggaatcttgtcaatgaagcagcaattatgtcggtgagtaaagcaattacatttattagacaatacattgcttaacctcttagattccatttaatttttatgggaattactattttagtttttccagactagttgaccgcattttcgctttattatcttccttgtttgttagagcactatccacagaagaatttgtgagatagcccaaaatcttgagagttagctcttggtcttcctgtcaaaaacatcgtcgataaagtctttttgtttgttagaatgcttgacccttgaaaagttacttggttaattatgttacattgtcatataattttgtgttgcaggtgagaaaaggccgtacgaaaatataccaggaagatgtcgtcgatgtattagacaaacaattgcttgaggggatgggtgtacttctcaccgaagaagagcagcagaaaagtgcagaaagtgtatgtttgcctgtgttggctggctctccttttatagttcttgtctatcaaaacttttagctgataatagtgtttcaataataattatgcaacaggtatcgtttgagaagaaacggctgctggctgtacatgaagccgggcacatagtgttggctcatttgtttccagagtttgattggcatgcattttctcagctccttcctggtggcaaggtacagtgtctgcctttaataacaggaattcttggtggagactatattaagaattccccgagctgccttttttaagtggtttcttctctatgtgagcaggagactgcaatttccgtgttctttccccgggaaaatatggtggaccaaggttatactacattcggctacatgaaaatgcaaatggtagttgcacacggtggtcgttgtgctgaacgggttgtatttggcgatgatataactgatggaggaagggatgatcttgagaagataacaaaggtatttgcaatttccttgtttttattatctaacaaagtgaattttttgattgattaatttgtttcttcagattgctcgtgagatggtaatcagccctcaaaatcgtaggttggggctctttggtcttacaaaaaaagttggaatggtggatcgtccagataatcccgatggcgagttgataagatacagagtaagcactctcttcctcttcaaacagttccattatttgtatatttaccatgtctaactctttccttattatcgtactttctgctagtgggacgatcctcacgttattcctgcaacaatgacaccggaagtgtctgagctattcactcgagagttgacaagggtaactagttatttattgcttttgcattattttctcatgtaatggtaaacaccaaatgtatttagcttagcaatatctgatattgcttgcatgcagtatattgaagagacagagaagttagcaatggatggactgaggaaaaataaggacatattggacatgataaccttggaactgttggagaaatcaagggtaactggactggtaagttatcaaagttatggtatggttttcgaatagtatgacattatttacaaccactttaccttacctaaccttggcttcttacctttgatatataggaggttaaagagaaactgaagggtctttctccagtgatgtttgaagactttgtacaaccattccagataaacatggaagaacaggtactttctactattgttagtttcctaatttactttgaccattgtctctctcataccttcaaaaatcatatcattgcgattcaggagggaccattgccacataatgataagttgcgatatcaaacaccagacatatatcctgcacccttgcacagatgctaaccgtttcaggagggatcacactctcacaatgtcttgagtttatcaataagaagacagattttttttggtcctttgtgttaaaaaaggggacaggattttagtacactcaaagtacatttttctccaagttcaccgacgcatattttcagaaacaagttctggtgggtggtgtagacttgtgaaatttcgcaacatgtcacaagttgttcttcttgagagatgtggaggatattgaatcctatcagagacagtgtcagtgcttagagatttctgtagcagaatttgtcactctgaacaacaatctcggtgtgagttttcgtaatggtcagaattcagagtgttctatttagtgatgaggaggctcattgattcttcaatccagttttgcatatctcatagtcagtcacagtaaattattctttctgttgagtattgtagattacaagcaacatatgtagcagtacacatccaaaattttgcaagagctaatgataaatttaatttatttaagcatctaagtcctcttcaagtactttagcacaatcatgcaactaaaattctcaaatgataacttatctccatagagcataggttgcatgtcattattatgtatgagttttatcgtcataaatataaattatgatattctc

SEQ ID NO: 17559 - DNA, 2760 bp, Cannabis sativa
ttcccatctggtagaacaccctaaaaaaagtatttccaagagtgtattaaacttttgacctcctatgcatctctctgatccacgtgaaaaacaagagaatgtgcaattaccttataaacacagccaaacccaccttgtccaagctttttatggtctgaaaatccatctgtagcagcgcttatagtagccaaatccatgaacggtagttcctcagtgctgactagctcatcatcttttcctgctacggtgatggccctggggcttagtgaataagaaagtaatgcattttggctctttacctcatctgtcaaaaacacatatgtcagtgaataatatggtaaatcacatctatagtgctgtatggtaatttcataactttcaccttgttttggattctttttcctcctaagataaacagcaaaggaacacatcagaatcactagcagtgatgatgtgcaagaagcaaccaataaaatcttccttttcttccccttatgtctcatactcccatctgctgtcaagaaattttcaaatttctagtgttagacaaggtactcatttttagttgtctcatgaaggaacatgtccttaaacaaccaacacacaagcaaaaaagggtccaacaacagaaaacacctaccaaacatttgaagtataattccttagaaggtatatatcagtgtttattatgaggtccatataataagataaaagtttaagctttatcatctattttgaagaatcttataaatcatatggaaattttaaatgcctaattattacctttggagctttgggtgtagaagaaacggaagatctcaaatcttacattgcaattactacttaaaatgataccaccttcttcagaggggaagaatccctgaatatcacccaaagcagacctcaaacaaattttacactcacgtttagggatatctctggtgcactgtacaagcccataaatctttccctttgaatactcagtatctccggttttaaacatggtaccattagaatcattaatagcctcatcagacagttttttaatcaatttagtccaagctaatctgaattgatcaggatgtgccactttcttcctgtgataactcttctctggctttttcccagcataaatctgcatcttacgaaaatcatagggaaagtagtgaatttgacacacttcataccatatgattgctctagttgttttacacttgttcatgattccttggcttgcattctcaaggcatttctgacagtcagtaacattaacatctcctctgcaaagcgcttggccataaacctgatctaaaccatctccataagaggtgtcgttataacctgttgatgatggtgtattgttaactaatgactttagaagtgtcttgaggttgtgttcaaatgagctggtgtaacttactgtagttggaatacagtctgacaagagagggtttgaattaacaggtttgtgaaaatagaaggctaaaacaaaaacagaaatcacagctgatgaaattgtaactttaaccatgtcttttattgtgaaagtagttttagtctttttggatcaaagataaaaccagaagtttaaaatgcactaacactaacatgtgtatccaataacagtgcatgcatcagctcctaaagttgcagcctgatattttgtgattgactaaaaaaatggttcacacttagtataaagtagattcctagggaccagacattcttttttttttcttttttctgatggtttggtcccagctgatctgaattgatctgtatgttcattttgttattatcctgtcagataaacaaaatgatctagaggtttggaaagtttctcatttgtttttattttaattttagtttaggtggggttggtgacaaagagggaaataaaagcagtagagttatttcattgctcaaaatagaccaaaaacaatgttttctctctttttattataatattaccttatccagttgcggctgattgctagtccacacgttcacaaatcagttgtataaaataacacatactcttttttgctttacttataaatccaatcaggtttacaatgtttatgtatttctattatccaatcacaatagtcaactgtataatatatagtcatacatattgatattcagtttacagttttagcaaataccataagaaaattgttttaatagttttttttttttttggcatgatcatatgctcttcattattattattattatggtccgtggaagtgttcaggtagtattttagtgcaaattctcttactgttctatattgaaggaaacatgatacgaaaattcatccaaccactcaacaaccaaaaattaatgtgaaaacgagcttgacaagagatggctaaatcaataattgatttattgtcggcatataaatctttttataattggttatgtactaatttttattgataataaatcaataatgttatttgttctaattccatcccattattgagctaaaccacaattctgtatcaagagaaagcgcacaattaaatgactgacatgaacatcgaatctttatcatcatttttagtaagaaaattaaatgatttgtgtgaacttctgactagtttctaaagggtactactattttttgatctgctctgctgtttttaatgtttcattaccattatcaccaccattatttgaggtactatttcaaacaccaagactgaagcaagaaaaagctttcattaaaaccaaagtatatacagaata

SEQ ID NO: 17560 - DNA, 4405 bp, Cannabis sativa
gagatctcgttgactaagatgtccaagactggtgggtgggaactgggtttggagaatatggaggatatctggttgcaaatttcagtggcaagtgaagccatggaattggatgaagccattttcctttcgacatttacgtacacactacacacgcaggcctattaattagggaataagtctacatttagttgaaaagtttaaaaaaaaaaaaaaaaatcaagtaagacaaaactgggaccactattttgtaaagaaaaaattgagactatcttgctaaagttatctgaaaaacaaacaaaactttgcagtgtcctaattcgaaaagattttaatttcagaaaaaaacaatactaataaaataaaacaaaattgaaaacaaagaaaatatcttttagtcgatcattcagtaattaataattatgggttatttaagttgtcgaataacaatttttaacctttattaagaggataaataaactaggcaataagaaccaaaagaaaacatagtctaaataacattgtcagagataattgaggtcttgtcggatctgttatctccctctctccatctggggaattttataaaagactgttaaaagaggaagattatggaatagtctgaggaaacattgttgattgagaattataagagaacaatactatttgtatacaagatagcattcataggacactttccaaaagcattacaaatttataatagaaagttctctgttaaaatgtcttttccagggcctattttgctcacactccattaaccggagcaccaacggatttctgatttaaagtagcaccagtttcatcatcaatgtcaatgtccgtaacaccactaccatgaccactgccaccggccgctaatgatgaagacatagcatttctcctttgtttatctgcctcgtcctcttcttcgtcttcaaggaaagaacctttcctccggagttcttttactttccagaattcgtcgtagtgagctctccggtgctccctgaaacttctaccatttttatctgtttcaggatctgcagatagtaagaagagcaagcacgttagagttccagctgtaaattaaatcagacaattcctttctgtaaaagtccagcattacaatgaaatatttgagaactgtagtaatctcacaagaaaccaacaaaaggttcaagtgaatgcaactaatttacaatccatcttttatatttagattttagtccatttttcttgatcttttgtcacacagttacagtactggtttcaataaaatttctagactctagagttcctcaattatacagaaaactataataacaatagaaaggactgtcctcgttgaacatgatcaagttaacaagcctaataaaatatgtgaaggaaaaaaaagttttactaattaagtgattgttaaacttttcaagttcaaatcagtctaagcttctataatataaatgtagtaaaggactgaacgagaaagggaaataagattagcaaagaacaagaagttgtgcgaaatttggatgaataaagagagttgaaagatgctgggtaaggaaagagaccttcatcatcctgttccatagcatctgcctcgtcatcagatgacgtccagccactggatctctgggtagtctctcgacttgatgatgctacatcactcaacgcagttcgtattgcttccgcatcaacgccatcaggaacactttcatcgaaataattccttataggagatagagatcctataataagaagaattaattttaatattgttaagaaccagaattggaaaccattaaaacctgaaattagccaattaattaaaaaattaactgatcaaatatcatcaaatcctgaaaaaataatgtacctttccagcaaccaattagatagaaatacacataaataaatctgtcagtcccctgcaagacgtatagcatataaaaatcaacataccatcatcatcatcaatcatgggatgatatggtgtcttcggctcagtaattttctgcctcacaggtttagttgcttcaatttcacccaagttagcctcgtcccatcgtacccgtcccttgttattctcactataaaataattaaatatcagtctatttatgcactttaagcatgggattccttttgtgaggaaaggagagaaaatacacatatgaactccaaacaaaatattccaaccgaatgagaaagacttaactgaaagagtaaaactatggtactctagcttgtgtgcatatatataaatatatatatatatatacatctacatacaaattaataaaaaaaacaatggtattgaaaatttggtatctaaactatttagaaactaatagtacttgttatctatagcaagctaatcgcacacatcagaaaagaagcactgccaagtgttcgtgtcctattttggagaaccgtgaaaggtaggacggctatagttaaataaccacagaggtgacctttggtaatcagagcactaaccaacagtttctggaaattattaagttgattcagacacataatgtccgtgaagcaatctccaagattaactatttgattgagttgaatttgcatccaaaagttttccttctcacttctagaagtgggccattttggatttccattccaacccacagacaaggaactgtcactgagagaatttgttcatggttcagtttattaatgcaaccccaaagttacatacacttttccttatcacttaatgttaaaggacttaagtctatataataatttaagcaaagaagaaagagtaaattacttcattttcttgcgagcaagccaactctttgcacaccgaatgcacaccagtcaagttactgtttcactgaaacaaattgcaacaaattgtatcaaattctcaaaatccaacaaaacactagaactagagcaagtgggattccaattttcacagcgtgaatcccatcaatggtgcaaaacaataaaataagaaacagagtagcttgagagcatgctcatataaaacatgtgtaatcatccaaatcttatttgtaaacgtattgaatacacacccaaactcatatcatgaaacttgaattcaaaacctaaaagtttcatcccagtttcacaaattagataacactaaatgtaaaacaagaaaattaggttaatgtaaattcatacgagtacatacaattacatctccacgaaaatattgacacaaataatcaatcaaaataatatcggagctgaactaacaataacagcgtccacacacaaaaatcaaaatcaaagcaaggaatttaattacaaagtcaatgaagaacagcaaaagtaaaaccctattttaatccataacttcgaaccataagaaatgaaacacatatttaaatcacaaacacttaagaatgaatagaaattataacatcatctagatcgacccaagcatatatattttgcaaataaagatcttccgctgtgaaatttttcaatttcttttctaataatatttttttttaagtagatttttgtatggaaatggaaaactcataagagtaaattaaaattaatatgtagaagagaataaataaaattattacctgaggagaaaattgaaattggcggcgagtattgggagagctaaaaatggtggttcatctctctcatatttttctttttcttgatttccagaacagcccctgtggtaacacgtattgtctgttgaacccactttctagtagctacacacaacatgtcgtttgttttttattttgtcgttttttatgtgtattttgtcccttaagctttcgataatattgattcgggcccttaaaatatatgaattgttaaaaattttccttgaatttttacatttatagaaatttaatcattctgttaggttacgtgacttacgtcccatattttatgatgacgtatctttgtcaattagtaattttgttccctaaattttcataactatcaaatcgcacccccaaaataaaagtaagaaatgtttattattttttttagtaaattttaaaaaaataatttagatcttaagaaaaactcattttgaatgattaagaaaattgaaaataaattaaaattttaaaactaattaagcgatataaaaaattatttattttttattagaaaatttaattacacattaaaaaattaaattttataaaaactaaatttaaagggaacaaacttgagtatattttgtttttatcgtaaaatgtagatttatttaagcaaacataacataaagggctcgtttggtacgtcatattatattgtattgtattgtatagtattatattaaattgtatttcatgcaatatttttatgtaaaactatatatgatattgaattttataggcacctaaatatataatattttagtataa

SEQ ID NO: 17561 - DNA, 7523 bp, Cannabis sativa
tagtatcatatggggtaaccttgctcccacccttcttgtcctacgggccagacataacgttcaaatcaccaaataataaccaaggatgatcactctccaaaacccgatcagtgagagacttctaaaactccttcctctctgcatcatacgttgccatagactacaaacgaaacctaattgatattcttctcaaggtcccaaacagccacttcgacaactccctaatctaccttaataacattaagtcaaatatcattattcctaagtaacaatacaccatccgcaagaccaaccgcgacaatagtataagaattttgaaatccagtagctttcgctatactcttcatcccttccttgttagttttagtttctatcaagaaaatataatctgttttgtaccttctaacccaagcttgtagagcttgggctatcagggttctaatgttctatgaacaccccaaaaattccacgaaagaaacctcattgggggagggagacttgataagggtcgcctcctcgtccatttgaaaaatttgaacttgttcaatagcaacctccaccaactaaagatcctatgtgatagcattaatttcccctgcatcctcaccgtcttccaagattgaccgaaccgtgaccccctttgacttgagatcccttaccactaatctttttcttccccaagcttcctctctaccttttcccttgtcttctcttcgcagacgagctaccacccccattttttgcccttcccaaagaaaatgtggtgactttaagaggtggaagagaaacagtagaattataattatttgtctcttctgtaataagactactgagcaggaatgatccaatcaataaccttgctcttctttttccccgataggctttgtcctgtaatggacaattcattatcattacaagcaataactctttggacctgtaatggacaattcattatcattacaagaaataactctttagaccttatcaggggtaatatgggctggatccaagaccccattaacaacctccaccagatccttattaatgggccaattaacaatagtagactcaggaaatcgatgaggctttcttgacttacacacttattcatggggtatctccaccatttggccactagtgggaccaatgtcccgtaaaactcattatcatccatcatcacgtaccttattatgaatatgtgacataagatttcaaagaaatatacccactggtctcctatgcatcatacctagcttttccaaagaacgggaaccaatacgaataggttctcgcattcttctttgctccctctttccattcccaaaagagggagcttctcccagcctgctgctgccactaccaacgacacactttctagctgtcccttgtcctgaactctttggaacgtcaccatcaaacgaggtgattacccttttacccttatcaatattattggatgtcggagcttccaacccatgtaagtcctctagttgccgtttctgcatcagcgagatttttggatcgaagcagttgcgaatgggcacaccaaccttaatccaggctccatacagaggaactgctttcctaatgggcgaatacgcatatttagtgggtctctcgcactttgaataagtatgagccaaataaccaaagttgaagcaaatagctcggagtttgtggtatttatattgaatccattcttttctatctctcaagatgttaagataggaactcgccacaagcctttgatcaatgcgcaagtccacttgaaacttggaaacctctcctggaaattgtgacacgggaagcttgatcaaagtcatataaatacctactttcttggccactatattagtatttttcaaggtcatattcgacttcgacagtccgtaggcctccaaccaaaatctcgccttgccatattaaccgtttgtcagtctccatctttttgccaatcatgaatgttcaaaagtgcgtcattaactagccaaggtcgcttctttagaacgaacttcttatcctcttgattgtcaaagaaaacaccctaaactctttcctgttctagccttattttcatcctccacttgccttttagctcccaaataccttccaaaatctctttaactctacctttaggaacacctttcctaacaatatcaacacttagttcaaagtcaggttcatgttcaatagtcatagaatccatgaactgttggctagcattttccacatcattaccttcaattatctcgacatcgaagtcttcttcctcctcttccattactaccacttcaagatgaagctgagggtcaacagggggagagaccccactaccatccaagtccgtccccagtgaagtgttctgaatactgggatcgatgttatcctcctctcttgaagtcatgctaaacgatttgagagaaaacaataggaaatagacagcaaagaaattcaaaactcttaatgacaaaaaaaccccttctaggacaaaattagccctgtacttggaattggatcaaagtattgctaaatcatgtgataggctccagtcaacttataacaaaacattctaacaagtgcctcagatgtttgagaggcctgagctcttcgtgatgcaagaacacctcaagcatacctaactctgaaatatcctgtaggcatccctaactaaccctaacatcatgcaatcacaataaaaaacgacagttctttcctcttcaatctcccgtctagagtaagaattatataacttaattgtgcacaaataaaccttcaatgcaaactataataatcatacaaccaaacttggcagtaaacacagtgaagtaactgcagtattaatttcgaattagttaaaaaaattcagattaaaggaattcatctccacttccttatttattttgtgaggttgagttcatacaatgaaagatcaacaaaattttgaccataaaaagggatcacctatcttcatcaattaatcaacaaaattgcaatatttcttaactcaataaactagaggtcgcaatctggagcactagaaacaacaatggcaacaattagaacaaactttactccactagttagtaaagctagatcgctatcaatctcaaaccctctttttcctaggcaatgcatgtttctttgcagcagttgatggagtcttgccagaatgtggtagtagaccacgcagggtcgccaatattgcaaatccaaagaaaggccagtacatcattagcagcttatcggatgctttcccagaccttaccatttctgataatatagcaacctgaaaacaaaaagttcacaaacaagttcaagaaagaaaaacaaaaaagtgatactttcaaattacaccaagttactctaagttaagaggaaagtcaagcatcttgtgctccaccatcatcagtgcaaccaaatgcattggaaattcaagcttagtaaaaggagaggtaatatgatattattgggtggatattgggattagctagctactcttggccagaatggaggagcaaaaaagaaggtagaaaaaaaaggcaaaatatgattgaacttggtagattataataacttgttttcaggaaaaatggggccttaataatcatttgaagatcagcatctaaaaagtcaaagccatcacaagcatgagacatgttaattcatatgggataacaacaaaacataataagcagagcaaccacaaaaagttcatacattgtacggatctatttccattattgtatccctattactatactgttccacaaaatggaacacgaacacatttatgggttttattcacttcaacgtgaaacgtgtcaaattctaccaatcaccaaaattttgatatttaagccattgaaaaaggaatcaaattcaaaatctgatccaagcccagatcgtagatttcaccaatcgaaaacaaattaagcaataaaagcgaatataaatcattcaaaagaagaagaaactttaccgtggaggttaagatggagacgccatagatcaaggaggtagtggggaaccaagacttggaagccaaaatagcgtacatattgagaagagaaagcggccattgaaagaggagctggagccaaactagaccaacaaagaaatggggcttctctgtgaaaagatagtcaccgtactcgtgagcataccacttcttcaggttgattaacacttccgggaacaaactcgccggaaaaatcgtctgcgaatcgattaacggagctcctatagctatcactgttaaaaacatgaacataatcgcatcaatcagcttcaccaaaacacccatttttgcaaatcaacacgttttttcttcttctctgtaaaagaatgtggcttcacacttctttaatactcctttctcttaccaatcaaccatatcaaataatataattaaatcaaattttagatcttggatttctgtacgtgctagatagtcgcctcttctatttactgttttaacctttgcaaactcgtaatattataatgcaatgtcaaaattttaggacttcttaattacaatgaaaataaatgataataataaataaaatcgcctaaaattcatattaaaatacaatttgtctgagtatttggcaataacttaaactaaaaaatgaaaataaagagttatattaactctatgacaacgaaatctctccttggcactcaaggatttcccaacttatactgcctcttgttttctaagttatttggaggtacaagaactccattctcagagatggaagagtatggtccacggacattttattggaccttgtggatgatagatatattgagttcaaaaaaggatttttctggtgtagaaagaaatgatgatagagtaagcagagcagcatgccatgcagcaagttcatcacaatgataggaccttccagaagtggctgatggcggatgcagcgttcatggaaggcaatgctggctgggttagcagcattaattcagattctgctctagaggcagagcttgaggctatgaaaatggccctacagtgggctcaagaacttgaatgggataattttgactttttctttgactgtcaagactggcgagtggccaaaggttttcatgttgtgcttaacttgaaatcttgttttcctaactgtaatttgcataaaaactctatgacaacaacaaaagaaaatatttactttacaacaaagaatgaatcttttatcttggcaaggttggaaattttatcatatacttttggttgttaaaagtaactcaaattcaacattgtaaataaatgtaataataaccaaaactatggaatgtcacattacaacattgaattacaaagaaaattatagatgaaaatagatcttaattcttaagaattaaactgacaaagtaccaaaacaatgttgttacatgaaaacaatgttattcataaactcaatcatgagactaagaaacaaacaaggctgtgtttttaaggctttcttcaaccccacctattatgctcgtcctttgccaatccaaatctagaacaaacatgaaccaaccatagattcataacaaagattattatctgaaaaagaatccaaaacttcattagcacagggtgaaaaaaatactataccatggccatttagacagagaagctgtaatcattaatcaagccagtggtcttgaaccaacacttgggatccagccgcctcagaaaaagaagcttgagaccaaacagatcccacaaagaaatgaaagctctactaggataagaggaagggcgttgcatccacaagtttctcaacatgtttgacatttgaatgacagctagaatagcaaggaaactaaattcttctattcttccttttctgttgatgtactttagctacaatatatttatggatcaacaagctcctcttcaatctacatatatatagataaccaataattattgattagttttcataactgctccggatgtcaaaatgcctaaagactgagaatatggatgcatacaaacataaatctcttattaccatatgtcaaaattccacgagtgaaataccaatgcatacacatataacatttctcatttccttctaatgttatgggtagagctacaaaacacggacagcaaactcaggcacaataatacaaataaagaaatcagaatataaaatctagtttagagaaatccatctcaaatcattcatatatgtctttcattattcatacaactcgtaactatccaatcaagaaaccaccaattttaaccataagaatttgttccaaatatgccaacaataccaagatcagaatacatatatactcaatcaggcaacagaagtatggaaggcagagagtaaaggaccaaaaaggcaaaaacttttcagtgcacttattattagcaagatacaatctctttttcaagctctctttttcctagccagtgcagggcccttgccaacagttggagaagcctttccagattgtggtagcaggcctcgcagcgtcgctaagacaccaaaccccaagaaaggcaagtgcaacattatgagcttatcagatgctttattggaccctatcatttctgataaaatagcagcctgaaaagagtttcccgagtatccaagaagatcaataaaatgagactaatcaatcatcataacttgaaaaaattcaatactgcggagtatgcattgttatttgttaaggacaacaggatacttctgattttaacacaaacccaattagactctaataacagacatttggcgtttcatagtttaacgactttgtcttagttaagtctttatgataaataaccaaacaatgcgtggggatgtttttgtatgcgttcttcactctcttcatctcagtattaaattgatcgagaatacaaacataaacgtaacaaaacaagcagaaaatttcatacggagtacggatatgtactaaattataaattcaaaacaaacccaagtggtagaattttcacgaaccaaaactattatgaaaacccaagttccaaaagtgaagagagaactttaccaatgcggtagacgctgagacgccataaatcaaacaagtggtattgaaccaagacttggcactcaaaataccgtacaaattgatgagagcgagaggccattggaaaaggaactccaaccaaagaagaccgacatagaaatgaggcctctcgtcaaccagataatcgccgaactcacggctataccaactagtgagctccaccaagaagtctgggataagactcgtcgggagacacgtctgcgcgtcgatcaacggagctgccagcgcgataatgacaaagaacacgaacagtatcgcatcagtgactttcaccaaaactcccattcttcctttccctgaaaatcaaaattctcctctttctggttttgttgttgactaggtctttgagacgaaccatgatttaactgttttttttagttaatagaaaaaataagggaaattttatttacaccccaaaattttctaaaggcaccccattttaataattt

SEQ ID NO: 17562 - DNA, 5000 bp, Cannabis sativa
tcaatgaactgtgtaaaccataaacttttgggggcctttaatatgattgtggctaatctctttcatgtcttcttcataatgtggtgaaaaaccttaccaaacatcaagatcccaataacttaacaaattaccaagaactaaacaaactcgagattgacaaaactaaattgaaaaagatgaacaccaaggattttaagtggttccaccgcaagctttgcaatcccgatttagtccactatagggacagtttcaaagtcacacaggttttgataatctttattcaatctcaataaaacagtacaatgtttgtctaagaacttaacaataaacacacttagttcttggagctcaaagacacacactcgaccctctaatgctctctctgtttctctgtttcgggattaacccttacaagtgttatgacagcctttttataggctttggtacaaactgaaatctagagagaatagcagctaggataattaatttaactgtctccttatccgagtgcttacttggctccttaggtggcaagtcacttgatcacaacaccacacataacaacattttttcttagtccaagtggttaatacttaatccctggtgctgctaacaatgatctgtgttttaatttgttgagttagatacttatatctttcggtcttggactattttctttgttgtggcagattgaagagaaaaagcaagctgcagctgatgtattgttccaaaattccaagtttgtgatggcatgcattggaaatcaagtcaagcctagtgacttgaggttgcatttgatgaaggtaagttcaacttttttgctgtattgagagtagtttaagtgcaatgagaaaatcgctaatttcgttcggtgtcaaaataacttatgactaaagaattttaacatattcagaagaggaaaacatgtttaacaccatggataatatgaaaattgaaaaacccatctgaaaacaagagagagtagagcaattcagcctcaacatttctgcttctctttcgtattttcatactcgatggtttgagtgaactttttcatacttgaacaggagatttcagggatgtccacttctctgaaaaaagagtcatcacagccaccagcagcctctgcctctccagaagcaatgggcgagtcgtcaagttctggtacaactagactcgaaaaagcagacagttttcggaacctttagtttgaagcagctataactcctcttctgttcatgttcttgtccgaacatgatctctgatatttcttttcttctttttgttgattttgttgaaacattgggtttatttttccatgtagaccataattttcatagtttttgtgcatagttttcatctggtttttcccttcttattactctactaattttccttgactttataatatgtatatatatatacaataccaataagtatagattctatattggttttgaacccaagtatatcaataatcaaaaagagaaagtaggtgtttgaatttttttttaatggaaaatttaactttatcaaccattaatttccgctaccaaaatagatagcaaatcgattggagcatattttaaactaaaacaacaatcggaatataatatagaggctctaataaagttttacaaagacaatagaatcatttctcaaaaaagtgagcaatcgcttacaatcatagaaaaacaacttcgcaaggcttgcacgacacaaagatatcattcaaacaaaaacaaatacataaaatttaaattgaaaactgaaacaatgcaatgggaatgctaagatccatttacaaaacatacatgataagccattagttatcataaagtataaggttgttaatctcgtcattaaggtccccgaggcaatacacgaggaagccttcgttgtcaatctcagcagccttgcgacctacctcgctcgcgatctgctgatcacgcttgttggtttgggttgcagcaggctccttcttcttctctttctccttggctttcaaggctcgattgggaatagacatacccttcttctcttcattggacgccattcttgtcttcctcgaaattgaaatgattattgatttgctttaccagcagagaagagaatcaacataaaattattagacactcatctgttaatgtataagtttacatatatattgaattcatggtcaaaaaatctatttcattctgagtaatattttatataatattggaaagtaataataaaaaaaggtttatatagctcacaatccatgtaatatccaaaatctttttgagaaaacaaatattttttcctatttgttcctttttatagaagtatttctattagatatgttgtctaacaatatgaattacttttgagattcgataataaattataacaataacgatataatatctcatgatatactagacagcacaaatatcttttagcaatctcagtaaataaagtaaatttaatttttgaaatgaaagttttttatttaattgctaaaacattcatcccttacaatagagaataaattaagtaacaagtagtaagaaaataatggaaatatatataaggtatatattatatgtagcattcatttccttacaatgttaggaaaatttggtggtagtgtcttaataaaaaaactatgttggtgtaactttgtgttttttttttccaaaaaataagcaaataattagataaaaccaagaactagaccaataggtcatttcaatcatatttgagaccaacgcggactccccttaagtaaactatgtattttgttatttctcgctttttaaataaagttaaccacaattaaagtattgaggaaaacttcataagtattcgcggcccgttctcattaagtcataaaaattttatctagaggctccaaggggaagttctccgaagatggtaaactaaaatcacaatacaagaataattgatttgttgtgtttttcaatatttacataattaatttacatctttcaaaattgattacgttgttaatagtattaagtgtgattatatggaataataataatatcaaagtgaatattttttgagttgttaaaaaacttgtccaaattttttagttgttaatttatttttataattattataacaactattgaagatattaaggtgaatctataaaatataaaactattatgaaaaatataatagcatttgttcctattttggttaaatttttgtggttcgagatgttgttgggtggtcggtggctaggagggctctcggtcaggtgggtttggtcgatctaattttggtagaggcactaggaataaaggaagctttagaaaatatactcatatgtaaattctaaatttcaacttcaatattcaaatacaatcaaaattattaactataaattttaaatttcaaattaaacactataaaatacaaactttaaatgtaacttaagtattattacggtcaaaaattaaaatatttatttgtaaccaaaagttaaacttaagtatttatttctcaaattagtcttattttcttataatttttcttttttactttaataatttttttaatatactttaattaatcgatatataattatttatttaaacaaaataataataacaacaacaccaacaacaaaatttctcaagaaaaaaaaacaacaaaattgaagaaaagaaacaaatgtaattacgcgaaaattttgggcttcattgcaattacggagaaaaaaagtgtttcattgttttcactaaacaaaaaaaataattgacaacggctagttcctaaaacggtaacctctaacggtcgaaaaaagattcaaactcccttttaatctctcccattatactactcttctcctcatctcactctcattcttcctactcctcctcttcccaaattttcatctgaattcattttggaagagaagacccttcttcattctcatatctctgcaactaattttatccaaaaaaaggtcaaaagtcaaacttcaaaatcgaagatgttgcaggatatgtggaatgctcctcctggttttagacccactaagtctgctccttcttctccagccaagcctattggagtatccagaactcggtccgagtcatttcatgtgactcacaaggtacctgttggtgatactccttatgtcagagccaaaaatgttcaagtaagttgctttgaatttttaatctttttgagaaaattttactgattttttcatgttttgaataatggtttgttatggggttgctttaagatttttgtttttgagaaaatttactgtcttttcatgctttgattatttgggttttgatttttttttatttgagaaaatttactgtcttttcatggtttgaataatgttctgatatttaggttctcacttctcactggttttattttacatcgaaattgaatgatttttcatactttgattagtgttctgacatttgggttttgatccaatttttgatgtgttttgttaatttttaatatttttgagaaaatcaactgatttttcatgctttgattagtgttctgacaattgggttttggtccaatctttgatttgttttatttcagttggttgataaggatccagagaaagcaattcctttgttctgggcagccattaattctggagatagagttgatagtgctctaaaagacatggctatagtaatgaagcaacaaaatagggctgaagaagccattgaagctattaagtcactaagacataggtgttcagatcaagctcaagaatcacttgataacattcttttagatctttacaaggttggttttcattaccaaaaaagctcttagatttatacactaattaatattataaaaattgggtttatcttcaattgtcttcctttatttaaattcacaatctttttttggagcagagatgtggtagattggatgatcaaattgcacttttgagacacaagttgtacttgattcaacaaggtttagctttcaat

SEQ ID NO: 17563 - DNA, 3885 bp, Cannabis sativa
agagagaaaacttgatttcttattttttttactatcagaagtaattgatctgtatcaaaaaagtttgtttagtaattgatgtgttgctcacaataagtattatggaatatgtaatgccccaataaaaagaaataaaataatgctttaacaaagcaatttttgttatctaaattaggcaggaaagaacagaagagattccttattgatgtttctcagtgagaaatcttataagagaaaggcccaaattctatcttgttgctgccccttcaaagctgcaaaattgaaaacctttcatgcgggtaaatatatttgagaggagcattaaataaaaaaaaatctgcaaataacacgtgtaaaaatgaagaacaatttctaagatatccaatttagagttttgactaggaatggatttaaatattatgtatatatatcgttataaaggtaaagagacagcagtcattatttgccatcaacaagtttgaaaatgcagttacagggagactaatgaatgatactcaccagaaggttcatgctggattcgaattaaaaacaactcaattcaaaaatttatctagcaaatgaagaaagtaggagtatacatactgtttaacagaatgccacaccccaaatggtacccaaaaaaattataatatagataataaaaccactgattcttttaagcatctattccagtggctaagagaaaaatattgttagccaaatagaaaaaaataataatagtacacatcatcaacaggaagagcaagaattatctaacctcagtgaaagcaagatttacgaggtacgaaagaaattgtccaccagtaatcataagaacattcattcccactaatcctccccttatttctgatggtgatgcctctgcaatatatacaggagcagtaacagatgctatgcccacaccaagtccaacaagtaggcggcccaatataagaatataaggatctggtgcagcagccattacaactgatccaagagcaaagataatatcagcaagaagagtggccttcttacgtccataagcgtcattaatccaacctcctgctgatgctccaatcatggcaccaaccaacgccatgctgacaattgtttcctgtcaagtcaccaaaacaataagataaattcataggaagaaatattcttagtatcaaaatcatctcccggtagaaatagatactaacaaagagataagttgaagaaaacaaacaccatagaagagatgcatagctccaaatcatatcaacattatcactacacccaactagatggggaccccaaccatcataggaactatgtatttaaacttttgttttcaaactgtgcttttaccccaaccatcttagaaactttgtatttaaacttttgttttcaaactgtgcttttaccccaactctgtgttcataaaagtatagttttccattgtttttcacttctataagaaaacaaatagtaagaatgcacaatgtcccaccaataatgaaagatttaagggtaacagcttgtacctgtagaaaactactttccctaacagccacaaaatcgtctttgatatataaaagtgctccagatataacacctgcagttaccaatttaatgagataataatttcaaaagaaacccaaaaaagatagagaaagaaaattgagaagaaaaaaaaaagatttgaaggaaagcatataagaatatacacgaatacagaaacataatcacgaaggtgcaatttctaactaaactccagaaacaccataaacaaatccagcacataaagagtcatatttagggacaacggtaaatcaagctaaacggtaggaagattaacacagtaacattcccattcctattctaagtctaactaatagaaattacatatcttccagaatcaagcatgtatgtatgcaacacatttatacataaacgaatagacaaggatatgcagagcataatgaacccttatctccacaattgtattcagcaaatatttaaataaaattatccacaaagattggaagcaaacaatattttatttagtaaattattcctgattacaaatagaccaaaaaaaatatgatgcaatagtaattcacatgtgatgttatagatttataaaaaaacacgatcaaacttttctagttggatgatccaataaaaagcaaaactcatatacacacaataataataaaaaaataaaaagatggataactaatctatatatggataagggtgaggtagaataccagtgtcgtatccaaaaagcagtccaccgatcccagcaactatagtgagacccataatataagggttcttgaaaagtgatatctttctctctgggtacatatccaaatacccagagcttcctggtaatgaatcgatcgtcataattccagggaagaaaataataacgaagatttactcttccactaaacgcaaaacaccccagagatcaaacaatatatatttctatgatcttttctttctcaaatccgaaaatagtgaactgaatttccagatgaaaattgatcaaaatagagaaatcccagttaaattttttttcttgaagaatttctcttccactccaagtgaatttgaatactcagaaatcaatcccaaaaaaggtatgatccaatgaagcaatttcgagctcccttttccaataattaagaaaagatatacttaggtgaagcggaaagaaaaagtaggagaaaactgagccttttccgttgaagacagctgagtgacccgtgaaggaggccaggccaggcaattgacggttggagattgtgatggtggaggagagaattgagagacaaagagagagagagagaggagagagagagagagagaggtaggaggagccatttctggacaatataaagggaaataaaaacgggttgggtttggtttttcagaaaaaaaaaaataataataagggggtaggggttttggattgggtaatctcagaaagtaactgcctatccctcactgaccaatagatttctcgctttatgtggaaaactgttgggtcaaacataaattgggcaaccacctgtcactctgtgtctgtgtgtctctacttatctgttgtctgtgaatgtgtatcacgtgacatatttggaacttttcgtacgttaatgaaataaatttctttttgccacagaaacaaataatttatgctaaaaaaaataaaggaaagtgttttttttttccgaataattaaaggaaagtttatttttttattaacaataaaggaaagttaataactacaagaatatattttggaattaatcatacgtaccttataagattattgaggatggggatgatcacaaatatgagagcaaaactaatataattaatgatgatagagtagaaaaaagagcgtctgccgtttatttgctctgaggcagttattttccttttatggttttttcatcttttactgactttctgccgaccatctcaacccataattctgctcttcacccctgttttgtcatctctgatcattctcatggatcccttaactcataaaatgaaaggtattatcaatttagaggaagatgaggagtcgatacttgcttttgatgaggaagaggttaccagtttggatgagactaaagatcattgcctccttgctcgtgtactcactaagaaaccagtttatttgtcaactctgcaaaaacaaatgaaaggccattgggatggacggttccctgcaaagataactgaaaaaagagactgatttgttcatggtttctttcggctgtgaaggagatatggaaagggtccgtacccaagagccttggcatttccaaaaccaccacattgtacttcaaaaaccttctgctttgcaaaacttgaccccat

SEQ ID NO: 17564 - DNA, 3045 bp, Cannabis sativa
atcgatgttaataataaccaaaagaagtacctctgaagatgtctccggtactcagtgaagttctcctttctgggtatatgataagctccagtctccgccgtagaacccatcttgttcaatctttctctgttgttttcctttactggttctacgttttctcatgaactaattcaacccttttttaaattataattattgttattaattattattaattgctcttttttttaatttttattttcccaaaaaaaactgcttttttaattttattatattatggcgggttcatcgagtactgcaaccgggtcttcatcgggttattcggatcaggaagcgggtcgggtggatgtgaaagtagtggatcagagaaagaggaagagaatgctgtccaatagagaatcggcacgtaggtcaaggatgcgtaaacagcaacacatggatgagttagtgtcacaggtgggtgagctaaagaaagacaacagtcaaatcataaacagccttaacatcaccaaccagatgtacctaaatcttgaggcagagaactctgttctcagagctcaaatgggtgaactcactcacagattacagtcactcaacgaaataatcgactgtataaactcatcaacaacaacaacaactgaaactactacatcaccatacccttttgatcatcatcatcatcatcataataatcagatatttgatgatcaagattctcagatgatgatgatgatgatcaacccttggaactctcttcctcttaatcaaccaatcatggcagcctcagcagattatcagatgtatatgtattgatataattattgtcctaggtggggtccattctctttaattatatatttattagtgttttttttttttttggcttgttttgggtaattttattataaattattagggtgggagatggggttaattttgtgttcttatatattaaagccttttgtgtcacatattattattagagaaattggttggcatatgtaatattattgggcttgtaaaatatatgtgggattgtcataagaatataataaattccattattattgaacattttaactttcctatatatatatgattttattttccttattcctaattgtctgtgcttagatgtacttgatcacatatattatatctatgtaattttgttttctttcgagacaaaaaaataaaaaatgacacaatggtttcaccatgtctatcaccagatgttatatcactatataatataattaaatattaaatcttatatattttaatttaataattattataaatatttaattatatctaatagcaatgtttataaaataaaacaatactattatatagaccatgaactaattcacaattattattaaaaatatcaattagtgaatgatttttttagactttattattgaacattattaccacatttttattaaaaaaaatagagatttaccctctctttttaataaataaataataataataaaagggctaagcttttattacctaatattacttaattaaatctcatttgatagttgtcattacaattagatatcattgtatttagtcggtggcatatataaaaaaaatttctatctatacataattaagtagagaagtaaatatttaaagttaacaaatgatctaattttctaataaatgatctataaataaaagcatatacgtagtataaatttttagtaacttgaaatagaaattaatagtccattatagtctaataaatatggattaatattatttgtttgtgttataacttgctagatatgtaatggcctcacttattattattatattatatggttatatagtggattgtggacctcttaggtgttacatttattaaaattaaaaagtggtggagttgctttctagtgacgagtttatttacttatttaaatattgaaagttggagaattccaatttggacctctttttttttttttttttgtgaagagagatataatattagattgtatatatatattacgaaattaataatagatttatttagagcattgtttttttttataggcgacgttttacgattaattagcgatattttataaatgatatttttttaagttatatgagatttgatatttaattacactaataacagtatgacaccgaggagggtgctaagcaccagtagtgtcttttaacaattctcttttagagcgaacattgctattagatatattatctcacaattagtgagcgatattccttaaaatcggtatgaccccactggaagtctgaaactcgatacttaattatactaggtatgacatcgaaaaaagtattaggcaccaaaaataatttttaacaattcttttttatttatataaatatattaatttgggagtagaaaagatgagcacttaaacttatttaatgagccctaaaaaaaaaaaccttactcaatgaggagatggatagctaggtcgaatggccaattgtaacacctacactaattaagcatatatatacaaaaaacaaaaaacctaacacctaacatcttatgaaatcatgatatgagagtatatacattatattatatctccaaaatacaaaaagaaaaactaataaaatatagagtccctatgagaattattgtgttcttaattattatggagttgtggctttcatgcctatctatagggcttggaaagttgcaacatgtattgtcaatttttctcatatattatattcatcatcatccttataattttcaaactatatattattattatgattatttaaaatcaattcctaaagaaaaatagcaatgtgtctaaataaccttgctattaataatgctgtctgattcttgtccttcaattaatttcagattttaataatatatttatatacatatattttcaagcgctttttgataactattctagtaatttttctattacttttggaatagattcaatatattctaaaattaatcaacccaaccaaattaagtaattttttattttgtataaaaatcacatt

SEQ ID NO: 17565 - DNA, 4571 bp, Cannabis sativa
ctcattagcttgtaccccttttgatcataatgaataatacaatttttttggttactctttcatctgttttgtaataatgtatcttttctaagtattaaactgtggctttgaatgtaggttttaaaaccatttaggctagctcaagtgattatagggagtatggaaagtgcgcgtgtatgaaagtcttgagtttgagttttaaattgtgcagtataatatatatatagatataaaggttttgataataaaaaaaatgtaaagtttagaagattatttatttatttatttatttatttatttcaaatagttgtgacaatggtgttgctcatagaggagctaatattatttatatgttgtaaagcattgcttttgtagaatgggaaggtttcccttggatgccaatcctactatcattgtagattgggcaaattcttttgtaattcattcactgtaattaaatgaagtatttcccttttaaaagaaaaccataattttcatgaatatttgatatttgttttcttaagtggtgaatattaaatatttagagagcatattttccttataaaaatgccctaaagcaaaataaaaatattgagatctttttagttctctagataaagtatttcaaattcaaaccatgtatttatttaacagtaagcaatggcatgttttttaagaactttttgctcttcaaattatcattaaattttcctttcttagcaaaaaggaatatttataaactttgacaccataatctttttaccgatatatgttccattggagaatcaaagtttaaaagagctgccacagatcttgacaacaaattatccaactttaaaaatattggtttaattgaaaagaagaaaagaccttgtaataagattgagattccaaaatattttttgttagcaaattttgatttttcttttttaaaaatagttgcacctcactccaagtcaaataataaatgtttctttttcctcatttgaaatcaaatccatgggatgggagagagaaaaaccagcaatggtaaccccacaaaagcaaacgttatacgatttgtcttctcttgactatgactaataatacttatataataaataaatattgaaaaaattgtttgacaggacaagggacaagtggaagggataatcctctctgcaagatttgcaaacagaaagaaaatctcgcagatatattggatccttggaatctcagctttagacttttgctttaaatgcaaaagctttcacccattacagtttcatacccaaaaagaaagaaaaagatttcaagagaaaaagaaaagaacccttccactactataataaactctctccataacccagagacttgagattacaccacacccatttcaccatttcagactttggaccaggtttaagctttttctgcatctgggttttctttttcttctcagtttagaatacccttttgagttttgaggctaaagagctcggttgagggatttcaatggcggccatggctagtgaaattctcaggcgcagtttagcggaaagtgttaagatttctaatgggtctggctcaggggagcttcatgttcttgctgttgatgatagccttgtggaccgtaaagtcattgaacgattgctgaagatctcttcctgtaaaggtgagatttatcgattatcttttcttctttcattgaagataacaatatttttggttttgattatacacaaaataaaatgtggaagctgattggttttgaatttttatagtgactgctgtggaaagtggaacaagagctctgcaatatctaggattggatggcgagaagagctcagttggatttgatgtaagcaatactatagacctgtgtcttattaaatcattacattaaatccgtttgatttctgggaaatgaaggaatatagttcagtatatggctaaatgttctccaaagtataaggagaacaggcttttgcttcatcagttccagcaagcaaatggcatatctgatcttccattttgcttttcgtttgtatattttgaggtctgatttgttcttctatggtgattgtgattacaggctcttaaggtgaatctgataatgacagattattcaatgccagggatgacaggatatgagcttcttaaaaagatcaaggtttgtttcttctccacccaaattatcacagatcttaaaagttaattgatgatgaaagttttctgccttaaggcaacagataatgaaaataaacatggatttcaggtctttagtgtagttgaaaatcagataaaatcatttaattttaagttaaatacagagattaggcaaaatattatcattctggctttacatagctgtaagagatgtactaattatttgctttatgattgtacaggaatcatctgctttcagagaggttccagtagtgataatgtcttcagagaacatcatgactcgtattgataggtataccttcttggcctaatcttgtctatattttattgtgttaaacttgatccaccccaacccaagattaatttttttattgattttaaacaaatagagatctgatttactgctgttatcatatcttgaatgttctgatttctagatatgcacgtggatagtgcttacctaagttgcaccaaattcttgttaagatacaactttctttgctgtctcattagttgtgaaatatgtacatatccacctaaaatagtaccagactaaataatatgctaaagtattattaattaagtagatctctttggatttagtgatcacatacacacatgtcacatgtcacatgttgtgcttaacctcagagaacaagatccactgctgatatgtgatatctcattctaatatctaaatgaatatattccctatctctagcattatcaattctgccattattattgtataattgagttctcacatgtagctatttgtattatccaactatttttgtttatttttattctaggggttgtagaggatgactttgttgactttctatgatttgactgtctatgccatgtctaattttttttatccaaatgtttaattttaacagatgtttagaggaaggagctgaagagtttatagtgaagccagtaaaactctctgatgtgaaacgcttgaccagtttcgtaatgaaaggggaaggaaaagagaatggagatggagaaagagtgaacaagcgaaagcttgaagatgatgatgacagcagcagccccgtgttgtcgtcacaatcgtcgtcgccaccactttcgcctaagtcctctttggattcatgtaatcaaccaaccgacgaacaactgtcttcttccccgtcttcacccgagtgctcaccaaagaggcctagattgcagagcactgattcactgtaatgaaatattaggccatagttacatgtttttgaattgagaattttttttttggttgtgtaatgttgactgaccatgtaaatgctgacttgaaatttcataggaaatataaaatatatatatacagaagagaagccaagccttgtatgaaaagatgaattgttgacttttgattactacgttttgctaatgtagactgattccttttgtgttttccttaaaatttagattaagattttgcctataatgtaatactattcccatcctgtcctattaaataataatagtaggcttaatatacaaaaaaaaaatgaaataattcaactattaaacaaacgagtgatttttagtcaactagtttcacgtagaattgtctaatttaatatgttttattggctaagaaattagatatgaaaagatatggctgattcgagccttgtttaacaaaggcatcttggagtcctaactgagttgacctaactttgggcatttttaattgttaatagttattttgtgagaatttttcaaacaacaatatatttaatattaatagaataaaatcctagctgcccaccatcctcattggttaactattataccaaatatcaatggatgtttaatttcattaaaactaggattgggaataggcttaaaggatgcaaaaaaaatgtattttcttcttttgttaggaagttctggtcaaaggaattcgtgctatcccatattatgtcatgaattgcttacaattgtcgaaaagtatagattgacattgtatgacagttttcaaaagttttgttgctccaagtgttttaagagaaaacagagcaaaaatacttttgttttattgatacttagctgaatacaatgaaaaggggtttatataggcaataagagtcagttaaggatataactgaaataactaattgaagcaaagaataaacctaaacagatttatctaactaactaatacttatgctaaaagcccccctcaagatggagtgtaaatatttatgacacccatcttggaaacaatgttattgaaagaagaaggaaggagggcctttgtgaatatgtcagctaggttgttttgggaagaaacatgcattagttggagtgaaccttgttgaaccttttcccggatgaagtgacaatcgatttccacatgcttggtgcgttcatgatagaca

SEQ ID NO: 17566 - DNA, 7216 bp, Cannabis sativa
  modified_base (756)..(763): a, c, t, g, unknown or other
attaaagggtatagaaaggtcttttactcgtaaagtacagcgagaggacctttgtcagccaaaacgtgtacgaactatttattgttttgacaattcaaaacttactttctttcttttctcaaatagccaattttatccaaaccaacagtaatctttttagcgcccacgtttcttaatttatttgttttatatgtaatctctctctataataatagttttaggaactaaattgtaatattatttaagaattagtggtgctctctctagtggtgttgggcattattagtatggagcattattaattagtgattttatataatatatattaaagaatatgattattgggttttatagtacctagcacttctaaatatgttattttgtcattgagtaacgatattctctaaaaattattacattaaattatatgagatccgatatttaattagactaataacgatattaacacatagaagggtattaaacatcactgttacctttttagtatttctctttattaaagtaaaacaaataagacttgttattgaattataccaatagctatattatacctctcaatgggtgccctttagcatttttcttggtaccgaagtgcccttcagctatatatatattgaacttagatattataattgaattagggtctactctaggctaaggcgggctaggcccacgcttaggacccactcattttagggatccaaataaaaaaatatattttaaaaaatatacatnnnnnnnnaataattttttaaaataccatttatctttatagtaagggtctaaaattttttttttgcctatggtccactctctcccataaaatattgtatggaagagagtcgaacacactcgatgatgtgcagtcaaccttgaattcgaaagagttgaatcaaaggagtaagtcaaagaattctaaaaatggtgatggattgtttacaaatggcaaaagtgagaaaagagaaagtcacaaaggttcaatagtaaaatcaagatctaaatcacagtctgatagccaaaataatcttagatgctgaattcgtaagaaaatagagcatctcagaatggcgtgtctagagaggcataagacgggtgattcaagatcagaaagagatgcactagaaaaaaaggataccaaggaaatactggattacattcacagtgacttagggggaccctcgagactaccatcacactctagaagtaggtattttctttctatagttgataatactcaagaaagttatgagtgtttattttgaagaataagacgaaagttcttgaaagatttaagcactggaagataatgattgagaatcaaactgaaaggaaagtgaaacggcttagaacggataatggtctagaatacttttctaaagagtttgttgtgttctgaaagaaagaaagaagaactaggcacaagatcgtgaggaagattcctcagcaaaatggactagcagagaggttcaagagaaccattctagaaagggtcaagtgcataatattgagtgttggattgcctaaagtcatctgagcaaaagttgtgtccaatgcagtttatttgataaataaatgtctgtcaacaacactagatttcaagatgctaaatgtggtgggaagccaacaagttatgaacactttaaggtatttgaatatgtctgttatgcgcacatcagccaagaaaaacttgaggcgagggccttaaaatgtattttcttggggtatcctaaaggagtcaaaggatatagaatattatttaataaatctgttatgggatttattgacaaacccgctggaagttaagccaatactaaccgaaatgaaattgaagctccgaggactgagcttgaggtggagcctctgacaagagtggagattgaaacacctatagaccatgaaagcgatgatttgaaagatgatttcagaagtgatgatctgaaaagttataaactggttagagacagaacaaagagagaagtaaaggcttcggataggtacaaacctgttgatttaatctcattcgcattttatgttgctaatatgattgtgcataaagagcctatcagctatgcacaagcaataaaaagtaaagaccgaaagaaatgaaatggagctatgtcggaagagatgcacccccctgaagaatagccagacttgggatgtaatactgatgccagaagacgataaggttattggatgtaaatgggtgtaaagatggaaagaaggcattccaggtgtacaagaggcacgatataaagcaagattggttgcgaagggattctttcagacggaaggagtcgattataatgaggtatttttttttggttgttaagcgcaaattgattagaattttgttggcacttgttgcgtgttaagacctcgaactagaacaattagatgtcaatacttccttcttatatatacatttgatgaaataattctaatgaaacagtcgaaaagatttaaagaggctagaaaggaacactgggtatgcttattaaggaagtctctgtccggtttgaaataatctctgagacagtggaacaagagatttgatgattatgtgactaagataggtctgagaagaaataagtttgatccttgaatatatttttgagagagaaataaagatactttgtatctattatggtgcgtagatgatattctgatcgtcgacaaaagtgtacaagagatcaagcacttgaaactccagctaaagaagaatttgaaatgaagaatttgagttcgactagtaagatcttaggcatggacataagaagagatagacaaaagagactactacgcttgaatcaaacaaactacatcaaaaaggttcaagatacctttgaaatgagtaactctaaggcagtgagtgctctgcttgcacaatagtttaaattaagtgttactcagatgctggaagatgaaattgagaagttagagatgtcgagagttttatatgctagtatttttggctccctaatgtatgtcatggtttgtactagaccagacatagcatatggattgagcatagtgaatagattcatggaaaacccaagaaaggagcattaggaagccctgaaatagattctgcgttatttgaagggaacttttgagaagagactagtatttggcatgaataaccggaatgaagacttgaatgtgatcaatggttatgtaaattttgattatacaagatgtattgataccaggaagtctttagtcggaaagtaaaccttcagaagggtttccctctaattttcgtgtaatctcatttaaaacaaaaataaggattttcttttaaaaggggcgattttttattgcttggtggataagttttattttgtttcttttttaaattggtttccctttctaattttaaatatatatatatatgtatatcaatttgatttcttttattcctcaccaactcatttcatcttcttcgagttcttcttctctttgtcttatttctttatttttcttctttattttttaggaatctccatggccaaaacaaagaaccttggtcgaccaaagaagctggtcgacgttgaggttgctcttgcagttgtgcacgaagttaaactagaagtggctttgatgaattctcacttggctattatggaggaggtttagcaagcgataaccaagaaattgtctactttggtccagcttaatcaagcttcagattttttttttcttcactttatttcactttttatagttgtttaacttgttttgttttctttttgtctttggcccttaaagataaacaaaaatgggaagtagtaagttctaattttttggtttgtgtgtttaattctggacttttttttttcatggggagttgggtttggtttttgtgttaaagttagcattgtagtttgtgttaatggtgtgcttttcagggaggagtttatttctgtgatttcggtaactttgttttgtaggtgtttgttaattaataatattttgattatctaaagtgctaaagagacagattgtaaagtcttttttggtaaattagttatcaaaatattttttttaattaatgtgtaattttcttgtgcaattaaattaattttattatattaatttcgtgcctctaaatgctcttcaacactaaggaaagattcattctcagctgacctcatttgtttaggaaatttgtcttaaaagagaaggaattctcttatagaaaattgtttatttttgggaaacttgacttttttttttttcttattaatgatttcagttttgtcttgattagagaagatcaaataaactgtatttggtaggtattgaagtctgaattcgtgatcttggttcattttggaaagtttcgtttttggtcccgatctgttgatgcagagtccgattttgatactacaaatcaggacattttttaagcaagttttgtacaactgggaaattgtgtttgtggctgtctctagggttactatgttctataaataggacctagagagcagccaaacgattattacatcttctagcttcattttttataattttatctttgtgatgagagagtttcttttgtaaaaaactagagtgttcaactaagtttttggttttcttgtaattatctcttgttgttcataaaataggctgaagagaaactttaaacaagtgcaggtcttcaggagaagacttttacaagtttcacttcgggaggaagtgagcatacatctacaagaaaagatttgtttaagccttacttcgagaggaagtaagcacacatcaataactatagggaattcactacttggtgtgattcagagatcacattagcaaggtggattacaaagggttgcgtcaaattactagagggagtgtaaatttatttaactcaattgcttttgtaattttttgatacttcgctgattgatttcattctttaggcgtgaccccgtgaactaggagtatttgaaagaacactaataccacgtataatttttttgagtcaagtttttaatttctgcactatttatatctgctatgttactataaatctgtattctacaccaacaaatttttattctgttactgcagatcgtaacagctatatttttaattttggaatttaaaaaatatattaacatttgcaaaaaacacaatttttcaaccctagctcaaaggaaaaaaaacaacactcttttgattttgatttcacgttttcatattagttacaatttaatggcaactgaagaagaagatacaaaattgggtttttgaatttattacaagtcatttcttagaacaaaatcatggaaagaaattttagaaacaatgttatgatgtaagtggcatatatttttgggtgcaggagagttgtgccagccaaaggatcacgaagatagtaactaagaacttgcttattttcaatggtttcctctctaaggtacttatttaaatttttgatttaaatttgctgatgattattaatggatttatgctactctattatgcaattgaaataattatgtataatatacttttgtatatgtaagtagtggaaactgatgatataatatggatagtaggcagtgacactgagttaagccaaagctcttttttacttgtatcttaagttgaagactactttagaaatagtttcctgtccattttgagttttttccaagtgtaatatatagtattaatatgattaattaagaccgttaaaaactcttatttaaagacttttatctaatcttaataaaaaataaaatctaacatgaatcaaaatttaagaaacataatttagtacatgtaaaagtttgaaaactataattaaataaatataaaaatttagaaaatataattgaacacataaataattactaaattagtaaaattaaataaaattaaacaaacaactttaatattaatattcatacttttgagagagagagagaagttgctccttttcccataataagacaaaataaaaaatcaaaataactacacctttcaggattgacacactaaaaatgtcccaactctgcgatttacaagtgtggaaaagagaaaacaaactctcaactaattacaaccaaaagcatcatcaccaaatgaaaaaaacaaaacaagcaaaggcaaaagaaaaaccagtgtaattaattacacacagaagagaggttcaccacgttaagtgaaatcttgaatgaacattattacagaaagcaaaagaaacaaggaaaaatcatctttttccagaaagactgaatgagctgactttcatgggagttgcaaccaccaatggagcttcaggggaggagtcgctggcagcaaacttatcgtgcatgaatcgactctctacaatggactcatccttcagtacaatcttgtaacagtaacagctcttaaggccttgttgattccggtaacatccatgtgcggtgttcttcacttgctggaagtcccaaatcacactgaacttgcccactgttgcaaccagatgccgctcttgtttaccattttcagtaacctgtgaaaccaaaatcacacgtgagccattaaaaacagaaaaatacctgtttaaattcatttatataagcaaaaggaaacaaaaattaggaaggatacacttgagattttaaaatcaaaacaacaagcacaatgttgtgaatactagctaccaacgagcataatcaagctccacagttacaattcatcaacataatccatgctaaaaacaaataaggatgtggaagctataaacgtgaaattcatcaattatcaacttcaaagagtgtgtgtgtgtgagagagagagagaagagaaagtggttgttgtacaatgctcaatccttagttcaacatggtcacttttgtgcctagaatcctcttataaacgcgtatttgagctgttccctaaagggaaatcacctccaccatcctggccacatttagggctccaagaagaaattgtatttcaagaagttaagagcattcccaatgcatgaaaagtccattttattttatgaggtctaaagagactgatgtggagctatgggaatagtttcaatggatagggagacatcatcattgtaaactatgctactgagtatttagttaaacgctactggaacatatagttttcataatgctaaggaagtacatatggtgatgcatttaggcaacttcttataaaataaccacagcaagaaact

SEQ ID NO: 17567 - DNA, 10740 bp, Cannabis sativa
actggtgttttataaaaaaacagtatttttaaaaagatttccgtgtgacagtatttttgtaaaagttaatccgaattccagtatttttgtaagtttcccgtaataaaataggtcatatattttgcaaaattgtacaaataggacacccacgaataacaggcccatcccaagttcgtagcacactttcatttcatttcattcccgctcaggtgttttagaatttgccgcgctccgaatccatttttgtcaaaaagagaaagagaattggagtacggacaaaaccaaaccaaaatgtttgggcgagtaagaccagcgtccttctcttcttcttccttggaaagcttcgacttggacagacctaaatctaagattatcaaggaagattctctctccgtctatggtaccattaacccactcttcttcttcttcttctagatgtgatgttttcactttctttcaacttttaatttttgtttttgtaatgtaaatcttttcaattttgtgctgttctttgactaaacttgtttgctctttaatgaacattgagaccattttatgtgatttatcttgttgtgtccatccaaacccaatctttaaacaacccaatacctttctgtaattatcttgttattagattgaccctttgcagcagttagtgtaatatgaaaaatggtttaagaaaatacaaataggatgaacaaaatttcaaaatcattactcaagagctcccaagtgaagtcatgatttttcttctaaatttcaatttttgtttggtgtagaggccacacttgtcaagcttaaactaggttctcagcgcaatttgagttccctacccaagaatgaaagtgatgtagatggtggtttaggttcatgctcaaacagtttggagccaatgaaaatagatctgaagtctccttctgctagtggttcagagttcacaagctcactcaacgagcttgaggaggtagttacaatggatacagattatctttcacagtctgattcagtaaagaactctaaacacaaagaagaaagtattgcctcaattttttaccttttttctaaatttaaaaatgctaaaaaagctgttataatatcacctgaggattcattggcagtggagaatggttatggtgcaagtattcctccaagttttaccacttctcaatctcttgatgttgataccacagtgcagcagtcagaaaatgaatttgtcccttcattagctgtttagccatttttttagctctgaattgggttcatggcatctaagtttataaatggtgctcatatttggtacttgtaatttaaaagaaaaaaaaaagagttgttactcatatgagttactttactgtcaatttcctattatgtctcataaaatttcttataagcaaaaatctttcattgatttataaaatgctcaagacagttagcatagtccatttgtgttcaatagggttagttggctttgaatcgaatgcatgttgatgttatgttatggataactaagatttttttgattactcttttaaagataatcttatattaatcaataatttgttaaggctaatttagtaagaggtagatcaggctatcaaagctacaacagaagcctaatcaccaccaaaaactattaggttagataagatctaggagttctaataaaggacaagtacttcctctctagaatgcccaacatacacccaacttttcatcaatgggataagagccattacttcacaagattaagtttgtgcctttgagctgtccctcaagagattttttaaaataattatcccacatggttttggatgaacaaaaaataaatctcagtttgttataaagttttactggtttgacatctacatcataaataggtttatataaatatacctcctttattgcaaattatttttaactttcactaattttataaaaaattaaagataaaatgcaattattatcaacaccatcaattattgcaaattagtattgtgtgcttcatttctatctttttttttctattacaattttatactcaaattgaaagaaatcaacaccatcaattattatctgaggtggacaaaataactcttccaaaattacaaatcctcagtttgagctttgatgaagaatcactcccttagccatggcgagagagttgatgtccactgaattacttcaccctcgtgaaaccatagagctgcaaagtgcaaacaattgtgagacaaagagcaaaaaaaagttgtaacaatgttgcctttttattccaccaatttgagttaataagctcagattacttttactcatcactcaccatgacaagcttttttagagaaaggaaaataattgcataacaaataatatacagtacaaacatacattcattttttaagaaccgacacaaagaaaaaatgtagctttttattcatctgtgtaaaaatttaaggcaaaatattttaaacgatacatagtagtacaacagtaaggcagtaaaggccttacctatttcacgcttgccattttcaggactgtcgctcccatgaaccacattcctgccagtgcattcatatcagacctcattgtaactttataattcattgctaaatactttacaaccaaatgcaattaagtttactttaaattaaattaatgcatcaccttccagtttgaacagcaagatcccctcttatagttccgggttctgcttgaagagggttcgtagaccctattaacttacgagctgaagccacaacgccaacaccctcccatgcctggcaatcatagtaacattatcagtttgtttacaaacgggtataaagtacataataccttaaatccaattggtttttcaacaagggtagaacacacacaagaatatagagatgtgaaaaaggtaaagtcataccatacacacaactggacctgatgtaatatagtcaatcaatgtagggaagaatggcttagcactgagatccttataatgctcctgtatcagtaaaagttactaattaaaataagggatcaaatcaaaccaattcaactccatagattctccagaaagagtgttgtatatcaaaaaatgaatcatattataaacatgttccaattctccattttaagtgacccatacatattctttcctcttattaaaaatttggccatttgttcattccatcataagtgaaccagaaaatataaaatcattgaattagaattctcaaggagtacatattgagcttcttcataaaaagattgagtaaaagagaattgacagacctcagctaattctttggggcactggaagagctttagtccagtcaatttaaaccccttcttctcaaaccttgaaattatctctccaacctaaaaaatttccatccagacacttaaaatacatgaactttttccattgcacatcatcaactaatttcccattttttatttcagaaaaaacataaaaaaaatatattaaatattttttattgaaattagtatacacttgttagaagaaacagctgtaactaaaccaattagttttgctttcataaaaatcaagtctttttctttcttaggttcccagaaagtaataaagttaaaataaaatcttatgaaacggggataagactcacaaggccacgttgaactccatctggttttatcattatgtaagactcttcaacattttcctgcaaatcaaacaatccaacattttttcttactatagttccaaactcaaataaattcagtaaaattactgaaaaaactaactgggcttttctttcatttgttaaaaatattgaagagagatagagagggagagagagagagtcaaaccaaggaagcaaccaagtgaggaaggaaaatattgggtttggtaagggttttacttcttgatgggatatgagagaagagatgtgaattagaagaaaatgcagctaaatggcggtagtgggtgcgtatgatagggttgtgggagcaggataagctgcaagttctctcaggttgggagctccgaatagatgaggaagaaaggtatggtcttcctccgccaaacacagttacagcctccattctctcacttgtttttcttcacatgtgacgtgagtggccttattatatactgttaaagaaatgaaaataaacgacaacaaatttttggtgatgaaactacatgtcgtaagaacccataaatagaaaaaaaacaaaaaaaaaaaaacaaccaaatcataaactcccgtaactctttgattctaattggataatttgcggccaaactcccttaattttaaaatttagaatgattgattgaaataattagggctgaacttcccaatttataaaatcattttacactgtaccaagtgtacatgtggtaaaattctattggttcacctaatattaataacttaaatattataaaaaaataaataagaatattttaacatttaaaaaatcaggaaaaaaaaaataaaaataattatatttttctcattttctcctttttttttttcttctttgcttcttttatctctttcttcttcttcgtctttccctattaccctaatttaaaacataaaaatccttaaaactaattctctctttctcttgtttcttcttctttgtcatcactctatcaccacctaaggttttaaggtttctctttcactgccatcaaccccaaatcattttacagtaatagtggaagaggcaaaagtccgagcatcccaacttggctaccaagaagatggaaatagaacttggtcaaggtttgtgtggtgtagtttcttcaaatgaaaaggtctccaagagtttcttattattcctagaaagttgttgactcacaaaagcatgtccttgaaggttttcttgttcttctgggaaaggtcttcaagaaagctagtccttctccaaaaaggagttctagatgcctagttgttcctcttagaaggtagtctcgaatagtcgactccaactagcactttcctattcgggaaggtccttcaacgagtgccttagatcgtgacttcaaaagccttcatactcgctcccggatgcacttttacttaggcagacatgaaaacctcgctcaaaggagagtttgttaagttagttattgcctaactaacttaacaacttaacttcttgcaaccaccgactttaggatcttgatcctaagcctgtaaataccaccaacactttaggtagcttagttctaatgaaccttttaaaaattgagagtttgcaatttctatactaaactctttacatttcaagttttctatttatttatgtttgtgattatctttgttattaatatttgcatgatttattttagggttttaatttttaaaattagtttaaattttcaattcacccctcttccctcttggaaacatatctcaagctaaatggctaacaaggtgcaccgttgattcctcttcatttttacaaaatgggcagctaatatcttaaatttggatgcgagagctaagaatcttcctcacaagaagcacatttgagagaatacactatcaaagaatcttatagcactctaaaattttgcttccccatagcttgttccaaagcctaggagctatagttggagtaggagctctatttagcttgggcaagataagctggcttggtactaaattccccaatactttccagcttccataacctatcagacccctgtctcttcgaaactccacctttaagaatagcagtaacaatttcgtggttatataagtggttaagtttagacaagctctagtccccattatacaaaaaaagacctgccaccttgatgaaactttctcttgactccccaacaggtctcgaacacatttctttcttacgaggaacccaagggtcctcccgaatatttatacttctaccatcactcatctctaaataagcacttttcatcaagatgtcctagttttgaccatatttttccaaaattaagaatcataatttttataattacaatggagaaacttgatgggtttgatgtttttgggagcaattacaatataacataatgcagtgcacagtttgatgaacacctattaaaaatattgtcaaacaaacttaatcttgtcctaatttaccatattttatcttatctttattaataatttctatggaatattttactttactgtttacacaaatcatatatattcttctttttggagaatatttttagtattttaatattcgtttatttttatatttagtcttctctctatttttaaattttgttttttataaaacttttttatgacgagatgagtaaagtcccaacttccattaaaattgaattttttgaaacatgaaacataacacagtgacatacaattacaaattaaaataaatcaatgccagtcagttcttctgatcaaaatataaattaaagaatcaatatatacaatttcaatttttacaaataaaaaaaaatagaaaaacacaacaagacttcctcctttttattcattataatattagttttaaccaccccaaaacagagcaatatccaatattgaactcacattgagaatatggggcattactaattattcttcacacaacaacaggaaaaaaaaaaacgaagattttaaatcaaaacacacatttttcattgtcgtttttccatctgagatgagtaaaatgggctcagcatttccagcaagaagcagcaacaatgggcctagatttccaaccaagaaccaagcagcccttttcttcgacaacagtgtacccttcacaggcctctatctggcccaaccattgtttcgctgagcccaacatcttaatgggcccagcttgaaacccggcccggctcattcttcttctccactggtctactctctcgtgcctctccactctagccggaccttcacagctgattatgttcttgatctcttcagcgaagtagaactgttcaatcttagctcttctggtatcgtacttgggtaacatggcgtccaacgaatcaaagattgcagagtagtaatggagagcctccatgaatcttccaagaaagaaaggtccattatggctagagtcttgttcgacaagaacaaggactttagggttcagttcgtgaatcgtttggagtacagaattgagagctcctctgctttctttgaccacgcaatggagttggagaacgctgttcaccgcaataacttcgtctttcgaagttttgatgtcttttgaggtcagattctctaaattactcttaactactgtgaattctaagttgaggtttaaactgtttgcgaaaagttctagttcatctccgatgatttggaatcgttcaacgcagagcccaactgcagtgattcttagtcttttaggcagttggtgtgttttggctctttgggcgaggctttggataagcgcacgccattgttctccatgtgctagaccaagggtcatacccaggtcaacgacatggacgtaactctctccctcaaaggcttccaatattgaagcattagctacaaagtgaccaaatttaatgtgtgggctaatttcatagacgaggcgtaaagcctcttctttcttttctgatattccaacgtccataatgttcatcatcataggtagtggtggtggttgtggtggttgtagcgcgataaaaccgactgccccaagtgggtgaaccatggctaggcgatcagctagtccttggacaaagcatgaagctacacgttggaaagaagagccgaataccaatgcattggctcttagctctgataacagaacagaggcatgtgatttatctctacaagcaacagcttctgcacaagcaatgagaagctggacaagcctcatttcatcagcttctccttcttctgatgtagctctgttctcttgttcagcagcttccatgattgcagctgcagcttcttctacagcctctgctgcgtgatatagttgtttataagtccatatgtgatcacggaattgcatagtctgcatgttacttaagctattagtactgctgctgcggctcatcatgctgctgtttgaagtgtcattactatcattatttcctcctccacctctataaggcgtgttgttattactcgaaatcgattcctggaagctatgaactcgtttcattctcttgttttctctggtgtcatatgagaaagggaaaatcaaggtgttgccacggttgtcccataaggaaggcatgtaaggaaaaggatagctagccatggctgagagactgagttccacaccactcagctctttagtcttttcaccattgatgagctcttttgtgaggagatggtgaatatcagccatttcttaaactaacccttttcagcctttcccctctctctttctctcttttagaggtattttcaacaaaggccctgagggaccttattgcttgacaattatggcttatatagggaaaaaatttcactgataaaaatccactccatgaggatttcttgttcggcgtgattttcaatacttctataatagaaattgctgtgagagaaaattaatttgttattactgtcttcctgaaagggagcatcaggacaaaagagcatcgatcaatcaaggaaagcgatgcctatttctttccagagtttttggatttcgttcttgtcttgcatcatgcataggtggctggtctatattttcacttggcgacagtggaatactcaaatacattcaaaagggtatatgtcgttttctcaattgtcctccgtttactcaaagcttgtaccttttttctcatctgagaatattttctcaactgtacctacgtatcaatttcaggcggagcctcttcaaatgattctgctacatcaaattaaattaccaatattcactgatggagatggagtaagttttctttaatcaagatttagtaaaagtggtcacttttattcagattaatttcttctaaggtatcaagtgatttaaaagatgctcttccaatagtgttgcaagttgcattacatcttatatatgtccctggtcttcagttatctctctctttcttatatacagacacacacaaacaaaattaatcaatatccatgtgatgatagcttcactagatgtagaatttgaagtcaacgtacttttacatcttacttttttgcagcatggtatcaaattgaacacatgaatagtctggccggatagtataacaatattcagaaaaactacaagcacctgtgttcaagttttctgcataggtatgttttttaagccatatacgattctaaatgtaagtgtattttatatataaaaatatatttatacacatataacaaacatattccaagcataagctagtaattataatacttagtatttatataataattgttgttcgttacaatcaactttcaagtgaaagcttcctcctctgacagtactagttttgatggcttttaattcatattaattagattttttcacatcaatttcttataaagtcaaatgttaatttatacactatggactgcatattctttttcttgaaagcaaacataacaatgaagaagaagacaagtattttagattctatttactacttgtcattgtgacgtatgcgtcacacaagaaaatcatagctactaaggactttttactattttatgcatatataaaataataaagttgaaaaggatattatcatatttgtatctaaactctctctttaataatatgcgaaaaaattaaggtttctcgttcttaaatttataggtgttggaggtttttttttctttggccaggcccactgaccttccttaggtttaggtgaaacttggtcggggttgtattttctactacaattcagtttttgctattgcgattagttgtctttgtgacacgttttcaatgttttagtcttgtcactatcacacaattttaagcatttttgtcttgtctctatgacatggttttgttttgttttgcttcgttgttgatttttctttgttctttgatggctcgccatcaaatggttgttaatagttgggaataacaagttttttgcgactgaagggttgctagtagtgtagttacataccttactcaattgttgagtgctcaagctacgaggttgaatgaacctattgcaactgtttctactgttgtgtcttttgagcggtggatgaaatagaatataggtgttcttaaagttaattgtgatgctgcaatcttttttatctgactttattttagttttttttttttttttgtcgaatgatctgggcatcaggagattgattatttagttcgtttttttaattttaattttagtagtgtctccaaccagagatgtttcgattagattgtaggatattattttagtccattgtggttaataatattttattatttattaaaaatatatatagttgaaaaactaataccttgtaattcttgttgatataatatttaaattagtctccttgaactatggaatttttttaattgtaattatttttattttaatgataacagcatagattattcctttttcttttctagaattgaatgtctttgtcatggggccctttcaagtaatacattcaataaacgacacctaatggaattcttagttaaggtaagttgtaatgtattgatatgtatttactcaggtgacaaataagttatacacaggagagcgactaagagattttgaggcaatgtcagcaaaacagaactattttttttttttttttt

SEQ ID NO: 17568 - DNA, 8682 bp, Cannabis sativa
ctcacttcatactactgtctcacaactttctacacttatatatgtaatacgatcgagattatcgctttcttagatcctccgaagttgtttcctttttattttttctttcttcagaataataatttagcggcacgacttagaagaacccgtattccttttcgttggtagtgtgatctgtaaacgctttgtttccagctaaatatttttcttttagcgagacaaaaagttatgtttcttatgaattaagtcttaacatttcttgtttcagcgaaaagggtatcactctagtccccaaatctgtattgggtcagccttatttttgtctctaaacatcttcatttatcattttggaaaaagggtttccataactttttcatcttcattgactcgtgattataaattaattctgatcaatatatcttcttgaggcgatttgggtttctgggtcattgagtttcagtgaagttacgggtttgagtcatccattgatcgttttgatgctttgagctattgataagatgcaggctgatgatagaagaaaggtaattttattaagttaaagctgtgtatttagtttactcattcatttactttgttagttattgaagcaggattaagtaagtgtttaaataaatcaaattattgaattgtaactgcgattcagatctctgtcattgaatcatattatgaagatctacgttttatttttctatgctttgttttcttttgtccatttatattcaaccttttgttatggattgccatatggctatcccctaacacccactgccgaaggccccactgtagtgctcttgtcatgtaataagaatttggtctttgttttgttgaaatgaaaacgcttcaagtttgaattttatctgtgattaaaatgtcacccatgtttatggatgggaaaataatttaaaatggtttgactgggtaagtggtttctactaaatccgtgttatatatagttggattgttttttaatggggattttgtaaatcatagattattacttatcattaacatttttctattctttgccttattgactttgggagtcttttaatctgttatttttctctttccttttcgtgatattataaagatataagattatctcatttgaatttatttctatgtttgtatttatcttgttataaattgtaatagtttccttttcacttcaaagataaggatttcaaatttgaatagtttttttatcagtttagaactaggattccttaatctgttatacatgtctatatatttaatgagtatggcataaaaaattattcagttttctccttttaaaaaaatgttataggttatctagccagattgtttatgttatatgaaaagtttcacatttaggtgtttcgataattggatcaaattttcaattacatgttgcagtcaactgcagaagtggactttttcactgaatatggtgaggggaatagatatagaatagaggaagtgattggtaaaggaagctatggagttgtttgctctgcatatgatacacatactggagagaaggttgcaattaaaaagattaatgatatctttgaacatgtatctgatgcaactcgaatccttcgtgagattaaacttcttagacttcttcgtcacccagatattgtggagatcaagcacattttattgcctccttcaagaagagaattcaaagatatatatgttgtgtttgaactcatggaatctgatctacaccaggtcatcaaagctaatgatgatttgacaccagaacattatcagttctttctttatcagcttcttcgaggtctcaaatatatacacacaggtgatagtcttatgctggatcttatatatgtccgaaatttacatctccttggtgtattttaaaaatagcaatcctgttctgatttcttgttatcatggtcttctagcaaatgtatttcaccgagatttaaagccaaagaatattttggcaaacgccgactgcaaactcaagatatgtgattttggtcttgcaagagtagctttcaatgatacccccacagctatattttggacagtgagttctagcttaatcaactagttagcattcgttttttgaggaccatatgttataaaacaaagacaaaagcttatatagattagagtgtattctttgaatttttattctaattttttatattttcaggactatgtagcaacaagatggtacagggctcctgaattgtgcggatcatttttctcaaaggtgctgaaattttacctttcactttcttggaagtagttttagattgacatctacaacaatggtcatccataccagttattaagattattcaaggattaccatttgatttttatcttaaaaatcattacagtgacttttgtagttggtttatgattgcttatttgtttacttgcttatatttatgctttattctatggaaaaaagagttggggtcagtttggccgagttctagtttatgcagttttagctatgatgtggaaatctgctaaaggatgggtgtttagtagattataaataaaaagtgttgttagtttttttttttttttttaaagcagttttcagtaaattctataatcaaagttctatgtaaaatgtaagtataaaactagtaatatgtaataaataacattataaaacaacatataacaagtaacgtgagaagcatctatataaataactacaaaaataattgtttttaactttataatattttttttttgaataatttatttgataatctttttatattgatatttattttttctttttcaaatatttttgttttaaataatctgtcataatcaaataaatatatataaaataattattgatatcagttttagttgagtaaatttttataataagctgttatttatttgtttaccaaacagttttagcttttctaaaaacttttgcaatccaagatataggcatctctattatgtgacttgtcttaattgcacagattcattctgcccttgaaatctgagatgctttttcttataaacatagtgacttcattctatgattttctacaagtcttttggtcattcatatttcatattagcaagacaagtgattctttaattctttattactaatcataatctctgctccatttttcagtatacaccagcaatagatatatggagcattgggtgcatatttgcagaacttttgactggaaaacctctttttcctggcaagaatgttgtacatcaattggatctgatgacggatatgctgggaactccttctgctgaagcaatcgccagggtttgtcttatttattcattgatgttcaactatattgcttatctttgatttcggagttgtttctgtctgcagtaatgatttaattaaatctattatttaggtaagaaatgagaaagcccggcgttatttaagcagtatgcggaagaagaagcaaattccattctcccataaattcccaaatgcagatccactcgctcttcgtttgttagaaagaatgttggcttttgaaccgaaggatcggccttctgctgaagaggtatgtgtatgtgtggagtggagtggagtggagccagtttactttcagtcatgaatgttttctaatgacacaaagttatcttcttttaggctcttgctgatccctattttaaaggcttggctaaggttgaaagggagccttctgcacaaccagtaacgaagatggaatttgaatttgagaggcgaaggattacaaaagaagatgtgcgagagcttatttaccgtgagattcttgagtaccacccaaagatgttaaaggagtacttggaaggatcagagccaacaaacttcatgtatccaaggtattgatagtttttaattgtgtgcacatgacattgtttccagcactacatgcattcccattcttctgttaatgtatatccttgatttcgggacatctaactttcagcccaatattataaaattttcccattttgcaaacacacacatacacacattagggaaagaagtttttagaccaaaatccttttttctttgacattacgaagttctgtggtgcaccaaataaatatttgaagtttcattattactacttgcatgaaaattgattgttacgtctaatctcttttgttggcagtgctgttgaccattttaaaaagcaatttgcatttcttgaggagcactatgggaagggtggaacggttgctccacttgagagacaacatgcatctctaccaaggttttatatatgtgattgcgtttgtgatgcttattgcttctttgttatgctgctgcttttgatccaattttgacaattacatgcaaacattttcatgtagggcatgtgtattatattcagataattcagtgcaaaattcagcagtagtcacagatgacctcgctaagtgttcgatcaaagaagttgagaagccacaacaagtagacagaagtagtggaattcctggcactaggcttccaattcaagtttctcaaaccatccaaggttgatagtttctctctgatttccatcaacctatcagttttcatttatgttaattttttttttgcccaaatgatcttgcaataacatttttctttcaatttctcccttattgacaagtactgctgtgtctgcaaatctttaaattcttcagctttcttgttcctaaacatccttttttgtgcaggaggagctgcaaggcctggaaaagttgtggggtcagtattacgacacaacaacggtggcacagctgtaggtacagaagctctagaacaacgcaggacagtcaaaaatccacccgttccaacccaaaaccctgcaacaggggtttcatatcctcgaagaaaccctccaatctgtaaaaatgagaggggagaagatgaaggaattgaaggttcaaacgggcgaacaaagccgcaatatgtcatggcaagaaaggttgcagctgctcaaggtggatctggcagtcaatggtactgacttagtggagcattgattcattcctttaggtttcaacttcacataaccaatgtacaagggttgaatcttttaactggtctaaactaaactatgatgttcatctacaccatgtagcccagataactgtatttgctaattttaagtgtaggaaagtttaaatggatcttatatctctgtggcccggttttgctctatgtttcggattagagacacagttcaatacaaagggcaatgtgaggaaaggctgaactctccagatgactagcctagttctctgtttcattttcacattctttgcaatctaactaatgttattttttagtaaatacttatattggccacaacaccagtgatcaaacaatggttgtaccctttactcaatattattattttgttttttaagtcaatgaccatctctgatgtaactctgcaataggatcaggctagcacttggctgtcatgaaataagaccagtaaaccaccatgttttcaagtacattattattacaataccacctacaatgacattgattatacatgttactatatttgactaggcagatcatatatgcaagaatgaatatgtatgaatgccatgatctacttttcctatttgacataactagcaaaaaggttcggacaaagccaaggggacagaaagtcatcagatataataatgaatgattaggctaagcaacataaaactgcacacaaatttacggggacaaaatgttcttcacttgatacaacaaagtaaaacaatatttcacaattggaagcaaaaaagttacaagaaaacccaatcgagccacctttcttttcaaatgaattagctgttagtagaatgaaaaatgtgtaggatcctaacgagctctctttattgttgcggtgatgacaatcttacttggtctatcaatacaaccttggcttcactctcctcctgttaacatcactgccatctaacaatgttaacttgccatatccacaagtaataacagaatgctccccaatcctcgcaacatattgcagtaactcggtaaggacagacgggcaactctccttcaagtattcgaatccatccgtttccattacagctgaaagcgacaaaaaaaaaatcaccatttagcgtctatttgtttcgtgtctagtaaaagggtaagcagaaatccaaataatgagaaagaaagttgaaaagcaatagaaaaaataatgatacacctagcatttacggataattctgtttcaaccatgttcatgtgggtatcaggaactagagaagtcgagcataaaatacttaatcagcaaagttatggcccattatggggaggaagtttccttatttaactatctcactatagatagcttcaaatccaactttctttctaatgttcacatcaattggaatcatttaaattgcagaaagtcttaaattataaataaatcacgctctaaaatacagaagccattcgcgccatttagaaagcattgaaacatttaaagctttattagtcaagcaacaataccttttaagttttcaggcgatgcaacgaatttaagacacacgtccttcaactgaaaacaatggtgttgttctgccaatgctaatgtagttgcaacagtgtttatagagatatcctcacaaagtttagcctcacatagcaatttaagcctctcaagggcatatcgatctgccgctgcaaggagatgctgagccatcattgtagaggcccatttcgtgttcagacccacaagctcttccatgtcaggaagtgcatcccaatatatgaaatggagtaatgcctgcacatagggcaccatgacaaaacaaaagttaaatcagagccatcttactcgttcacagagcttctaaaaatgtaacttagcaaaaaaaaaaaaaaatcaaatcaaatcaaatcaaacaaacagcaaaataacaaggcaggggagagaatgcccaatttgacatgccaacaaaatcaatacccttattctccctattccagtttataaacgtggttaaggatcatctaataatatggcgaaaaatcttcatccaaagttaatatatagcataacaaatatatactaagctcctactatggttccaactcacactaaaatatgtcataaaagagggaaaaaacacatagacacacataagcatggtataaataacaaatagtatatccataattgagagagagagagatgattaaaccttaaataccggagcttccatgtcttctacttttattcgatgggtgttcttatccttaaaaggaccaaaaagttgtgctctgaacaccggagagcgagctgctagcactagcttgtgagcagcaaatacttcctcatcaacttcaaaactcacatcacttcccttttcactttgtaaaagatttccaaaatgcttactaatatctggaggaggcactgctattgagtacaccttgggtccttctgtgcatgacttaacaacaccaacacaacattttatggaaagacagtcgtctttgaggtagtctgatgtctctaaaagacttcttttgaaaaagcgtttataacccctacagcatccaaaggaaaaatgtaagaaataataccaacaactgaaacaatacacactagagaatagctagctactgctgtagcttcttcaaagttcaatccatattcgaaatagagtacaattgaactgtacgaacattgaagtccgaaatgaaaaggaagaaggggggaattgctagaaatggaaatctaaggctttgacaggacacaaatatgtggtggtatagcttcatcacatattaacatccacaacatataggtatgacaatttaggaagcccaaactagaaaacacaaccttaattgaatccaaatgctataaaattatagcagatgaaaaatctaacttaaatttcaagtttcactcccaagaaatttaacaagaacattaccactaagctgatcagctaagctcattgaattaatcaaatatcatatctacaataaaatcactgaaaattacttccaaattataataatccaaatggtataaacacataccacatgcttccacggtatttaagcgtataaggaccactctcaagcgctctctcaaaatggctatgcactttgtgtcttcccctatcgctctgatccaacaacgtcaattcaaacaaagcccttacatcagctccctcgctagctagcgcgatgaaaagcgaaacatacgtggcgttatcttcgaggctcttaccgtctgggtaaaagtaaatagcccaggcatacccaccaaccatgaaagtatcggaagctatgtactttccaatacccatacccttggccaatgagtagccgctgatcttaaaatcgtgagacccatttacggtctcggttagagacgtcgatgtggtgagcggtgagagatccggcgagggtttcgggtatcctctacaccgcttgattgtgtccatcaacaacccaattaccgaattgagaatctggggtttcttagtatcctaatacgatcaaaagggtcggattgaattagagaatttgggatagaattaaaaaaaaaaaaaaaaatcagaccatattttcaatctagggtttttctgaaattttgagaaattggggggatggggatttgaaattggatgaagcttataaccttc

SEQ ID NO: 17569 - DNA, 3158 bp, Cannabis sativa
cacactattttaggtgcaagcatagacaggctatgccttcctcggttcttttcctataaataatatctgtaatgagaatcttgttttcactttgccaaatcttaggtaagtactaagtagagagtttaatttaagtttgagtgtcgaaatgtcttttgtagttacacccaatttggttcttgatccacattgaaaacaacccagcaaaagaaaaggaaatcattcacccaagaaaatagttttagatttctaaaaggtaaaagtgattgttttagatttctaaaaggtttttgtttttattttagagttcaacaggaacaagaaaattttacacgaatattatgataaggcatcagtggtacttagtaccactataaattagtgaatagtaatattttataataattattatattaaattgtaaaatttaatatttaatttaagtaataacgatatgatattttagaaggtattatacaccacttataatataaaattagagtatttttattgagtgcccaacaaattcaagagatagcaacttataaattaacaatattttttaaattattaaagagaattgctaaaagacaatactacttagcaccatattcatcatactgtcattagtgtaattaagtatcgagtcatatacaacttaaaaaaaataattttatagaatatcgttaaccaatcataaaatgtcacctataaaaaatgttatgatacccaataacaatgctctctatgaaattatataaaacttgatacttaatttcctagacaccagtattgattttagcatttctcataaaattattgaaagtgaaatggcatgcaccctaatgaataataagggcattacctcatccacaagtaatcatcatcaccacagccacaaaaaataagggcaaatagctcaactctagatagggatgaatcaaatcaaacctaataatgtacatatcacatcatgtaacaacatttgaaatttcaaaactccaaatggaagattgaaatcccaactctaaaatagaataatactattacttactcttttaatatgttcaaaaatataggtatccaaaacacaataataattaaaaggcagctaataaaaccaccttcaataatacattattactaatgaaattgaataatacaacatcttattatacaactctactactaataaaagaaaatcttagaatctttcaaaaactgagaaatccaaaactaatatatcatacttgggttgtccagattcaaaaatgataatattaaagtcccacaattaggaaggaaagactggccagcaaaaatatgaaataaaaaatataaatatgaaaaaaggatgtgggaaagtcccaaaatcagtaccaaagaggaaacaaaaaccttaaaaaataattaacaaagaaagttacaacaattaaacagagataataaaccataacacaacctaccatcccatatactgtacatatcatctgtcgtagtcgtcgcagctgcataagccgttagcaaccaaaaaatggggcccatggctgttggacccaactttcgggttcaaacagcctaagcaggattttaaccattatcacatcactcgaggacagccacctcttgatcaaccctccaataatttgcatcgttgaattctttcattccgggtccatcgtcagtgttctccttctcttgtactttagggttaacgtttctcttcaatggcccggcttccccaactatcccttctttaagggcttgttccatagctttttcggtgccttctatttccacacctacaaattcaacatcctcttcgaacagtgaaggtactgccacgtttctctggcccacgtcactgcctgtggcggttgttggagagccattcgaaagtccagaatctgcagttgaaggagaactttcaccgggagttaccaactcgttgttaattgaatcagtaacatcgggattatctgaatcaacaaatgggttcacacttgagccaccaacttgcaaatctgaagactcaccccacccaacccattcgggtaatggcctatctccaaacaagtcctcattgtcagttgcttcaaatctaaaaaatcccatctcatgcgaatgagatgcacttgccctctcgctctcctggttcaaacttccactattagatccattaatggcgtttgcatcagaactagatgttccattgttagaatctttgtttccagcgagctcatcgtcttcaccaaccacaacctcatcatcactactgctattgccaccatttgcagttccatttatgtttatatcttccatcatatctgagggtgatgttccagcaggcgcattaccgattctgtcatcttggaatgcaaaccagttggaattggtgaatagactgctgcataaataattgcatatagtttagtaggtaactcgtaacatatagcttctcttgaaacaaaaagccaatctctatttttataaaaagtcccaagtgacaattaaatttattcgggtgtgagaaaatttttgtattaagcttcatgacatcaccaagttcctcggtcatatcataagataatatgtgtaccatagaaaaatggccaactcacctcccttgatcatcaccgagtttaagggatgatataacaacttcggccgattcatcatcaaagtagacgtcctgcatttaccaaaccgaagtgagtttttgttaaaataacataagtggaaaaaaaatgtagtgatgaattttatcatatgtaagaacaaattacctcatcatcacgatcaagagccccatgttcctgcaacaaaaatgtatcagataattgaaattaaaatacaaggcaaagaaaaaaaaaaggaaaaaaatttgaaaaaacatagaagttgattgaaaacttaaaaacaaatctgtacctcttctgcatcttcattcccatatattttgtatctaaatgcctggcttagattatttgccaaagctgcaacgtcataatccctgtcattcaggtcatcctcatcactatccctcgtcctgtcttgcaaagcagttggtcggctgcatgtggtaaacaacaaagtcaataaatcaacaaggagaagctaatattactgtgatttatcaagattattaagcaaagctt

SEQ ID NO: 17570 - DNA, 3041 bp, Cannabis sativa
  modified_base (32)..(32): a, c, t, g, unknown or other
attcatttatcagaaaatcaattatttatttntttccttaaatagaaaatcattttcttaattagaaaataatttccataataaaaatattctaatagtaagttctcccaagaacaccttcaacttttgaagacaagccatagaatctaaactgcacctcaagatgaacaaagcagtcgttttgaggtatctggtagttgtgaatcttgtcatcttgcttggtcacaggcacaacgttgactaaaatctcagccaattcggggatgttgaccgtgacgctgttcttgcttgaggttctttgaactcggattctggtatttgggcattcccaaaacgacaaatggccatatgggatgacaagattttctccattcaaggagaatctaagatggtctacttggtcgtcccatgtggaagctggtgtggcctcaagtgagaaggtgtttgagtgaaagagaagaccaagagcttgaatccaagtgtagtctcttgttcttccggcgggccggagaccgatgaaccgggcatttatttggaggtttagatccgacaccaaggtgaaatgctcgtttctcatgccatggaagtagaaaacgacaccgtctccgcctatgaaacgagggtccaagcatgctgaccctggtccattgcaatttggttttcggtctacatttataagcacaaacaaggaaattatgaattgagatgtgatgtactagctattataaatcatagaaacataagaaaagagtaaaaggatatgaatgtgaacgttagtaatcttacttttacactcggcttggcaaatgggtgagatgcagttaacatagcaaactttagctttaggatcagttggatttgctgttgggcactgctccggacaagttatcttcttcttagaacaagggctgcttttggcgaagcagagcttggtgtctggcttcttctttggtgctgcttgaatttgtaccaaattacatgacataaagagtaacagaatgaagaagaacaaactagatcctcttaagctttccatcgtgatagcttgagaaaacgataagtttaatcattctcttttgtgtttttataggttttaataagtggactttgggattgttattaaataatataattgtgtagtacagtagtaaaactttgtgtatttatttgatagagaacgtggagtacgttggattcattacttcttcgcagaaatgttgattttagtcaatggatttagtagttttgagtaagaaatgatattaaagaactgctactagtgtaaaaaatagtcagattaactattgggtaatgacaatagaatcttcctttaaagaggttttttctattatttgattttaattaatgttaactacaaacgaagtcagctttgttcacgtgatgaaaacaagttaagttttgcccctgcaaactcgccgtagatacctctgttccatagcttcacaaggtcacttactattactttgttttcgtttagtcttatcttaattctatatgttatgcatagcttcattctttaacacttcatctctaaatttatactccacaacacaagtcacaactaatcttctagcaagttgccattggttttgctcaactcaagaaaacttccctttgttaacaagtgaagaaccaaagaaattcagagactttcatcaagtatggaaggttatccaattttctagaataggtacgctttcggttatgggtcttgaatgtatttgtaaagctacaatgtaaaaagttattattgccacaaacattaggtattcttgggaacattttttttttatgcggtgaatagaattacacatgattaataatgcagcaaatcacaatcggcagtggaacctcctcgaaacaggatagctcatcgtctaaccgaagagcatgttttgctaaactatgagctgcagaaatcttatcgcgagccacatgggagaaaactgcgcctgaaaatttagataataaagttataacgtcttcaaacaacatcctgtcatattgaaaaataccttcccattataatagttttcgtcagagttagcgaaactgaaaaaaaaatatagcaacaccaaaccaaaaaacacaactatggtagaatgataatctacaaaataaaaattaatatacaaacctaaaatttaacacaaaacccaaatcacaagctcaacattactaaaaacttaaaacaacaaaaattcttgggaacattgaaataggtagagttaatatttaattgtttcaacaatgacataacactttattggtattaggaatttagatattgttatttgaatattattattgggtattagtgctgcttaacaccttctaaatgtgttattttgcgattgattagtaatattctttaaaaattattacattaaactatatgagactcgatacttaattacactaatagcgatatcaatacataaattgatgctagacaccactaataatatatgttttgagatttctcttgttatttaacatttcacttatattgcttgtttatattaatttattactgagtaattttgagataactacagagtatctcgaaggaagatacaaatttgtgatctactattaaaatatatttcatttgcaaaagttttgttccaatgatgtattaaaaaatgatttaaatttgttatatagcttaagttgatctaagtttagattacaaataatatatatgtaaaatttacatcataataaatacattattttgtacttgtatactatttttaatatttaattattaattttagttagtacattaaattgtaaattttttaaagttattttttttatcttttttatacaataaaataataataaattaacgataaaggttaatattattttatagttttaatgattaagtacattgctaaaagttatgtaactaaagtaatttgcagcaaaaatacctaagttttatgtcgagtagcagataaatacctaagtcctatttttggcggtataaataccttccgtcactactctgg

SEQ ID NO: 17571 - DNA, 12034 bp, Cannabis sativa
  modified_base (26)..(28): a, c, t, g, unknown or other
ccaaaaaagtttagggggcatgattnnntacatgtcaaagtttggaggaaaaaaaatcctaattaacctttaaataaatatgtgagagtgaaattaagtacaaacaatctatttgttaaatttaagtgatagtagagattcacttgaagataagtgctcgaatatagtcattattttgaaccatataaacttaagacaaatatgttaaaatctatacattaaagataaaacaattttggtgaacttaatgaacatctcatattggatttgattcgatttaggtagctgagagagctctatatgtgtggaacaatgaacactttgtgaaaatggcatcaatggcaattgaagaagtgtttccaatggtagtggaaggcatggagaagaatctcaagtggcattggaataaaaacgttcaactactcacacaagatgtcaaacttatgctgcaagaaatggatccaattttgtactcaaaatgccttgatgagactcaagaaagggaatccaaagctctcttggctgatataaacagaaaggaaaagtgggacagaattgaaatggcagcagataataagactaagactaccactaagtccaactatggttttttgcaccaccagtcacaatcaccttatatttgtgtttaactttaaaagtaattaaattagtgacttaagtataaagtgcattatttcaatgaaatcataccataatatacatgtatatatatatttattatatgtaccactcaactcaactcatgcatacattattattgatggttacccaactagacataaaaaatatcttttgtaatttagagtttctttattcttgcatcatgaatataacaaggatgtttcaataaacttttgtgaggtaaagttgattttagttcttacaagtaaaaaggtaaagtaaaataccttaatctttatattagaaattctttagtaccttattgggatttgtactttatttccattaaattccaaatttccttggcactattgaatattgatgctagttgtaaagatcattgagaaagtacacacaacggcacaacatattaattcaatttcaatcacaattcttcctctctacaatcagttcttgagaaccatggttaattaattaaacggggtttaacaagaaaacaaaaagggtggtatgttttatttgtttattttgacaaaatcctattatatttatctctataaattaggatttatttattgatatatggcattgggttcccaattatgtgagccaaaaaagtaaaagttggggatctagctgctgcaagaaaaagaaaaagtaatacaaaaggtaaacctaaaaattaatcaattttttttttaaaaaaaaatggcatatgatctacattaaattttgaactaaaatagtgaaatatagtattttcttttggcaataaaatagtgaaatagagtaatgatattttgaaaaataaagtagataagccaattggagagctcttgaaaaaacctaaaatttaggagagaaaaaggaaaactcacttgaaattaaaaacacttgtatccaaacatgataaccttaaagaaaaaaaatatatatgatgagattacaaagtaatttattgctcactccccaaacttgctgctggcttttaacagcaatattgtcaatctcaatctcaaatagactacattccttaaaattgagctatatatggaacattagaatattgaagtaaatcatgtcaaaaccgattgtacaaaatctgtggaaataagacacaaaccctattctctaaaatggttgtaaataattgaaaaaatccaaatctaaatgaaaaatgatgattcccacaattgattgagacatcctctttctgcctatatttaagaaaagaaaaaaaaaataatgatttcaatacctgagtgggctgtttctttaccctcccaactacaagactccaagaacaaaaacactctcaaagctcagaaagccacaccgcctctgtacaccgtacccctgtaccaactctgagctgcttcactctctaccaatataatgttcctttgaaccatgttataacatgtgaagaggtgcaaaccaattcaagcttcgagatagtgtcggtggctaagttttcccccaaaacatactggggaccaaaattgatctttgctcaaaaaggatcatgaccacaatattactggacagtcagtcacaaaatgatcaacaaagtcgatccagacacacaactctgaagagcacagaggaagcagagaaaaacgcatgagaggagagcggtgctaaacttgatattttgatagtctctcctttactggcggctccaaaacagacatacattggtcccatgctccattgaccagcatctgcaaaacaaggaaacacaataataaagtcattgattgtaagcatttgaattactttgttcaacactcatcacgagtgaaagattgacataatcaacaccaaatcggaaaacaagtcttatcagattccaatctatacctgcttatatccgtgtaacacctggcaaacttcattgtggagctcttcacttcttatttcctacacacaaataataacccaaagcattagccctgtgaattaaactaagcacaagtaagataataaaacaaatgttgtgtaattcttacatgccaacttgcaatagcttggcacatagcaacaagtgaatttattgctcctgatggatttgccttaacctgaaaaacaatgtaccccaaaacaagaatattacaaacttgatgactgttttttgataaagggattattgcaatgtgtgtacaaataatctttaacggattagaaattactcatacgcacaccaaaaaaaaggatacacatacaaatacagttacaattacaaataaattatttggttcagcttattaggctagcctacacttgctagaatctactctgcaaatctttcacaaataataggaataataacacacatttatagcagtctctttttaggttcccaagattacttgtatgtttccctcgactactctctaatgcggctggtcaatggtatgatttaatatcattttccaaaatgggtgcacccccatgcatatacttaagccattttgaggtaacaaatttatagttccggattctattttagaccattgtttttccaacttttataactctctagctgtttcccataagtctaactgatatctttaattagataatctaaacccctattcaaacatttgccgagtcaacccttgtagtttacaggcgtaagttacaattgacgaaatctaaaaagaatttccgaaggtgtagaagcataccactgcgcatagacctcggaatgcatcctctttctcaatatcatcacgtatactgccacagagttaattgtttgtgagggattacgcacaaacataaatcaaatatataataggggtttcaaaagaacttacatcgataaagcaatacaccatgattgcatgaaatgctcgatatgtggagacacaatatctggacaaacccatgcaagcctaccgagtgtgattgcacaattctcaataagtgacctattaagcccctgaacggtattaacaattacaattaggaatgattcatccttcagaagaacatacaatcagaagtattcttcaaaagaaaagtaaaaaaaagttgcaatcacctcaggatgtttgagaatggggactaagcatgaaataattgtcattacaactggagaaatttcttgacgcacctgcaaatgaatgttactttagtgatgattatatcaaggaacaattctagctcaatgcaaaagttcatgtactgctcatagccttaattcagaaacataacgtgattcataaggtcagaatgcaattaggcaaaaaatgcaaacatgctatagatagcaaattcaaaaaactcggaaaccatgtgaggttcaacaccaggtacaattgtttgtcaccattgtaaaagacatgaatgtgagataaagacggttttagaatcatagatattgatagaacaggaaagctgagcaagtgttgtgtcaatcaaatttagttcagcacaaaagaacaacggtgaacaaggaaaggttccatgagaccaagaaaaagtgaagacacatatttacaacaaaaaataaagctgtgttttgcctagcagcatagcaggtaggcagctatagtgcaaaaagagtgttcccaaatatcaatattgcatccaaaaggcataccttgactgctaattctccaattgcccaacatgcattattcgcaactgaaacggtctcttttatcttaggagtgctctgaaaatcaacaatgcaagtttaagcagtctcctttataaaaagggatgtccaaattactataaagaatcatgtgctaagtttcacgtaccagttgctttgctgcaacctcgagaaattctggcaaacgaggtctcaaatgaataggacaaacctaataaaatcataaagaacatcaagcagagcaaaaatataaagaagcataaaatacttccacagctcgaatgttctgcttcagagacacagctccaccattgactaaaaaaaacttgcattctgctgaaacgttgaaagataaaatgagatctaacctaagaagtttgttatctaattatgttagtaaacttaccctagcaaggtcaccaagtagtgcaaatgcactttgtctgacatcagaagcctcatccatgcatgattgcaacagtaggtcgatcaagttactttttgaaatctggaaataaaaaccatcctttgaaagtgagcaagtacaacctataaactataatcaactcatcttactttatgagacatcgagtgtgtttgataaatattagccatgccttgtaagatacaaataatataatgagcatttcatcaccacaagtaaaaaactgagaaaagagtcactaattgaatatctcacgacagggacgaaaatagttcagagtccctaattgaatatctcatttcacaacagaaacaagaatagttcaagagatatgtatttatattagcattttaaaagctaaagaaaatgttattagaaaggatagtatctcatccaggaggccacagaaaatagtcatatgtattaaacagaaaatgtaatgagcaaagaagactaccaaactctctatcccactgccaagaccttctgcaagtcctgagagaaggtcaaccgagcatacaatgaactctttatcatactgggtcccagctgcaacaggatctgcctgcaatatccatttacagcatgctttaaggatacttgcaagttgaaccaagagttatgtgtaggatttcaacaattttaagaaatatgcatagaacctctgaagctagctcagtgatgaaagagggatggagctaaggtttcatatttttctttttagtgggtgtcaagtgtgcacaggaatgtaaccgctaactagagaaagtgttagcatccaaaatactacaaagatagaaaatcaacaagatctaaaattcaaagcatgttcttgaaagttctcatgggcagatctcccaaagtttctccaacaaaatagcagaagcatagaatattaaaacttcaaaagctttttatagctgaaaactgcgttgacatcaatagcaatcctccgttcgaacccaaatttcaatttattttgtttacattccgatgaacatagaaaaaaataatttaagaacaataaaaaaggattctatggacgtttgaaaatggaatttattgaaaatttgagcaattattatcctcattttttctctagtaatatccgtcataattttttttcctcggcaaaatccacaatccagaaacagtcataagaatttatagcttccaattacaattttttttcccaaataaaagcagctatgcttgaaaagttatgatgtaaagaatgttggcctaggacaatttataagtttgaaagatacttgctatggcaaggataactgctgaatagacatctcagtttgaaaaagatccataacttttggtcgctattacaatggctatagtatcgctaggaaataagtattaaaagtcaaaagagctataatgagaacatttagctggttaaaaccggtggatgggtaaacactctaacaaagtaagtaatcaaatacttagtttttaaaggataaaggatttctacccacctttgccaactgttgagtctgaatgatgtttatgcacctctgaaatactggctctgcgaatgaagaaaatccagcacccaatgcctgaaaaaagaaatgtttcttttactcaaatttatatacaattacaagtcattgccaaactatcatcctgaaaactctcagaacattataaagataatgcaaatttagaaattcatgccaaatagttccccaatagaatatttctttaactgatgaaatacagtccaaaaagtaataaaaggtgtacaagaagaaaaagataagagtgaaaactaacattgtaaacggattccaaacattaaaacaactactatagacactaaaaaacaagagcagcatgcctgtgatatagatgtgaagcattcaagaagtggaaatagatctttgtctgcatttgaaagttgttgccattttgcgatcaagggtggcatcagaatttcaagataagcaggctgtaaagtgcggagacaaacaggagggaaataagttagtaaaaaatgagccttgtggccttccacataaaaaagcaaactctacttggccatggcgatttttagcataatgaagctaccttatttagctccataccaacagcatcagctagagtcccaattgcatcgtatacaattctgaggttccgcctctgagattattgatagagtgtcaaaaaaaccaaaagacagttagaaattccattcatttttcccatgaaagcaagtgttcatttttcttgtaaaactcgtgaaagtttttcaaaagaatatgaatgcaagaataaaaaagcaataattagagatatggttggcgttgcattgcattgcatttcattcgtaatatcataataaagcaaatgatttaaggccaaggaataacctgatattttccataagcacacatgaggtgctgcaaaattatctctaaccttggtaccaattcttcagaagcctcctacaatcgataaagaaacattagagctaaataagctcattttacaattttcataacagcatttggtgaatgattaaacttcatttttatagcaagaacctcttcaagtgtagcaaaggctgaacaagcagcttcctgaactcgcttgttagtgtccagtattcttctaaggaggccaagaagaaccttgtcgaattgctcataacccgtttgatgtcccacaccctgaataaaaaagaaaagtttgtcagctataatctaagtcattaatctctgcaattactgcaaagagctgtgttcattaaccaaataccaacactaactactaatcatttctagattcttaaacatctcatataccagcactaacttctaaccatttatagattcttaataacctgccaaaggaatgtctaaatagaaaaacattacaataatgtaaaattttataatggacaagaaagtaggaaattgacatgaattatacctgaacaatgaatttactgaaacgagaaagagtccaacaagatatactccgtataagaggaaacttgtcatctaataaagggattagaaacgcaacaatctgtagaacgtgaaaaaagttcaatatagtatttgccattatgtatcaacaagagaacagtatgaaataatacattcataacaacataaaatctttgaaaatcatctacaaaagcaaaaaaaacttaattggttcaaaagttttactgacttataagcaaaacatcttccgaaacatgaaagaaggattttatagtactagaaaatattataatcatgaatcgtgaaaaaaaatactctttttttagtaacaaacccataaaactctcaaattcagttagtggacccaacattgaaactatggctatctgtctgaacagtttgggaataagaaactataataatgaggtgctcagaatggcctaaagccttacacttcatgggagtaagctaaatgcctgatcatttctattacccctcttaggtttcgaggttaccaaatcaaaacaagttgattaaacattacctccgacaaatgtggataaagtccagtgatgcaaccctcagctatggcaccaagagccaaaacagcagcttccctctctttccatgcttcatccccattgttagacaagttggtctgcaaaaatttaagtggtgaaaacacatttgaaacagatttctttagtgaacagagtaagtaatattattttataaaaagttaaaaacaggtgatttagtctttctctcactaggtgaatcaagtaactttctaacaaccttaagatctagctacacaggtttatcttagttcattttatttgcagcgagaagatggagtgaagaaagaaaaagtcttgggaatcaattttaaccttcgatgctcaataattgtattacctgaactaaaggcatcaatgtaggaagaatctcgtcgccaaacatatttgaaaggatatctaaagcagcagcgctgcatttgcgtaaattccatacattgacaatatcatcatcctattattgaaccaattgtcaaaagataaacttgtcagcaaaagctttcttagtaaattaagccaacagcaatccaaatattgaaatgtacttatgtgaatatgtggcatatatataattagaattatcagtaagataaaagatgttagtgtgacatacatcgtcttctgcaccctctgagccatgaaaccgtgacgaatggaaacgaggtttgatatcctgtagtgcaaaagtaaagcagaggtgaaggacttattttatcaagaatttaaatattggagtcaaacctctaattaatattgagtattcaaaaataaaaataaaggttccaacctgttcacgatctggtacagactcatcctcctgcaacaattaatcaatgcctcaaattattaaggaaaactgaattcaattataaagaccaaaataaaaaatatagaaaaaccttagcaaagtacctcagcatcaataagtgactcatcatcatcatcataaatcatgttagacaatagcacctacaaatggttaaaatgttatatgacaaaagcaatcaaaactcaaaagctccagtggaaaaatgattgatcaattaaaatcttgtcgatggtattctataccggaattagccggggcaagtactcccttaagttctctgggggtaactgagcttcacaatatgcagacctgttaaggaagcccaataattaagctacttggtaagattgaattcagatcttgttctctagaactcacaacattaccagaattcacaagcttcaagagccacctcttcatcagtgtccttgttaacttgcaacatatactcaattacattctttagatgtggctgcagctcaaaaaaaaacacatcatcaagaacaggacacaataataaattttttttttatagaaggatgcagaaatctcagattcagcacacattttaaagggtaaattattacagcgggttccaaaagacaaggaacagaaaaaggacagcaacatcaaacaaaaagatgtgtgagaggacatgcagaatgattcaaaatgtacagacttatagcaaaattaaaaatttaaaatatctcacctctaagaaagacgggcggacttcaattagctgcacgaatgctgagcaaacctgtttgaaataaagttacataaagcatgggtgagagtataataacaataacaatcatgatagaaatacaatgtagcaactgacaaactctatggattggttacaaagctttttacattttgagccaaaaatggaaatattcaaagaaaataagacaatatgatttactgatgggaaataaaatgcaagaaaaatactaaccaattttcgcacttctgagacagtgtcatttgaaagtacaaacaggccttgaagatattgatccatagatgcatataaggcctgcaagacattagttcacaataattagaagaatccaaagaagcaaataacttttgtgacaagaacaagtttgacaataacttacggctggcatcaacataatgtattgattcactgaacccaaggaaagctttctcagtgaggaatgtggtgactggaaaagctgtataaagaaatgtcatatttattaacccaaggacacagaaaaatataataaaaagtaaaaaatctattataaaagatattttttcacaacagcatagcatgcatatatagtcatatacaagaaaataaaattattaaagtcatatgcaagaaaataaaattttaacagcattaaaaagttatgccaaaccttaaacaatctagggagaaatatgttgataggacgttcagctaaaccaggtatatctgcatcaagctcttgaggaatatcctcacaaatctgcatcaaagcacaccattgatgtatcgaataattttgaattttgattagtggtcttgattgaaatacatttgaactacatgtaccctaatacctattgtgtataggctacattaaattttgtaagagtgcaaaagacctctaacgttacattgtacaatgaaaaccccatatttatgaagagaccaaaaggttaataatcatttgactctggaacaaaagaaataccttggataatgcatccatagcaccttccatatgattaatatcattgctgtctaagcaagtgacaagagcttgcaataactcaggccatccagctactcctcctagttgaacaacagcacttacaattgttccaactgttgacctaatgttcctatctgctgctcccaagcagggtaacagctctgactttatatattgctggtaagcaggaatcatagccttatacgcagaccgaaggttattctttaaaagcaaacctgcagcttgccgaacatccgctgatttaccctgtttaaatcagcacattatgttaattgacaaccaggaaatgatttcaggaatagttaaaagatgctagtacattgaatttcaaacaagccaccagaataagattcaatactatcaagacaaaattatttttatttagagtgctttcaatcaaaaagccataagggtagtctccctctactattctagttcactgttccacacaaaatatcgtgatgaaaatcacatcaagcaacgaagcatacaatgcagttaatagtcacgagtatgttgcaagaatcaacaataaccaatttctccagtttaatattctttggatcgcacaaaagttccactacatcaaccaaagcacgattataagaattcaataaagtacgaatcccagattttccatcagacccaaaaccataaacgaccataaatgccatgtaaaaaaacattccaacaatcaaccagattaaccaatccagaaacagaaacattttaagtcactattctcccttaatgataaaaactcacaatccaagcaaaatcattactctccaatacaaaaaccctcaaattctaaataaaacacattacccacacaaaaaaaaaataaaaaaactgaaaacaaattcccaatctcccaataatcacaaatctcatcgtatccatatcaacaaatcagaaactaaaaaaattgcacaaaaataaaattgttcatcacagtacctcagcccgtgcgataatgaaagcaagatagttgttgaaatcagggaactgagaatagtgctgaagctgttgccatatctgagacttatcagcagaagtagaggaatgagaaatttgttgctccaaaagcccacagatctccgtgaatccttcttctttaggttgccactgggcactcgccgccgccgccgcc

SEQ ID NO: 17572 - DNA, 2426 bp, Cannabis sativa
gtgttctatgttatatacaaatagatcttgggttaattgttaatttatctaacatatcacacttcatatatacataataaaatgagttgaagccttgaaggtttagtaataacatctttcatggagagattatgtgctctttcttgtcattttacccatagaatagagccaaagaggcataactacgtataaagtaactataaaaggccattgcctaggttaggctccttggacttgagttgtttaattctttaatcatattagtcatatgatgtaataccccctttgactttttatattgtttgattacagttcttgatgttgagactgtttgacttcaaatacctttcatagattgaaaacaaaaaacagctttgaaaacctaaggaccacactactaatcaaaatctactatttgggatttcatggtaagagagaaatatattccctcactttcagttttctggccagaaatcgagttcaactcgggtcgggccatacatgtaaatggcttcaaatacctttcatagattgaaaacaaaaaacagctttgaaaacctgaggaccacactcctaaccaaaatctagtatttgtgctttcatagtaagaaatatattccatcactttcagttttctggccagaaatggagttcatcccgggtcgggccatatatgtaaataactttttcgaatggtttgtaatttttcggtacaagtttgtaaataaagtttagaactttcattcattagtgccaaacaacttttgttttctttttttttttcaacttccaaatcatcacaatgcacaagttcaaagaaagacagattcagatgtcaaatattacaagatcaaactactctacttttacatgacacaacaacagagccgagagagaacctaacctaaacagctaatttgaaaataaaatactgcctcatggtaaaaggggccaaccccagatggaaaaacaacaacatgctgctggtggtaactaaaagtgtcagtaagttttacagacggcataaacgagggaagtgagagtttcggagagtttgaagtttgatttttgccaatgtggtcagtgtgcacaaacttctctacctgaaactacatgaaactggtttttgttttttcttcttatgttttagttttgagaatcatcctcctggcaaagatacattaatgtcagttgccttagtcttcgaatcagcagccaatgctgaccagctatctccacgaaaggaagctgaagaagtgaggttcgtttttggatctgcgcttgaaataggaatggctgcagttggcatcgcatttgaaatgtactcgtgcttatgtttcttcggtttttgctcgtgctgattcccggccaaaaaactgcctactacaacctaaagtttatcaaagaaaatacatttcagaatcacaatgtagagatctcacatcaggaaaattataactcaaagtactataattccatagttaaaaggaaaagaaaaagccgaacctgcacaggacttgcagctactaatagtccagcaaccccaccacctacaactcgtccgtctggactcgccaaagaaacactcatcccaccagatctgcttcttgttccacccgaatcacttggcatgaatgaaccagataaagaaagtatttcaaatcgaccctgcaagaacaagtaacaaagagttcaacagtgaaaatgataataatttaaccatcagacaacttttcttgttgtggggcttcataaaaagtagtacaagaaaattctcaattactttttttcttttcagaagctaaactatgaactatttatacacatcatttgaagaaggaattaaaaagagagttacctcatatgtcaatgtacctccagaagaatcaggctgacgaagtgtgacactcgatatcacaccatttgcagagagtatgcatatagctcgaggcccttgttgagaaaatgatataatcttcattgtaacatcctaagagacacagccaaaaaaaaaaaaaaacaagaggttgggggaaataactgttagtgttactactacaactcattgtaaatgttcaaaccagaaaattgaagtttctactgacaaaaaagaaaaagccagagaaaacatctgacaaaactccagtagttgtgtctccacactcttcattcattttacaaattctcaaacacaccaacttaagtcaagtcaacatcataagcttcttgaaacagatttttcataagggatataagccaaaaggcagagaaaggtttaaatgattacctcgccagcattgacagttatgatatggggtgtaaaatttgcaccaacagagcatgcaacccattcacctacatataaaaatgatcataagattagggaccacagcacagaattgctgcaggaaaaaaaaagaaaaaga

SEQ ID NO: 17573 - DNA, 4799 bp, Cannabis sativa
atgagagtatttttaattaatggatacaaaaaaaaaaatggtatttttcaacttattccgtgaatttctacttaaacattggagcccaaagtaaggcccaataaactctaggcttttgtcagcccaaaagaagcgggaaactacgcgcaggaaaaggaatgtagtagcccatacatggaatggatgaagttccatatatacatactattccatgatttgctcactctttctctctctggtgtagttattaaagagaaggaaaaaaggaaaggttaaagagggaagagagagaaaggttttgattcctccaatctcactttactttaatgagctatagatatatccaatcatatcatgtaattgatatttattgtttattcttttttactctaaaaccccaaagaaagagaatttatgtagttctcttttctctcacacttgagagtaaaggtacattctttctcactgttccagctaacccttttcatttcttcctcatatgcaagtctttctttctgtatatgtatgaatccttaacttgttgtttgttgtttggttgaaacttacacttgtccaagattttgcttgaagaagaaaggtttaagcttccatccattcattccattttactcctcttaaaccttttactcctcttaaaccttttactcctatccagatttttataatgggaaagaaacgggttttggcttattggacttgtaaagctctaaaattgcatgtagtgccactcatattggtgattttgctgtcttccatggtttctcagtctgttgatattgactcagatgaaaaaggctcacttttactgttcaagtcatgggtgcaagatcctagtcggagtttgtctagttgggttgggtctaactgtagcaactggactggaatcacttgcgagaaccagactggtcatgtggtttcaattaacttggtgaacatgaacttgtcaggccaaattcaccccaatttctgcaaacttccttttcttgaacagttggttttgtctcaaaacaattttacatgcccaatcccctcgtgttttggtaatatgcagaatcttaaaagtcttaatcttagtcacaatcggtttcatggtatactgcctaacacactcatgaggcttagccagttaacagagctcgttgtgagtggtaacaaggatttgggaggcattgttcctagatgggttggtaatttctcaaccaagttggagaaacttgcactggattctaactcttttctaggtgaaattcctgaagagttgttgcacttggagtctttgaagcatctggactttgggaacaataatttatctggtagtcttcctgattttcatcagccattagtttttctcaaccttggctccaaccggttttcgggtaccttgccttgtttctcagcttcagttcagtctctcagtgtcttgaatgtggctaacaatgcacttgtagggggaataccttcttgtatggcttcactaacgagtttgacccttctaaacctttcattcaaccatttggcttataagataccacctagacttgtgttttcagagaagctttttgtattggacttgagcaacaatgatttatcaggtcctcttccaagcaagattgcagtgacaacagataaatcagggcttctccttcttgacctgtctcacaaccgcttttcgggtgaaatacctttaaagataacagaactgaaaagcttacaggcattgtttctttcacacaatcttcttgttggggagattccagctagaattggaaacttaacttatctccaagtgattgatctgtcacacaactccttaacaggttcaattccactgaacattgtgggttgttttcagcttcttgcattgaaactcaatgacaataatctttctggtgaaatccaaccggagcttgatgcgttggacggcttgaagatcttggacattagcaacaacaagatttctggtgaaatcccattaactttggcaggctgtaagtcgctggagattgtcgatttcagctcaaaccatctgtctggaatgttaaatgatgccataaccaaatggacaagtctcaggtatctctccctagctcacaacaatttcaatggaagtttaccaagctggttgttcacattcgaagcaatccaaatgatggatttgtcaggaaacaaattctctggtttcctaccagatggaaacttcaacactagcttaaacttcaacaacagaggagacatcagtaaaattccaaaggaacaaaggatcacatggcgtgatttgggcaccaaagtttcaatctttgtttctggtagtagtgaactacggttcatttattttctatcttcactggttggaattgacatatctggtaatatgctacgtggggaagttcctgctggtttatttggactgaaaggtttagaatatctgaatttatcatacaattttcttaatggacatgttccaagtttggagaagatgaagagcttaagagccttggacttgtcccataattctttgtcaggtcatatcccaggaaacatttccagccttcagtatctgacgcttttaaatctgtcatacaactctttttctggttttgttcccaagaagcaagcatatttgaggtttcctggtgcatttgctggaaacccaggcttgtgtgtggagtcctctggtggagggtgcgactctgaaggccttccagtggttccggggaaggcctttgaggacgacaacgctgacggcctgatcgctaatggcatgatttctttgtggatttttggtttaagcacttctcttagcttctactttgggatttttacgctcttttgctctgctcgagcaaggaactacattctccagacaaaggtttgagaagaaacgaaaagttttgcagcctactttttctttttctctagacaacaagttgagttttcttgcgatgatcaaatagtctctcctaatttgttcttccatgtttatcaaaaagctgtttctgattgtgaaaatgcagctatatatataatttgacatcaatgttatgaacaagtctttgtaattattattggagttctttctttaccccctttttctataaagttgtctagaactcttgacctgtgtactgtagttaaaagtttggccattcctttaccctttagccttattttcatgtaactgtctttcattgacaatattaaaaagttgttgcaaaaaatattgatatagttagatgaaaataataaaatcggcggaattttataaatttatagaactacagtagaaagaacagttcattttaaatgtcactaacaatatcaaatggttgaatcatctaaccggcctaagaatacaacaaattatatgtgtaagtaatgtcgattcagcaggctctttctgaatcgagttggcacccaaaaagtgtggcttttttttttttttttttctttctcatcaagcatcaagaactcaattgcttaaactcgaatttcttgttgagtatgcaaaagggctagctccatacaagttctcactactaatttctcagtatttaggaatccaagtagatgactactaacagcaccgcagactcaatttgccaaggctagtacttaattgggccatccaagctcccagctgcaaactgaaaagacgaaaggcgaaaactaaaacacattagaagcctgaaatcatcatcacaaagtcttgagtaacgaaatgttcaacacgtcgaatgatgttagtagccatgcgaatggaaggacagacttaggttgttgttgttgtttgttacctgttggacaaatggatttgttgacgttgtaaattcatgagtcatcccttcccaaacaatcttaccctcgtgaagaaatattaacctataataataatataatgaactagctgtttacttaagcatacaagtaagagaaatcaacatggtgaaaaggagatattattgaaatttaaagcgtaacctgtcaaccgctcttccaatggtactatgttggtgggtgacaaccacgtatgatgcaatattcccaggcttcccaactgcatcttcgcctttcatgtgtacagatcggatgagatcttcaacaacagtagatgcgataggatcaagcccagccgtaggttcatcatataaaagaacctgtttaaaaggatttagaagaatgtcagaagacactaaaacattgagctgcctttgccaaatcaacatgaaaatattatgtatattaaaggatatgtatggaaacgtatgtgtaaggatcaacatgcgccactcatccgtgttgaaatctataaacaaagtgtacaatgtacaaagaataaaactaaacacacccataaaatatgaagtacttttcgtacacatacactgagcagtcttcaacatcttacgttttcgattatctaattaaacacttaatgaaagtaaatcatctttccattcccaaacttccacgattcctccccgaaccaaacatgaatctttcaattaatttgactttcacactcaattacatctgatacatatcagaattcacaatatttttttttatgtaatgagtttgtcctctctagtcatatttgaatataaaaatattgaaactgttcactaatccaataaaagaatagttggaggtctcttctgaccaaacaaataattgtcaacaaagttgtttgatgatttctcaaattcaaagaattcctcttactttctcttactttattcacaggtcgtccacttagctggatttggaaagagataaaa

SEQ ID NO: 17574 - DNA, 4226 bp, Cannabis sativa
  modified_base (4155)..(4197): a, c, t, g, unknown or other
aaaaaaaaaaaaaatactaattaatcaaaaaaaaaataaaataaaataaaagaggaagtaatatgaaaagtaataataaaaggaagggttgattggagtagagtagtggtggtggtagtgggatggagtattaaattaagaatgagaaaagtgggagcagagagagagagatgatgatgtgaggggtcataatcaaaggaagagggagacagttgatggtgccacgtgggccgaggtttaaggctccaatcagattgaagttgccacgtgggactcatcacaatggacaagaaaataggcacaactgtatcagaacaaccacagctacgtacagcaacaacagcaacagctgcaacagcagcagcacacggccccccctgccctgctcctctctcactgccactcagccaccactccatcaattctcattcaaacttctttattcttctatctactgctctaaatatacactcgggtttttttgacactagaatcgatagctaaaattgatcagacacgataatacgatttgaaattcgcacgagagttattgggtttgagtttgtcttaaatgagttggattgtgttcgggttgatacggctaatacgagactgactcgttaatgatccatttaaagttattttagtactttataattatatcataaacgtgctattagttgacatatttaaataaaatatatacttataaatgggttacacaaattatgtttgggttttattttttgacactattattaaacgggtcgtgttcgggttgagtatatacttattatatatgtatctcgacacggtacgaatacgacccacgaacacgaattatcatccctatttgacacatcataaatctggtatggactcaaaaggcacgagcatgcacgatcaggtatcgaaaaatatgagtttaaatacaatgcgatacaatgctacatatagatatgatacgatataaaaatatgtatttgagcatgacacggcacaaaaaatacaaaaagtataatatttattaattaagaaaaaaaacacaatgcattttctaaataaagttgttttttctatttttttagaaaagtatatacgacattactctaaatgagtgttctaatacccctgctatatagtttaataggataattttttagtttaatttttttttatataatcgtgtatgttgtaattatttagggttaacttgtaaattttcaaatagtttatatagcatttaaaaataaagttctaatattttattgtatgtatgactattttttatgcgcatgataaataattatttgaatttacattcgacactataaatttaaaatttttgaaaatttacaaatagtcttaattaactagaatgtacacgattataagaaaaaaaaaaaaactaaagtaaaaaattatcctgaacagattagaatgtcaaccacaacacacgtctaggaggtatctatacatttttcctttatcttttatgtgtttcaatatcttggagatcttttaaggttcaaaaatatttatttcagtagtaactattttttccttatattccataagtaaatgtttaaacaataaattatttggaatttttaaaaataaataatcataaataactataatgtacaagctcatgtaaaatgaaaaaattaaattaaaaaagctcccattaacaccaaaacaaacacccctttttagaaaatgtactatataagtttattcaaaaaataaaatacataataaatttttccaccaaatgttcataccatcaaggtctaaacaatgaattctagtaatttcattataaaattaaaaatgaattctaataatttcatgataatatttcaaaaaaaaaaaaacaatgaattataataatttcataataatatgtcaaaaaaaaaaaaaacaatgaattctaataatttcttaataatattttgagtaatttgcggtgtaaatatttaagtttaactcataattacagataaatacttaaatttaatatttgacagtaataatatctaaattatatttttgtaaatttcgtaagtacttgacatttacttattgatatatttaaataaaaaaataaaaatttaattacttagactaattcaatttttcaacgcttgtaaagtatttaaatattcttcaaaacaaacataatttctaatataactataatacacaatattatataaaaagaagtgggatataatttcgtctttacaacacctaaaaaatttcctataaatatatatatgaaaaaaaaaataggtaattattgtttttgattactatctacaagtagttatatagtatttttggtacacagataagttgcaagttcatgtattttaagagaagtatattaatatatggtgatatattatttattatatagagtagaagagggatctctcccatataaaccgcaacatgaatagtcactttccgctttaagtggggggtgaggtggggtgggagaagtacacttcttataataaatgtgtgttagattctctatttattttagcattaaatctttttttatgattgttatttatgtggaagttatttaagaccacttataaatttttaaaaaatttaaaatatttataggaaaattatcctctatactgtttttttaatttttttttaaaaaaaaaatttacagtttgagtttttaaagtggtttctatgtagattgttatacgattttttgttacaatttaagttgcatggctagttgcaataggggtttctatgtataattctataaatgtgtaaaaaaaaaaactgttttaaagtataataatgaaaaagtctcatatttatatttacagagtgctgaaaataaagttcaaacaatttcttaccatatgtattcaaatatacaattatagtgtagcaaaatatttaaatattatttttaacactataaattacgaaatatgaaaaaatttaggagggtgtagtgtaaactttccacttcttatacaatcattattcatctacaatcatgatgaataactaggattatattcatctatgattttatatgtacaaaaaacatataattatagggtttgatgaattcattacataaacatacttattattgttatttttatttttatgtatgtcactatgtaagagagatgatgaagaaactaaatttggaaatgagacaagttgcaaccaatcaaaaaccatttcataccaacccaatccatacttgttttgagacaacaaactgaatttggactctcctactcattttttcttattcttcttttgtcttcttatgtcatatacataatttgataattaacaaacactcacactctttcttacacttatatatatttatatattgatacgcaataaaatctctatttaaaaatattctattaaaaaataatttctaatttattatatacaaaaaatgaaatctcaattaattagactaattataaataaaattataacttttaaattatactttattatacattttctaagttctgtattacaaaaatatacctctatataaaaataattatatcttaagaaaaagatacatatataattaataaatttatttaagtagaactaataattttattctaaattgtaatacatgtataaatattacatttatttaaaaataattttattatgatatagtatttattattgaaaaatattatttcacatggatcaaatgcaaaaatattgagctatatataagagtatgggctactctactcatcaccaattagttttaccaattgattatgagatagaaccctatgattaaagattgtttattgttattattataacatttgatacatttttgtgtttaaatttttttagtatatttatatttagttataatctcttaattagaatataatttaattgatttctatgtatcacaattatatataagaatgaatttttgttttttttttaaaagaaaattagaatgcaatattttggtatgtactataaattttgtttaatgtagtttggttaaggtatctactctctaatctcggtttgatatatattttaactttcaaccgttagatcatgtagttattgatattattattaataataataatnnnnnnnnnnnnnnnnnnnnnnnnnnnnnnnnnnnnnnnnnnnataataataataataataatacgagcgtg

SEQ ID NO: 17575 - DNA, 2445 bp, Cannabis sativa
  modified_base (26)..(56): a, c, t, g, unknown or other
cttgatttttttataacaaattagannnnnnnnnnnnnnnnnnnnnnnnnnnnnnnaggttctactgtatatatatatgtgtggttttttttttttataaaagtaagtttttttttttttttgtaagaattataaaagtatagtttacatgtatatatgaaattactaaaaaaaaatgaagttaattagtactaacctttaagtgatcaccataattggatataaggagttgagcaaatgcttcatcattgggtggagcacccatagtagtagtgttgtttttcttaaggaaatttagggcatagtcattaactccaattactaaaagaaaaatggacttggacaaatggccagacacaccattaacacagctaatgtctttcaaatgtaatggcaaatattcttctacagtcttcttgaatagtgaaatttgttctcctaagctcaaactacctttctacatgcatcacaaattaatattagatatttattattatatagtataaatattaattaattaattgttataaattcatatttcttacaaagcctgactcaggaagtatcccagctgaagatgaagcataattgaaaccttcaatgctattgtatgaactaatttcaacaagtctaatagctggtggtggagcttttagtccaagtgattcagctgcatttttatacatgaaaaaaagaaaaagagtcaatcactccatttttttaatattgatttagcaaaaagtaataattttcttttattaaaaaaaaaaaaagttcaatttaagggtagtttttttttgaaaaaaataaaataagtgtgcatatataaatacgattaactatctatttttttttttttatagattgatgatactaaacataacttttattcaattagtaaccttatgggattaagattagaaagctaaaatgtaatataaatctcacaaattacgcacacgccagtaataaattttcaatccattttaatgcatacgtgacacataacacttttaatagcatacatacaagattaagttaatatttggattttattttcgataattttttaaagttaatcaagatctttactataattataatacactatcatataaaaataattataacttacacttaaaattacttctacaatagattagatttaacacatcctccttcttaagaattttatgtatctatataaatatatatatatatatgtaatgatatgaataaggtagataataccaaaaaaatcagggattgtgcgaccattggtgggtcttcctgatggtccagcaggaaaatctttgccataaggcagaaagtcatatttagcaaaagtctggattttattgttattcccagcatcaacagttgagtctccaaacacatacaatgctggtgctaataataattcaccttcacacctcttcatcaccaataatactacacaaaaattagtaatcaaccaagcaagcacaagaaaacaccaccttattgatactaatgataatgatgaagaattccccatatcaatctatataaaaaagtttaaaattatgtataatagttagacagatttgatctcttcttcttattattattaaactcatgttggttgttgttgttgtttctcttgctgccaatggattgaacccaatttcggttttaaaaccaaatagactaaacttgtcacatttattgttgctttctagtggtgggttgtttatatagtactggatattatgacaaatatatgtacatcgatattatattgtggttgtatatgtcttataatgtatatgcaatatttttggcttttagatttatttgaaattgaacgggactattacatctaattttttcattaaatttgtgtaaattaaaactgtatattgataacaaaattcataaagattgaaacaaggtaatatagttttaaaaagaaacaaggtaatgttaatttaagtataaaaacaaaaagtaattttgaaaatatttatgttaattttcacatgcactccactaattttcattcaagagttttctactctaatagggtgtgtttggttgggaataaaatgataaaatggaaaaataattaatttttattccattccctttttttttctttctttgaaacaaagttcaagacttcaagtatttcctttttttttttatttggttgtattttcaaatattaaaatagcttttacatcgtttagatgtagaatgattattctatttaaaatatttaaaattgaaaagaaagatcattatattgtaagattaaaaagagtagtttttttttttatttctattctattctaatgtatttatatatcaaaaatagcataaaaaattcttcttgttataaaataatataaaataatataaagtagaagagaagaaaaaagaagaagatgaagagagaaagag

SEQ ID NO: 17576 - DNA, 3080 bp, Cannabis sativa
cttcgatctccttgaagagtacgttggcttcctcccgaggcaagacttgaaaagctatctcccaaaagcttgtagaaccttctcctgaaggtagcactgttgttcttcttcttttgtaaacttgattatagactcaagacaatacaaaatatataaactcataggaagacacaaacacactctactctacgcaataaagattctctttcttataaaatatgagtataatacaaagatatgaaagagattcaaaatttagttattataacgtgtatttataatcaatatacatattatagacaacgcatatacagtttaaacaagaccataactcagaagaaacttctctaaaaaagatttttaatcagtttatttctgtatctataaaatcgtgaccaataagtgtaactcttcttttataaaaaaaaaaaattattttagttttctttatacaatcaaatcaattaagaaaatgaatattacagaataaattgagaaacccgactaaaaagataaaccacaataaacaattaattttttaatatgtccaataataaatttaaatttaattacatttaaaaaaattatttgacttaaatttaacacgtgatatcaatttcatcattttataaaacatcaaatttagtgatcatttaattacaaaaggccaattgagtattctattaaacacatgaatgataatttgtatagaagtccaacctaatcaaagaaattaaaaagagccaaacatgtagcaagcttccaatattgttttttttcatatgtaaaattaaaattgacaaagaaagttttcaatacataaccaaattaagtcaagcactactcgtgtcttcctcttgagaagctctattttctccatttgcattttcattgtgtgtttttgaattgtaactgtcaagataatcttgataaacatatgaaatgaaaccccaaatagccaacaacaatgaaatcaccttcactccatacattttttctttgaagaaaaacacagctaagattggtactattggcaagcccaaaacacttatggcattagaaaagagtgaagacatctcaagaatcaatcctattgtcccaaggaaaaaagcttgccatgatatagatgtcccaactaatgtcatgacatatgacactttccctaatcgaaatgcatacatttcattactcaaatctttccattctccactcgcaaagagtcccactagagaaatacttgttgctagtaatgattccaagattgtgatatctataacgatagagaaagtttctctttttagtacttttgcgataacaaattgtgtcacagaaagcaacaagccgtacaacgcggatgcagccaccgtacaaatgaatccaatcacaaactttcttttggaggagatatcatgtgcaccttcttccgaatcatcattaaaagcaacgagagtagaagatatggtgagcaacacgagagaattgacaataaaaggagtgaacttttgcgagttgagaaagaaggagaaaaaggcattgaaggccaattgagaggccgaaatgagagagtatgtagagattggaaggtaagaaaggccgacggagtacaagaaacaatccacaactaaaactattccaagaaagatagaaactagtacaagaattaaaagagattttggtgatgagttactaaaagtggtacttaattcgctctttcgccctgcgaaacaatagtaaggaaggaggattggaaagccaactagttgaactagtgttgccatccaattactatttccacctttggcaaaatacaatcttcctaatagcactgctgatgcttggccagatatgagaagaaaagcataacaaatcactctaagccattgaaaatacttcctacctctagaacttggtatcgattcgaacttgttgttactattagagccaacaaaattcacttccttagctgaaaagattgcagattttatggtatcatgttaatcagaaagagtacccgtgtatataatgaaattatttcaactaaatcactgtatgtaatatattttggtgcacatatcattactcttatttatatataaaaaaaactacatttcctttaataaatcaaataaaatatatcaacaaaaaagtgtaactctaaattagatatgagattatgagacttacccatgattttgagtttgagatgatcatctttttccatgtttttcttaagttaaagagaaatttttttatgtgtaatgtaaccctttaacatttttggcattgttgttgattaagttcttggaaacatagttataatgctcatttgtgactttcactccttgtcttcttatatgattcaatagtgtttaaacggcagttgaagaaagatcttacaattttaagttttttctttttctttaatagcttataatattatgtttgatggtgcattatcttagtttgtatcatgaattagttattaataaaatcatcatcaaatatatattatatatatttttaaagaaaaaacattaaaataagaaaatatataaaattatattggtggaaaattaaataattaagtaaattttaaaaattgatttaatatatttttttaatattaggatgccaatatatagggagtaaatataatgtaaatttatttggtataattaaatatgggttatatattatatttaaattgaacttgtatcatatattttaaattaagtcatttttattaataattattaagtctcatgtatttttctaaactataattaataattatggaaaattcgaaaggttttttagtcttttttatatgatcatgttcgttcttgttattttaagacattttgtaaaattttaaaaaatttaaaaaaatttaacaagctgaaaatatgatttaaattgtttgttacatgcatacttattttattttatatggactatttgaacattgttttttaaatggtaaatgaatttaattttttttcacaattttataagatgtcagctacaacatacacgagtatatacaaaaaatagactaaggactagtttggcataactgt

SEQ ID NO: 17577 - DNA, 4983 bp, Cannabis sativa
aagcggaaaagagagatttctaatgctattgccaaagctgtcaagagaaacagcaagaagcccgcttcttgattgcacaacacaataagacagatttcttcgcaattggtgtcgtaaattctattgccataagttttgccaatttgactgaccaatttttcactgtagtgtacagaccaatgtgaaattttccacatccttggtatgtaaggtaagctgtaacttagttttagagttgtattagatctaggttatgaagttttttttcttcctcacctaagcaaagctttgctttctttctttcttttttatttttttttttgaaaaaaaaaatatatttatatatagcaaattagctgtttgtaataaattaatgggacagttttgacaggaagtatggtttgttctttcattacatgttttcatttttatacaacgctgaagatacggcatcacatatttcacatgtttttttttttttgttgatttaatggtgccaaaagagcaaaccagagtaaaaaccatacaacgacaggaaatagaaaaggccgaagccctggaaaccaacagggcaaacagaacaaaggagaccataacaagtaaaaaacactaaaacaggaaactaaaaaacggaaagacaaagtatccgaaccaaatcaggcatccacttccaagtggagtgggaaactgtcaaaattggacaagtcgattcttccaaactgctttgatcgacatgcccattgggccacatcatgggtcacaccgttgtgaattcttgggatccaactgatctcctagagatcaagtttcttcatgagaacatggaacttttttatgaggtcctgaatgttatgattgaagcctgagatatctgtctttttgcaaccgattgcgttgattgaacccgttgagtcgctttggaagatgacatactcgtgattaccccattttcatttctgaaaatggctgcaccagcccctcgattttgcccaatgacgacatcagtattgcacaggctccacccctcagggggagggagccacttgagcatagtagaatcagggtgggagtgatccttagagttttccagcagacgactattgacttgagaaattatcaccttgattggagtggatttcctttggtgaataatagagtttcttttcttccaaactttttcaaagataatggccgcacatcctaagaacgcgtgaaagctaagatcttttggtcttctattgcccgctttgaaccacatcaaccaattatcccaatcctcgatatttatctcgctggtttgaatttgccaagaacaaccaaaccacacagctctagcgaagtgacactcccaaaacatgtgaaaggaattttcgatggtcatagagtagaaaggacatcccgggtctctaatatcaaagaaggttagaagtttaccccttgtgagtaggctattggataaaatcttccaccatagcatctttaatctgctgtgaattcttgctccccatatgcttctccatttttcattggcccctgcattggtcttcagattttttatggttttgtaggccgatttgatggtgaattttccactcggttccgggagccaaagccaagagtcctcaacatgtcgatcgaacattgtgatattaaggatttgtctcgcatccttgtggtggaaccattgttggacaaggctcacgttccattgattatcttgaatgaagtttttaaccaacatatttcacatgttggcggggttaaacttgttacattttttttagtacccaacacgccgctacaccactacgaggttgacatcctacattttgtggcgatgtttaatgggtaatagtagaaaaaattaagtttttatgtttaatttttttatttaattaaaaaaatctctatggattgagattgttccattggttgaaaaataatttcggcaaagaaatgataaaataaagttaaatttaatttaaatatttttcatataaacatacctttaataaatatactgtaaaaaaattttttaattaagtagttaaattgaatatataaatttaaatttctcttttgtttaggggtgtttatccaatcaaatttatactattactcattataagcaagagtctatgttaatagttaattcaagtaaaataataattgaaagaatttaactataaaaaatctaatatatttatatataggtgcactcttaatgggtattatccattcaaagatagtattataaaattttaagttttatgcttaatttttttatctaattaagaaaaatctgaatacctattaaaaaaatgttctatatataaatataactgtatttttaatataaggaaaagagccatgatgttaacaaaagtataatctttcaaagtacaattcttattatgcattgtgcccttttttgggtctgtggaagttatggatttttaactgttttctctttttaactgtttttcctttttcaaaaatcctttgaagataactgctcccaccttccttgctcttcttgcccttcgccggcatcctccttctctgtcactatcccaccacttccttcactcccatgcactctgttatggacaatatcaactctgctctttctctcactgatgaggaaagttctattctcacattgcctgacgttgctactctaggctcagcaacatcgcagcctgtttttgctcttttagcaagggtcttaaccacacagaatgtctataaaccgggctgcatagatcaaatgtcggggcactggcagggacgataccccgtcacgatcactgaatataaaaatgaagaaggtctctttcatattcgctttgcctgtgagggtgataaacaacgagttctcaacaaagaactatggcactttcaaaaccacttgattatccttttggggccagatgttctgcaaaatgtcacaatggaaaatatggttcatactcctttttgggtgcaaatatgtcgcttacctttcctaagtaagtcacggttccttgctgaagcactagggaatatcattggagaatttttggaagttcatgatgattctactaatgagggatggggtcctttcctgcagatccgagtcaaacttctagtcactaaaccacttatgagaggccaaatgatcaaacttccaaaagttaaggatgaattttgggtcgactttcgatatgagcagctgcctgaattttgtttcgaatgtggctgtcttggccatccttttgaacgatgtgtggcattcatggaacgaatggacaacggtaatgatgatgattttcagtacgggccatggatgaaagggtcaaagcttccaacaaatggttatgacagatatcgtacagacttttccaaagccaatgcttggccacttctcactcggttggctagaaactccatttcaccctcactaccgacaactcgaacccgtggccaacctcagccaagaattcttcttcatggggagtcttcatcctcacctttttctctagactcacgttcatctcaccccacttcccaccatgaccaaactatgtcatcaccaacaaacaccttattacactcatctggttcgggaccccatgttactagtataaatgaattccatccttcacctaagcagtccccatcctaccctcatactcatgcttcaacccaatcatccattgcctctactgctcctatgatctccactccaactactcaatcaatcaaccaaacaattccttcctctacacaaacacaacaaatcaacccctccctatctacaacagatctctccaatatatatatgcctaatattgattacaactcctttccacatttttcttccgccaatgtctttgctacctacccaccaacacactcctttcactcaaattcaccagtcatttcccaactccactctcatatctccaccacaccagcctacaccactacaaccccaaatgtcacgacctctcttggccaagaaaatatctcgccaaattgcattccgaagcgaccaaatgagactatgtctgttaggaaaatgctcaaacgaagccgatttctgaatggttcgtcatcaactgctctaggaggtgatgactttgtgactgatgtttctgcaaatgcggattctacaaccacctttacttcaacaacggaggttgctatgcaaccatgcccatctccatgaaaatcttaagttggaatgctcggagtttggagaacccgaacgcattcagacatttacgatttcttgttcaacaacaatcgccccatgttttgtttcttatggagacaaaactcggttctaattcggctactcgatttcataatagtcttcattttttgaatggtttagaggccccaagagttggattgagtggcggtttaatgttattatggaaagataatgtcagtgtcaagctctcccattttggagacactttttttgattgttctttggctttcgaagatggcccttctttccacgtcacgactttttacggcgcccctgctactcatgacagagtagcttcttagaccctcttgaggaggcttgctgataattctcctcaccagccatggcttgtaattggtgacttcaacgagattctatctaatgctgataaagaaggaggcccactgtgaaatgaacgcttgatgaatgacttccgtgcttgtcttgaccattgcaatttaaatgacacaccatatgagggtgattctttcacctggattaaaaaccgcactgctgccacaaccttaaaagaatgcctcgactggtgttttattaataatctatgggacaatgtgtttggggtaccaagagtttcatttggactattttcactctgatcacagagatattactgctgtgattgcagctcatgatgaactagtgcagtagcccaaaagaagaagtcgtttctgctttgaaaagctttggttagctgatgctga

SEQ ID NO: 17578 - DNA, 2191 bp, Cannabis sativa
  modified_base (1279)..(1285): a, c, t, g, unknown or other
atatatatacataagaaataagagaaagaaaaaaatagaagcatgtatttaatttataaaaaaaaaaggtaatagtgaataaattaaaaaaaatcttaataacagtgtttattttagaaattaaatggatgtataattaaagaaaatataattgagtttaagatgaaaaaagattcgtgttgcatcatcttacttttttcttatttattaaattattattagaaaattacaaaggtcgaatcttatgtggctgttaagttccaccattattattattattaaaaatgacaataatgaagagtattttgtacatatatataagtgtgacattattcattgaattttttttattaaaaaaaacatttcattatcgatttatgagtagtaatcttttattttcatgtgttttataataaatgatatttttttgttgagaggatataataaataatatttggaaatatataattaatttgtgtgtagagaagacacgtacctaaagtttgttgaaggaaaaagacatatgatatgatgtcctcttccatttaatataaataatttatttttagtgtgatttccactgcatcctttgttgaccaatctatacatttatagtcaaaataaatatgatttgcataaataaatatccaacaagtgtattaattattagtaaatataaatgcaaatgaaagatatgtcaatggtgatagattgaagaaaataaagatgtcaaagttttgacaccaaattatgaatttatcttcttagcttttctaatgaactaactaataattaatttgattagtaatgataattgattaagctaacaacagaagcttctagagatacatatctatatctaactacactagccaaagtaagcgcccacttcaattctcaattttctctgttttaaaaccaatttattatttattacaatgaaataactaattgataaagatgggtatttaaatttaatctaaacaaaatcccttaaatttcatgtgtccatttattataatctcacatattattatatatataatttttttttgttagtaaatactattttagattttgtattttgcaaaagttacaaattagattatctgttttattaaatgataaaatgaatcttatattttctaaaatagtaaaaataagacatgagtttaattttcaacaatttttttaatataaacaactttaagacaatttctaatacaatcagatacagacaatacaattaattttgtcataacatctctagatcaaattnnnnnnnagttttattttgacaaaaaattaattcatagtcctatttatacaattttaaaaaatacagggtccattttgttatttaacaaaatagagagaccaattgataatttttgcaaaacacatggtctaaaattatatttattcattttttttattaaactattatatatacattgcacctttaattttttattaaaaaaaaatatatataacatcaatgtgccatcaatgtgaatttcaagaatatcatttttttatatccaatagtatagcatttatatattttaccacctaagctttccatcttatcaagcatcctttaaaatactattattaaagatgccttaagcaatcaaattccacacaaaaacttaaaagtctgcattttataccaacttataatccaactaattatgtacatttttattttaaaaaaatcattatgtgacaaaattaaaattgctgaagatgattcttaattttgtttataatcttaaatgtaactcagtccaaatttacatgtacattaaatatggagtttctgataaccaatatatgtgttataaggtttttgaagcccttaccgaaataccttagagataatcactttctgatatgtaactatagaaattctcattattagttttggaaaggggttgtgaaggccaggaatatgagaatgtctataaagtttttgttgattgatttgatgggaatgatactagaatagaatttgggaggagccttgggtgactcatcacatcgcaccaatcacttccccaaatctaatggaatgcccactctaaggtggcgtctggttggaggtaatgaaatagaatggaatggaaaggaaacaatttttattccattcttttgtttggttgcattttaaagtattggaatagcattc

SEQ ID NO: 17579 - DNA, 3883 bp, Cannabis sativa
aaacccatttacggttagcttaacgaagcagtaatcgtttcctctgtttttattttgggtttctctctgtattgagatggctgagagtttcgacggcgctgagttttggcttccccctgagtttttaaccgacgacgacgtgctaatcgacatgaatagcaagactaagaacgacaaagatgggttgacgtttggggctgaagcagacgcttataccaagtctctgttcccatacgagttcccttgtggctttggctcacttggggttccgtcggatttaagttctccggtcgattcagttcttggttcgagcgagacggagagtgacgaggaagaatacctggctggcttgactcttcaaatggcccgttctactttggaaggtggttttaagaacattggttctgagaacggaaaggtataaagtagttctatgattcttttttttttattattagattgttttagggtatttttacatattttctgatttgggtttttggattttcgattgtttagccacggactatgtctggttctcctcaatcaaccctttgtgctgttggaaatgtttgtggttgtggacaagggtctagccgtgaaagccctaaagctcactctcgagtctcatctcctccaaagacatgggatcttctgaacgccgccgccggtgaagtcgctaagatgaggttgaacgaagaagagtacatgttctaccacagcagaggtctcttgggtccacctaggaagccttctccagtggctaatacgccaaaccctgatatcgtttcctatctcaaccagcccatttctcaaaaacaattgcaggtctcacaggtactcactctaatggagctcataccttattattccatttcacaagtctttcgtaacactattactaacccttttcactctgttttagtttcagcaactaaaacaccaacaaatgatgaagcagcagaactcagtgatatggggacccaatactgccactcaggctaagggccccggaaggtaccagatgagccaggcccagccaatggcacaaaacagagctcgaaacaacgagttcatgggggtcactaagaacaaccgacctctggggttgtcaccatctgcatggccttctctacagcaaggtcagagccagccaaacgggtctggcatgagagccgtctttcttggtaatccggttgaaaaaagggaaagcgtaggcaccggtgtcttcttgcctcgtcaagttggggcccaaccagaaacgcgtagaaagcctggtacgacgtcgtttcagttcttcaagattgtagtactacagctgttctcaatttattatgtttgaaatataaacatagataggacccttaaatctagtggttaacatcattgaagggtcagaggaagcatttttattttggtacagggtatttattacacttcccttaatcagattcttatttttttggtcactaatctatatttgtatgtgtttattgtacagcttgtgctacagttttgcttccagctagggttgttcaggccttgaacttgaacttggatgacatggttggccaaccccagcttcatcctcgctacaatggaagatttggcccagaaactggtacataaaacaaacccttatgtacgagtttttattaaattgtttcttatctaatagtgtcgttttttgttaaatttgtcgtttccagatgtgtctttaaggcttcgaagcaacaataatgtcgttccacataatcatcatcagaggcaacgcaacatgagacctcagcagctacctgtcgtaaaccatgaaatccggctaccccaagattggacttactagggttgaggctatgtctactaatctcctatttttttggttggtattttaggttataaagggtaagaatggaaagaaagaaaaagtaaaggtttagggatatatgttagtatgctatatagtatagtacagtgaaagaaaaataggtctcaagaaagtgaaggaaaaaaaaaaagaaatgaaaagaatcatattggagaaaattggtgaccattttgttcttttgggttaggcttagatgattaataagatgtccttactttgattagcacagccttttggtgtcttgggtttattttttttatttttggctgttgaaagaagaaagaaggtggtggattactattgtccctcttttgttttttgtattagggacaatatgagaagtttagggtttctatgttaatcactctgattaagctttttcattgttttttaatatacatgtttttaatattcagttcccaacttgtctctcatccacaccttggccaatgaaatattattaataaataattttttttgattaacgaataaataaaaattattgtattttcaatttacctttatgttatctgtgttttaagttaattaaatatgtttagtgatgagattatgtactgacacttccatccatggaagctactactgtgggggaactttaacgcttttctcgagacccggcaagctggatttttgatttgtttaatgtcgtaaatcaaattggtttatttagttttttgtttcatttaattaaggatatttatttaaattctaattgatcttaatttggaaaggtaatttggattgtgaccctttggggacccaacttttttaagtttttaaaactaaacttagagaagaagtattgttgattgtaataaatacatagggaagaaagcttttttggtgtttagttatggaccaaccgcgtgtgctctgcgctttttacacgtgtcggcaagccttatgttatttgcaattcattttatgatatttctttttctttttctttcattattatcctctttagccgtttgtttaaggggttgattaagatttttttattatgaaaattttgtacctaaaaaagtcaccgattgagatgtgcaaactgaattatacatgcatttttcttggaaattatctaaatatcaagacttacgaagaaaatacagagttaaatgcattatgcttataaatttatttatgacaaattttttatttgtatttctgtaagtaattaattataagtatctatgtttttttttctaaaagaaaaaaatgttcttccttgtacttattaactcacgttttgtaatttgatgtacttgttaaaatggaataagttacaagttaattagactaaaatactacgccattttatggtttcttttacatgaatataacgtataaatattttttagggtaaattaccaaaaaataaaaaaatattttttagggtaatataaggaatatagacatggtacgggcttttaaaaaaatggtatgggatatatacctataaaaatgtgatttgaaatgtaaatactttgtactttttaaagaaaaaaaatgtcgatacctactattattatttactcgagcaaacttgcaaaatctaactagttcaaatgccaatccatttgaacatattaaaaaaaatgtcacactgttagttaaattaaccagaaaaagcatcataagaaatttgaagttgaatcaatggagtgatttttacatgttattttttgagcatttcctttggtatgaaatgtgacactagtttaagattagatgatttgctagaataaaagtggttatttggtggttgacagcgttacacactcaccaccaccaccccacgtgcctcgctggaggtcacatggttcgcacgacttttggtcgtgggatattttcacgcgcccactctcctgttctgcgcgtgggacattataggtgaattagttgcaagtggaatggagtggagtggtgggtttgcgtgcgttcctttacgtttttgcgggctttttacgtgctttg

SEQ ID NO: 17580 - DNA, 3557 bp, Cannabis sativa
  modified_base (3509)..(3519): a, c, t, g, unknown or other
ttttgggcagaccaaatcactttggaagagtatttgggaccctcatattcactgaagaatattaattctactatggccagttctttgtgaagctctacctactggttcaaaacatgattttctctcttctttcggttgcagcttctgtggtaatgatgagggaacttgcttacatctgcttcgagactgtccagttgctaaagccgtgtggttctcgggcccgactcccttaatggtggattgtataccagggaattcttgctgggaattctttgaaaatcttctcacattggatgtgggcttaaacacataagagctactttcctatattggttgtatctttcatgttatcttgaatcatagaaattctactagaatcatgggctccagaatttcaattcccacattaattaccaaggtagtcttgtgctctcaagattactctaattctcaatctcagaaggctcaagaggatgggactgcaattgaacctccattcatcattaatgccccctagtaagttattatttttcgtggatgcttcttggaaaaacggatcggctggccttgcagccgtggctcttaatcttttggataactcttggtcctacaatctggcgcaatctagtgatgcatctactatggaagctgaaactaaggcagtcaagatggcccttgagtgggctacccaaaattcatgggatcatctcattccttttgtcagattgcaaattggttgttgaagctctgggtaatagagtatgcccacccgagtggagattttttcatctttctcttgtagttttagatttggttaatgccttttcagattgtaagtttgtttacattaatcgtcgttttaacttagttgttgatggactggcaaaaagagctagatactctcgtcatttggctagtattttccaaggggaaggacccccctgtagtacccatcttttccttctatcaatgaatagcgttctattaaaaaaaagtatgccaagttaatgttttagtacatttgaatattttttacccatctaaaatgcatgagacatgagaatataaatttgttattttcacttgttcttgcttgtattttttttattaacaacctatttatagagatgatttgttattattacagttaattatttatcctttaatcattgttttagcacttaatatgtcaatatcaccttctatgaacaatccatgtattttaaaaaattagtcataggcaatttgttatacaaaatagaatgaaagtgtaatataaaagtaaattttaggaatgaaattaagtaatgtttataattttttgacataacttagaaattaacttggaaagagaataatgaactagtagtggaagtaatcattgtggtacaagtgttgtgttgatggaggatccggtatgtacgcatatgtgaactcattatgtgtctccatcctttgttgattgttgcttgattctactccttgagaagtgttgctttagttgttatggtttgggcacctacgctagtcatggattaaggagtgacgcatgcggcaatgccttgagtttcttggacatgctcttcattcaccacttctcttgaattaaatgtgcctttacttttcacaacttcatggtctcttaaaatattagggttaaaatggtacctatcgggttgaggcaggtttcctactgggttggagctcaactcgaaatcctccttaaactgtactgctagtgttgatatgtcttcctttgcttagtgaaatgagctttcatgcatggcaacatataaattcatagtgtatgtttgtaagtttagacacacgtaccttgatagctcataaaagctttcatgttgtggtgctaattggttgaattgtagatgtacagctaccttggcaagatttctccatgtcttcatgagcaatgaacttgggatcctcctgatgcttagtcattttagagttacctacacggaatcctttgactcttaaacatcatacaacttcattgtaaggtcgtttgaggttgtgaataataaacttgatattttgtttctataaatttgatttttctatttgttgtcccaaacatcacccttggccacatggcatggaataaagtgacacatggcaagagtacaaggcattggatgaaataatgatgcttgaaatatgttgggtggaagatatgtaaggcaagcctttccagtagtcttcaagcaacgaaagaaacatatctcaaaccttacccaacaacaaaagagttatcacacaaggataaatattcggccaacaacccttataaaggaaatgtctaaattcattccaacacttgtttccttacaaataggtcaatcaacactcctacaattgagagattgtgagatttagggaaaagagaggatttcatatgattgactcaattaaacattaaacactttattctataattaagtgtaaatattctacattatttttcctgtaaaaatcatatctactattcagggaccgaattctatattctaaagagcgttattgtgctagaaaaatatttgtaatcttttgaaatagcaagaaacttagttcaccaggttcatgtgatcttgttattctttagaaatattcaacaaaaaaggagtaggtcattaccaattatggggtcgaacctttataaatcttgtgttatttatagcttattatttatctttattccttattcactcatatcattattttatagactctgcatcgttgactaaaagcaaggtcaatattttagtgctttcattgggagcttaaaccattcttgctctctactgaataccaacatttcaaagattcctaaaccatcatcatttcaagaacaatggtttagacaagaaggtcgacatctatagagccatgtgaccaaatggtcacaggccataatgtctaggcactagtgaacacagggatggacaaccctaatgcttgactactaccccgcaataactctattatgggagcaagaagtggagacacattccccacagagacgaacactaaaaatatcactgaggtcatgactgcactcactggattcacccctagtgcctaagaggcaagattcccttttcatgcatacgctagagagacgagactaaggatgggttgaccagccgatggagtgccttgtgttgacatgggggtgatttggagctagagaacttcaaagaagtcttggggaaagtttaaatgtataccaacgccctccaccacaatcgataggagactcacgctacggtgaaccaagtgttcaattagcagcgacaggagttccaatagtggatggatggcaaaaccaaggagatacgagaccaacaagaagaagtcaatctgtagggtaagagaatctgatccaacaattttcccagcaagctagaaggcagaggattgaggacaaatagcccagacggaacaattgttgggttttgtgccctaaagaaaacccatttcaatataannnnnnnnnnnaattaataaagatcagaaatcacttttatgttgcatgg

SEQ ID NO: 17581 - DNA, 5865 bp, Cannabis sativa
  modified_base (5066)..(5081): a, c, t, g, unknown or other
aaaataatttccaacataaacaagggtggaaaataataaataacccccattcattgcttgcaagggtgataaaagcttgctactacaccaactcaagttttttggaggctaaaataggaggctacagatcatttatgtggagaagcatcttatggggcaggaaaatcatagagaaaggggttcggtggatggttatttcaggtagagacatccgcatcaatgaagataaatggattccccgtccctcaacattctctttgcgcaccaaggcaaatgtgcctcaagggaccactctagactacttaaagaatgatgatggttcttggaaaacaaaaatagtggaagattgctttcactcggatgacagtccaatgatccttggagtagccccttgctcaacaagcaaaaatgatgatcttgtatggcattacactctgaatggaaactatactgtgaggagcgattacaaagagactacaaaagatgaaatgaaagcaggtccctcggagactgagataacaaagaattggtggaaaggaatatggaagattgaggcccccccaaagatcaggaacttcatctggagaatgtgcaataattggctacctgttaatgtgattttaaggcatcggggcatgaagatcaatccgttatgctcttggtgtggtgtgaaagaagagacaatcgatcatagtctctggttttatacctcagcagaaaacatttggaggcgattttcaatttggccaattctcaaaaaaagcggaaacaacacattggacatgctcatccacattcagcaccacgtatcaaaagaagacttccttttttttataattatgtcttggctaatctggaacagaagaaacacgaaacgtctcaacatttaccttcctcctgccgagatgtggatccaatgggctcaactggaaatcgatttcataatgaataacatatccccgaaagatcatagcagccaacttcatgcaaaccctcctctcggctgggaaggaccacctgctaatagctactgcatcaactgtgatgcaagcttaaaatgcacagattcatcgattgggctgggagctctaataaggaaccactcgggcgatgtcatagcagcagaaattcagcagcaacagggctatttctcgttggagcttgctgaagtcttggccttgcggatgggaattaatttggctatccaaacaacgactgtcccttttatcatccaaacagattgccttcgggtggctaacttcttgaagggctacagtcaggttaacacagattggagtgcgctgctagaagagattaaagactccctagcatatacaaactgcctagccgtgaatcacgtagggcgccaaagcaacaaggctgctcattctcttgccaaattggctatttcttcaaagtgtaataagttgtggttgggttattatccccattgtgcgtctgtctttgtaaaggcggacttgcctaaacttgtgtagttgctctttttgaatatacatctttcaaaagaaaaaaatgtataataaactataaataaattgaggagtgctagtgtcaacctcctattacaacctccacgcctgaaattacatgtcggaatatttattttcaatttttttttcacgggatgtttgttatgcttacaacatcatccttataaatttttgaaaaatttcgaatagtttacagtgttgaaaatatgtttgaaggtttttgaacacgcgtggtaaactgatatattaggaactctgttttcggtactgtaaactattcggaatttttcaaaaatttacaaggatgatactgtaactataatgaatatcgctgtgaattttttttttttaaaaaaaaatattttggcatgtgattttaaacgtgaagattgactaagatgatgtaattggagattgtaatgagcattcctcaaataaatttttatacacataataataatgtaattttttttttgaataaataataataatgtaatttaaatactataaaatatataaaattgtaaatttcctttaaataaatcaacatacattaaagactcgtgaaaatattcctagtaatcgtttccatagcatcgaagctaataatgattcatatacatatgagcatctaaaaaaaaaatctactgacaaaagcatagcaacgaagtctaaaactttttttttttgttatgagactaaaacgatcttaattcaacaccaaactcataataaaattgccaaggtcaggtgaggtcaggacatagcgacatgagtcaaaatcaacaatgtccatgttagatatggtatatgtgggaggagactactaagtgtactgtttatgttttacaaaggaaaaagcactacacagcccaagacaagagtataagctttaaagctagctagtcatgtctttaacttacctctcaagtaggtttccaaaaagagagacaatatatacgtcgtcctttccaaccttgtaacaaccactcaccatgttgttcaacaacaaaattgttgtcgtaacttgagtccacagtgttcttcacagcttcaaagatttcttggtcaagtgggatctgcttgaaccctactcttgtgttccttacctgccactgcctgtaactctctggcctctcaactctctccaacccctcacacgccatcacattctctatatcccttccatacactgctttctcaaactttaatctgtactcttcctggcgaggtacggtagtgtcaaacatgtcaaacaatggtgagtagtgaaagagtgtctctttgaaccttgtcatgaagaaaggtgcactgtatgcaccattaacaacaccatgtatgaaaaggtcaggatttattctccttatcagctttaacacagtgtctcttgggttgttcatcaccactgtttcatctggtatgtgctttaaccgatacaaacaattaaccacaacaagctcatctctgtctggatcgatattgagatcctcataacggattgtttcccacttctgagcaattacattgtactcagatggaacattgaatctctcacaaaagttttctaaacgacgcttagtctcttccaccttctccgagggtcgaaaacctggttggggtatctcaattcctgtgattcgaagctttggagggcctcctggtgtttttgagagacgttggataagctcgggccattggaaaccgtagagaataccaaagtcaatgatgtgaacacttcttacgttctttgctagtttcttaattgtttggttagcaaatgaataggacatcctcatgaaagggcaggcagtaatgtatacttggtaagctttcaagatatcagcaaaagacatctcactacttacaagagctgaatatgaagctgtctttttcccagtcaagcgtgcttcaaagccattagcaaagtagtgagctaatctttgagttgcatctccacaaggagaagaatgctgccttatccgtctcaattgttcagttgcagttctttggtcatagtcagccactgcttcagcacaatgagtcaaaagggtccataaatccaccatttctttcttggcattaccttctttctttggaaaccgcacctttctaccagacccttttgcttggtggttctgtgaagacttctgacgaacagttgacacagtagattgagtggtatcaccttcatagagtaatactctgtcaaacatgatctctgttgcctcagaatcatcactataaattgctgattgcttgcttttcctactttcttcttgactctcaccgtattctctttcaaggctcctctttcccttctgttcatcaagtaaattacattccaaactctccaaatccaagatctgggttttgcccatatgacaaaatgaacttgcttcccctgtccttctcctaaaatggtcaacagattgtacatgatcagaagatgaattttcacctttattagaagaaaggggataattctggccaaggagatcatagaatggcttttcagcagcttggagtgccaaaggctcctctaaaatcaggaactttctctccaagtcttcctcttccatgagtatctcacttaggtacttaagtgtagcattaaaggaatcggcagaggaagagccaggagaatctcccaccgaaaccaaatttgaatcactcaattgaggatgatttgtttcatgtgaagaagcttccacaatattttgatttgtaccttggttgaagttaaaatcattcatggaagaaacaagtaattcttcaaaaagggtatccataaaaaacaatcaaagttttcttttattattaatattattattacacaaacagagaaaaatcgaaaactataacatcagactttcacaagtcagaatttgaggctatgtagaacatgaaaattacaattttacttttacacacaaacaaaaaaaaaagaagtcaacgaacaataataagagatttagactggcaaatcagagtcgccatcttcatgttaaggcataataaatacttcttattgaaagaaatagaaaaggaaagaaaagaaaagtaattggaaagaaaccttcacctcaaaatggtcgatcgcaggttaaaaagcatggagtcactttcaaaacggcatagggaaagggtatgagtatgggatcatgatatggtgtgtacagtgaactagtaaagtaaacattttgaaaagtttaatgttccaagaaagaaacaaaagagaaacatcattagaaaaaacaaaacaggcatttcatttgttgttttcgttaggtttctttgtttgcaagctgggacgttctacagggagctgaagcccctattaatttttacaattaataattattttacatgatattaaaaaaacaatcgagcatcgcaaaactgcaggagaaaacttcatataaaaaaaaattaaaaaaaatttataaaaatactgaaattttaaatagtttttttatgttatatttttattaatttatttttgattttttgttattcgtatgttatttttattattgttttgatgttatttagatnnnnnnnnnnnnnnnnttttatgtaattttcttattttttgtgttatttttatggaaaaccgcaaaaatataaaaataaaaatttaaacgtccacagatccatggaagatcaaataaatccttaagtctacataacaatctccatgattcagatcggcaactcgcctttgggttaccatagaacccagtgaatcgccataaatccctaccagggcacttaaccagagcatcaatatgactagaagtgaacgacttaacactcacctcccaatcataattccataataataacaggccaccactcttcccaacacaatcaacatgaaaactatttgacaaattaacttgttgcctaataccttccgcccaaccaccataaagtttagtttccgacaaaaaaactaaacttggggagaacttacgaaccactgctcggaaggctgtcaacgcaccagggttccccaagccccgggcgttccaacataacaaactcatgtctcctggccagcctgctctacagacttcgccaatactgaattcataacctcgggattcaattccgaaattccatcttttcttcccttcttgaaacattcattattatactcaatatccatcttccttttacctcctccacccgaacgcggactaagcttatttagatcttcctttggagaatgtatcatagggctcttcttactaattctcagcttattaggcgcaaggttcttgtccaaccgatgtgtagtaggtgtggggaggaagtggaatcttcggagcatgctttagtgttttgctca

SEQ ID NO: 17582 - DNA, 3807 bp, Cannabis sativa
tggttcttatagtgatgagctcaagcagaaaaagttactccaattctttcttggtagtccttacattttttgatgttttggatatgacatagcgatcgcaacagacaacaacaaaagcaaaactgtacaatgttttcttggagtacgctcgaggtgggtgtttagctgattttatgaacactattatattgtctgagactgaaatgagacaatatacaaaatttattttgagaggacttgagtgtgttcacaaaaagggtattgttcattgcgatttgaaacttgaaaatatattgatggtgaaggaagaagaagatgagaattttgtggctaaaatatcgaattttggactttcgaaaaagatatatgatgattggataactccctggtattgtaaatataggaacaaaagtgtattgagctccggaatgtttagaagatggaattcaagaacaatgttcagatatatgggcattaggttatattattttagagtaaatgaaccgaacagtaagcctaacaagcctatcaacatcatccattgcggcaactttcatctttatcattatgatatttatgctcaatcttatcactaatttgagtcccacaattcatgcaaagttcataaattgtgtcaataccctcccagcaaagtttgtctcttaaggctatgagtgcagtctttgatagtggcttgatgaagaggtctgcaacttgctgtgtagtgggaacaagtttggtgagaagtccaaaatggtaagatttagctagtaacatgtatttcttgtttgaaaattataatttagatacaaataatgttacagttgtttcttttgtaacttctcaaataatcaacaaagctgaaatgaaaaacaaaattactatctactaccagtaatctttgcatgagcattgtccccttgtaaagcaatgaaaaccagaagtgtccctaagaaaaatgtccctaccactaacaatagatacatatttgaaaaatgaatggcagtctccacatagaactatattcttaacaattcgaacaggttttcctggcttggttgtcaggattccataggttgctgcaagtttcgcactgtgatggaacaagaaattcttcttttgatgctcttctacttcatgaagaacacagcttgtgtcaggctcataaccagctttcaagcattctaagatcagtagttctagtgcactgtgtatatcttttgcttggggatgagatttatctcgcgcgtaaaatgaatggatcttgttcttatgaacaatccagctctgtcctggctgctttctgaacccctttactctcatatcctccctaaccatttcagagcaatgccatctaccagatgcagaatacaaatttgaaacaagtatgaaggttgaagggtctttaggattcatggaaagtatctgtttagtgacccgtttttcgattctcctattcaaatggattctgctactgtcaagcaaggctcgccaaactgatatatctggctcaaatggtagcttactaattatttcctctgcttcttccaatagaccccagtaacctaaaactccaacaaaggaggcaatgtgatctgaggttgggtcaacatcataatgtgttttcaaagagtaaaacaaactacggcaactatcaactaagttggagttagtgtgtctataagctgaaatgactaaattaaaggtgatattgtctggctttattcttgtcttctccaactctgaccagacagctaaggccctgtcaccctgtctatgtagaagaagaccagcaatcagaccattccatgaaacaacatcgcgtttagccatggattcgaataccttgattgcatcctccatgttccagcacttggcatacatactaactgtggcatttcctacttctaattcagacataaggccagatttaagagcaaggcaatgtacttgctttcccatttcatcaaatcctaaccttccacaaagaccaatgaccgaagccaaagcaacctcatctaaaaccattgttccttctgattgactataatggaaaagtgaaatggcttcctccagttgtccatttcgagcatatccacagatcagcgatgtcaagacaattgaactgtcccgatcaactggccacctattaaccatcttcctggcatctgacatcctatcacaccttgtacacatatcaagcaatgctgattcaatacaagcatttgacccacaaccagacttaacaacgaatccatgaatctgctcactaattctagaatccccaagcaacccacaagcataaacaacactagtcaacgtgaaatctgtcaactctaaactgttcttcactatactcatgaacaaattcaatgccatcaacccttcaccatttttacaaaatcctgtcaaaagagcattgtaagaaatagagttcctctccggcatcttcttgaatgtctccaaagctaaatccatcaacccaaattccatgtaggctgtgatcatttctgtccatgttatgatatctgtaactggcattttctcaaacaaaagtgtcacatcttttacacttccgcacttggtatagaacccaataagcgcattactaacacttaacatgtcttctaatccacacttgattgcacggcaatgaacttcttggccatgagccaaagcattactacccgcacaagcagtcaaaatggtagaaacagtgaaattatcaactccaaggctatcaattctctgcatctcacgaaacaactcaaatgctttatcatacatggactcattcactgcgctcgatatagtagtattccaagttgcgaggtctctgtggggcaatttatcaaacaggttgagtacaaaatccaaacagccacacttaccatacaaacccattaatgcatttgaaacaaaaacacaatccaagtagcccattttaaccgccaaagcatgaacttgaaatcccaattccaaattcaaaacccgaatacaagcagttaaaattgccacaaaaccatactcgttaggctcaatacctgaattcctcatccgaaagaagagcttcatcgcttcatcttcacgacccgactttgaaaacccagaaaccaaagcagtgtacgacactacatcggggcaagagaggcccataaagaccttgtaagcctcaggaacaagacccaatttaatataggccgaaatgagagcattacccagatgagtatcttcttcaaacttgagaaaggaggcatgaaccgccttggcgagctcaacatcaccggaacgaaccgaaagtcgaagcaaatcgaatagacctttaacatcataatcctccgagcgctgtggaggtggggaagaagaggataaagagcagccatacaaaatctctgaattaaaaagggtttgtcgtttaaggtcaaaagactcgtaacagagcaaggattgggtaggagagttggagtagaagacgtgattgtggtggtggtgttgacgaggtctgtgtttagcgggaaaaagtgggagacttgatataacagtagaggaaaaagaagaagaaaagggaagagatagcggaagaggaggaggaggagcaaccgtagccatatattccaaagccgcccataaatacaaagctaaacactgagctcaaaattctcagacagctccacagttttcatgcttttcttattatttttaccccaaatttagtaaggaaggccattagaggtaaacttttaaaattttgaatttataagggatgcaatagcaaatacatatacatgtagttagtttttttttttt

SEQ ID NO: 17583 - DNA, 6626 bp, Cannabis sativa
taataatatcagttgggcttgcttccccacactgccacacacgcactttccctcgataaacttcagctttttctccacttcggtctcgtggcagtctcacattcaccgtttccctcctctcttatttttgttacgcccaaccaaccaaaccaagcaactctctctcattcatgtattccacgcctcagcttcacccaaccccactccggtcctagtctccaccccagccaggacccagatgcagcccaccgcccaaaagccaccgtcttccacctccacctccgcactccaaatcctccttacccttatcaacgaaaccctttcccatctcctcctctcttccctcaccgtccgatccttcatcggacggtggcaagttctcaactccaagttcacctctttaaactcttcaatctccgccatctccgactctccccactgggctgagaaccctcttctccacaccctcctccctaacctactttccaccctccaacgcctcaaagctctttccgaccaatgtacgaactcatttgccggcggcaaactactcatgcagagtgacctcgatatggcctctaccgctctctccaaccagctccacgaccttgatttgcttctcagatctggtgtcctccaccaatctaacgctatagttctctctcacccgggaccaggttcggctaaagacgatttgagctttttcgtcagagaccttttcacgagattgcaaatcggtgggattgagttcaagaagaaggctcttgaatctctgcttcagctcctcaacgacgatgaaaaatcggcctccgtggttgccaaagagggaaacgttggttacttgattcatttacttgatttccacaaccaaccggcggttcgagaacaggctactttcgccgtctcagcacttgcttcggcgaacgatgagtccaggaagattgtgtttgaagaaggggctttgggaccattgcttaggcttttggaaactgggtcgacggtcttgaaagagaaggccgccattgccgttgaatccctcaccgccgatcctgaaaacgcttgggccgttccggcatatggtggggttgccattttgatcgaagcgtgccgatccggatcgtcggtgactcaaacccactcggtgggcgccattcggaacgttgccaatgtcgaagacattaagatgactctgggagaggaaggagccgtaccagtgttgctccaattactggtttgtggtatcggcggggcccaagaaaaggcggcgagttgcgtagcggcgcttgcctcttccagcgagtattttcgcagtttgataattcaagaacggggtttgcagagattgatgcatttgatgcaagacatttcaagctccgacacacttgaacacgttctaagggcgataatctcgctatcaacatcttcagatcacacgtctaggattctatcttcatcaaccattttcgttatccaacttggcgagttcatcaagcgtggtaactcagttttgcaacatctctcggcctcgttggtgggttttttatctattagcgacgggaacaagcgcgccatcggtagctgcatggggtcgctagttaagctcatggagtcaccaaaaccagtgggtcttcaggaatctgctgcgcaagctcttgtttctctcttggccgtccgatcgaaccggaaagagttggtcagagacgagaagagcgtgatgaggttggttcaaatgttagatcccaaaaatgaagcggtggcaaagactttcccggtgatggttgtggccgcaatagttgctggtggaagtcaaagctgtcggaagagacttattgccgccggagctcacccccacttacaaaggttatcggaaatggaggtcgccggagctaagaaggctttgcagagactcgccggaaataggctcaagaccatctttagcctgacatggagggaataacccagccaaggcactaacatcgtccccgccaaacgaaaaaagaatggttagttttttttcttagttattaagggtaaaaggggaatcgtaatttttgtagatagtttgacctagtgctttttgactttgacttcctacgtggttgatatcaagcaatagaattttgccaagtggcttttgttaattgccacctgtaaggttcacacgggcaatcggttgaggtggccttatgatgcctcttgtctcggtgtgtcgtgtgtactgggatattttgattattctgtgggacccaccaatagtgggaccctgtgagtatttattgaggtttagaaaaaaactggggaactgttttggctttaaaacttctttattcctgaattgaataagataagctgaattaatctaggagaactagccttaatatttgacgtttagggcttatcaaactgttgacccgtgagaatattggattacacttgtattcttctaattatattttaaaacacttttacatggtgatggtgggttgactttgacttaattatcatgtttggtttcatactgagaaatctgttaattctttatcttaagaaattaaattaatatttaatttctgtgttttatataacaggaggggttcatttggatttttctaactgtggaagaaagtgaaaagtacttgagtggacaggcaacagacacacacatcgtatactccaacctttattttttattattgttaattttttctacctatgataatctattttactttattttattattatatatctactaatataatatatgatagaaaaaaaaagaagaagcatggatgcggttttttagggagtatcctcgatttgcttttatatatatataattttttttaattataatctttgtagtggattcccaatgaagttgtatgagtcattatgattgtaattttgcttattaccaatttatgtatgttgaatgtgaaatgtgaatgtacatccaaatatccatgagtgtaattttatttacaattttaatccatttgatttgtaatattcactggcttatattagttagaaaaagaacaaaagcagatgcaattgttatttgttatccacttgtgtcattgtgtgcaatttaagaaatttgttgagtttgtagaatgaggtaaccatataatgatggtgatgatggcaatgacttgtgaaattttcagtccaaagatttagggtcattttttctttcattcattcattgggtgggtctctgttttaggagtgaaacaggtcatggaaataaatggcaatgatgatgctcttttatatgtttaaatggtgagttggacctttcatcagatttggttaatggtaggagactaggagtaacagtggacccctttcttcatgcttgttcagtactatgcaatatgcatgataaccatactaattcagtatagctttgcttctcctttacaacccaaaaacaaataataagcttgaacaaatatgtaagtaacgaaatttgatcgtcatatataaaagtgaaagaatgggttggagtaagtagtgtttggtaagtttgcatatagatatagtaaatgtggtgggaccgtatgtatattgagatttttgaggttctgtaaaagtggtgaaaaggaaagtgacaagagagatgagagagaagctcggcggagatgtagggaaggtggcagactatataaacctcaggacagcgggtcccaaccaacactgacctcacacacttcacatgcctttctccactcttgttcttttttacttctaatttttgtgcattcaaattattttttttttttaaagaggcgtaattatataaatgaaaaataaaataagactaatggtcattacattgaagaagtctacaaaaataccaggaagattgaagttatttagttatagaatattgttattgggtagaagaatactgaccttttagcatttctcttagctacattatcttctctctttcgttaattgtctcttcattagggggtacttatttataattttattagaaaatgaaccttctttaacaagttcctcccacttaaaagttgggtaaagatttgggaattgggatacatgtaaataaatatacatttattagataacagatagatttgatgagtggtcctgtccacttcaatatttgatatgagaaggcacaatttcacatggctgccttctttctccaaggagtcccacaattgttgttaagagtaatcctaccctaccaattacgctgcatcagatactgtaacatgaaaaagctgcctacttttctatgtcaaatactatttcccgtgatatcaaattataaatataccatatttatatgcctactctgcccttctctttctttagctgtaaagctgtgccctcttccatacctctctctctttctataaggtataagtaagtaactgcctaagtttatactttcttattaaattacaacatcaaaattcaactttttttttttttactttattttacattacactatacattaatatttttcttttttataaccatattatttaaatactatacattatacatattatatattatagtagaaaaaaaattcttttaatcgggttggtcgggttaatttgtgttaattggatgggttgatattattttcaacccacccaatataaagattggacaagttatatttttgtcaagtttttcgatttagtttaggcgggttggacagttttcaaaaatttatgtacaaccctaatataaaagatgcatgagctatttttttattttgcaaaattggtgtgattaactatatcaaaaaaaaaataaaaaattatgtgtatgtgtattgactcagaaatctagactagacttctaagccacatccgcttgctagattggcgagaatatgacaagttatagagcaattaatgagagacacaccaatttatagtagttaaccccctgtgtcgcgatagtaatggagctatatctactttgagtttttattctcacaagatggtaattataacaattatttaagtatcaaaaacttcaaactctagacagaaaaagtctagagagagaagctctcacctttaggttagttttcttaatgtaaaaaatgaattaaggtagctctccttttataggtgaatgagacccaaaaaaaataggagataaaatataaataaagtgttttccaccgttgatgatgatccaacagtgaaaattagcttatagtaatgattgttgtttctttatgtctggtgggtcccgctgcgagttactcggagcttatttttgtaactcccttggaggtgaattttggcgatgatagcttcaaaattttgactagtgtgagacatgacttgatagagggcttatagattcaaaatgcaagttgaatcgcatcattcaaatgaaaattgagtgagttatgacttttttactaaaggcagttcaagttccagcgctagctaggttgacatctgacgtcaacctagacgctttaaagatgtagaaacatccaagagaagtacttgagatgcccaagtgatggtttgacacccttgagtccttttatgtgtttcggtgaagctagtcacacattctcaaagatgttgctattttgcggaaacggaagactcgaaacttccagcttccgtataagccaaaattgaagttgtgaatttaataaatctggcttcatggatcattgtacttgtgaaaaacttgaggaacggttgaaacaggactcaaattcggataagcaaagcctagcgaaccagaatgttgacatgggtgctaaggccttttaaacgacctcccaggattttgtttttgatactttcaaggcttccaaggcttctaaacttgaggacagggtctctccccctatttttgaccatgccaaattcaatagtcgcatctgatttggcattcgagcaattgaaggcagcgtcccaagttgattgtcaacttgggcattagaccgagcaccgagtcaacatgggccctgggccctgtttctaggcactcgggtttgtggttttctccttgagtttacttgaatctttgttatttctgatgacggtgaagatgcctggagtactttttactgttttgaattggaaaaaggcccagtctcaggtgtcaacctgggcatgggtccctcttttgccccttcagaagttccgtttggtacttggaaacagttgattctcaatattttctgaagacgaagatgttgcttgaaagaattttgggaaaactctatttttgtcgcccaggttgataaattgtcaacttgggccctgttatttgtgcctagaatttgttgtttttcttccagaaggacttatttccctatttttttttttatgaagatagatgcaatgcaaaagttagatctttgaatgaatgcttggaaggcgcccaaattgatagattttcaacctgggtgctggggccccgagtgctcaaaaattaacttgctcctaatctgattctgatgcctcaaatatgtcaatggtatgccaagtcgatgtcccaatgcatgttttagccactttgcactaagacagtcccggaaaattgaaactctagttgaggatgttaacgtgggcaccaggtggaaa

SEQ ID NO: 17584 - DNA, 8700 bp, Cannabis sativa
  modified_base (5511)..(5511): a, c, t, g, unknown or other
  modified_base (5572)..(5572): a, c, t, g, unknown or other
  modified_base (5621)..(5637): a, c, t, g, unknown or other
  modified_base (5749)..(5752): a, c, t, g, unknown or other
  modified_base (7497)..(7497): a, c, t, g, unknown or other
aaggcccatggcctagcttggtgattttcattgcacttagaaaggatgttgagctaaggtctacccaagttggtggaacttatgtcataatttgttttagcggaggcctgcgtatgcgcggcctctatcaagtttagttaaatcttttttattgagtaggggaggcttgtgaatgcacagcctaaacaaaattttatgaattattatttttttttttttttgaatggaaaaggatgcttatcatccattacaatctttaacaattcagaaggagaattgttttgaccaaaaatacgatctgacaaataataagaattacgcaacaaggaaatgtgcagcagccattagcagaacgcttaacaaaacacaactgaacatgagacaactaagaaagtaagtgcgggcaatcttgtacaagcataccaaacgaagatggcaacaccacatcagaatgaatagcttgaacaacaatgagacaatcagtttcaagcaccactttgctccatgttttccttttaatccaactgagcacttcttttatgcccaacgattcgacaatttcaggtgaagaagtcccactcttgctagaacaacttgcatcaataatttctccattggcgtcccttgaaatgaaaccatagctgaaagcatttgaagcttcaaaagtagacccatcaacattaacctttaccgtaaattcatctggtttagtccaatgctccacctccctacctacctcgaaatgagataaaggaggttcaaacttactttgttgagcacgttgccattggtaaagatgagttcttgctgataaaaccacttcagctgctgtagcacttttctggttccacattaggttgtttctagcattccaaatagcccaagacaccttcaaggcttcttctattttttcctgagtgttggtctgcataaggccttgaaaccactcctggaattgcatcggaacagtcgagataatgttaagagaggatcgatgccaacacgacatggcatacggacattgcaccagaacgtgcatgatagtctcctctgccatattacaaaaaatgcagagttgattaacatgaacgtgtttagtgttgagttcgacctttgttgcaagtgtggcagtgagagctctccaaccaaagtgaagcactttcggttggactttaattttccaataggctttccaaataccatcatccaaaccaagaactaaggactggttttgcagccaccaataggcactcttcaccgtatataaccctgaacattctttattccaagtccaacaataggcattcttcaccaataggcattctaggagaggaatgttgaagattaaatcacgatctcttgtgtcaaacaaatcctcaatgatctccacatcccaacacttcgaatcaacacacattaaggaggcaacatattgattcaccagcccaggatggacagaacgcacaaaaggatcctccacatcagggagccaaggatcttcaagaatagaagtttggataccactagctatactgctcctggccccgaccataataagatctttggcttcaaatatgctcctccaaatataactgggattgcttcccaaactagcagataagaaggaactattgggaaaatagcttgctttgaaaaccttactaaccaatgttgaatcgtgcaccagtagtctccatgcttgttttcctagtaaagcaagattatattgccttaagtccttaaaaccgagtccccctttatgcttgtgcttgcataatttattccaactcatccaagaaacccctctactttgcttagaagattgccaccaatacttgctcatagtgctctctaaagatttacaagtttgtaatggcagtaaaaagactgacatagcatgattgggaagtgcttgtgaaaccgttttaagaagaagctctttgcctgccttagataagaatctcccttcccatctaagaatttttttactagccttgtctttaagaaatccaaaaacagcatttttatttctgccaattgtacatggcagccccaagtacaagctattttcaccagcctcctgtattcccatgttttgacagataaaagcacaagtagcaagttgggtattacagctaaaattcgaaaaattgaccttttggcctgaagcaagttcaaaatcgtgtagcaggttgattatgttggtcgaatcattcccattagcacgacaaaaaatataactatcatccgaaaataacatgtggaaaatgaatggagcaccattagcaacctgaattcctctaatctgatgtgatacctcatactgtttgattagcaaagagaacgcttcagcacaaattaagaacaagtatgaagacaatggatcaccttggcagatgcccctagttggcaagataagaccaacatgtctcccactatgagtgaccatgtactcaactgaagagatacatgacataacaaggtaaatccacttagcatcgaaccccattcgttgaagaaccgcttccagaaatttccactcgactctatcataagctttaccaaagtcaagtttcaacgccatataatcttcctttcccgctcttttccgcttgagataatgcatgacctcgtaggaaatcataatgttgtcagtcatgtatcgtccagggacaaaagctctttgtgtctcgaaaattaaatgtgggagtactcctttaagacgattggccataacttttgaaacaactttatacagaacattacacagcgagataggcctcaaatctcctatgttgcaaggatttttcttctttgggacaaggacaacatgtgtttggtttaaattaagggcaagataaccattagagaagaattgacgcaccagagcaacaacatcatgcttaacaatgctccagcatttttgaaaaatcccgggagtcattccatcgggtccaggagatttttcaggatgcatttgaaagagtgccgacttcacctcttcttcagttacatgagtaagcagatcacagttttgttgagtagtcaccgaggggcaaatattatcaacaacaccagccaagttaacgtttgatgaacaaaacaaatcctcaaaatagccttgaataacgttgcttagaccagaattccaatcgcaccagtccccattaggaccctgcaacttagtaattgcattgtttctttttctagtggttgcagtagcatggaagtaacgattgttgttatcaccatctctaagctaaagttgtttcgaacgttgacgccaaaagacttctctatgagcatacacttcgaaaagctatttttctgcctcattagatgctaagattgaagcaggatctctatcgcctttgagctgagcaatcttttttttccaaaaacttattctctttttaaaactcccagtgaaatttttcccccaatctgcaaggttccttccacacaaagagattttttccataatccccattgaattattaaccccccagctatcttgcacgatttggaaacacaaaggttccctcaaccaagaattctcaaatctaaattgcttgaccattcgatacatattattcacagtaggctcaagaataataggacaatggtctgaacaagatacttcaagattagttagagtagctgaactaaaggtacttaaccaactttgagatacaagagctctatcaagacgtacctctatccagtttaaagaacctctgcccttctcccaagtgtatggataaccagcaagagtaaatcacaaattctgctatcaatcaatgcttgattaaaaccctccagtaaccagtcaggagctcctcctttcttgtcctcttgagataaaacgttgttcatatcgccaattacacaccatggtaaattattgtcagcagagagagttcttaataaattccaggttcaaaatcttaatgcacgattggactctccgtagcagccagtaagccgccaaatgatcccatttggattagtaacttgaacatcaatgtagtcatgagagtacttaagcagtgaaacctcctctttattcctccaaagcagggcaatgcccccacttctccctctagcatcagacgaaatagcaccatcaaacttgagttgaattcgaatattttcaattttgtcttttttgcataaagtctcacacagaaagacataattgggtctcttttggctcacaaggtcgttaaggaattgtaaggcccgtgggttcccaagcccacgacaattccaactaaggacactcataatcctaggtgagccctggaactagaacccaccaaagacccattttttgacacaactttagaaccattaattatgtccccctcatcttcttccataatttccttgccatgcatatcagtccttctacgcttggaatcaaggatcacaatagattcttgctgatcattgacttcttccatatcattaaagtcattcaaatcctaaccatcatgattatttccttttaccaaatcatcaccaatcactccttgattaatctccatattcaaattgtatcctctcccaatatgtcgatgataattgagtaaagggtcaactgcaagattctttccatttccctctatcaattcctgattatgcgtggtggtagtaactgcagcattcaatgaattttcaccaccatttactccttcatcggaaaattatgaatcggcctccgtccctgttctgagccaccttgctccgatcagtttgttcttcctctgaggttgggctttcatccataaaccataaggtttttctaaagattcgaatggagtatcataaatacgatgacagaaccgttcagagtggccaataattccacagatgaagcagaaggttggaagaaattcatacttgaagttagtccataaccaatcaccatcagtcctcttcaacttcatttattaaaacgtttgtgtggggtgtagtttgttgttgtgattattaaattttattttagggtattacatatgtataatttgaaaatataaaattctaattaagtattattaaaaatatatttttcatgaaaacacaatgtactgaataagtatattcttttttttttttttttttaattttcaagttttgttgctttttgggcacaaaaacttgggatggtgtgattttttgcgaaaatataattatgggtagtatttcaattcaattattttgtgccaatttatttactaaaatagttattttatctttcatttatgaaactagaaaacaaaccgtgtttcgcgtgcggtcgtattttacttagtgataattaatcataaaattatcaaattttaaaattttatattattgatataatatatttttttaattatatgagtaattatattactaaaatttcattatttttactcagaaaataaaattaatattgtagaaaaattcattatacaattttttataaaaaaattatatttaaacttgttaacgcagattttngttaaccaaatttgagcctaacaatgacaatctcacacagaaaaaataaaagctatacaanaaaaagtatgaacacacaggattttttacgtgattttgcagttaaaatnnnnnnnnnnnnnnnnntcaatcttattcagatttttgattgttttctcagggcctctcttgtacgagttattccgtccctcttttgatcttacttgccactatttataatcatatagtgagcagttannnnacaaagttgactgtaatcttttttacaacgatcttcccctagaatcatgggatttgattatatatcacgctaagtaaatgcggtttttatttaaatgcaacacagctgtaaatatcccgcttttattgggccaaaatgaatgcgtattaaagatatatggtaagccttatctcattgggatgcctcgctgggaatggagctgagttaacctcgatggcaagctggagcttgtcatatgtcttcccgaggttgatattgcttttactttaattttgacaactacagtttcgggtgtcgagatgatctttctcgtgtgcatgccctcttacagagagatggacgcctcgctatctatcactttgatccacccatctgcttatacttagtttatgtaccgtgaattatacgctaagtatttttattgtcattatatctcctccacgcgacgaggttaatgcctcgtcttgcatacttacagttgcatggtttctcatcgagacacaagtcaacagttagtacatttttatctcgcataagactgttcagtcagccgagttataaacatactctgttaattatgcttttaacgagttattccacgtcaagtgtaattacgatcgcgtgtttgagttcttcatccttccgagctcgacgcgtgtactcttctaatgtgctcgccgaatttcgggtataataattaccccttaaaaagttcttttttaataaaaagagttttttaatgattataaagggtattttcgtcatgatcatcctctttttttgaaaagacacatgtcctctgattttggcagttgtgcggtttcgaggtacatcagcattaaaggaccatcttttccactttggttttgaattatattcgtaggatcaaacatttctctgatctgacgaagccaatatcatgagtataaagtaagggaaaaggaaccacctttgcattatttcctccattttagaaagtttggaacactcttaagcttttttgccaagaatcaccattgagtttgtctgaggacttgcatgccatctctgtccttgacatttttttctacgagtttcctccgacttcatcttctcaaagcgctcctttctacgttcgaagatttgcagacggagtgacaagtcattgccccaagccctaactccagacagtaaaatgctttcttccttcacatgcttgctatattgcgttaaatttctacttagtttgtttgtatcattttcatctcatttgattttggaagtttttagggttaaattgtatttatgtccatactagggctcaagcaatatgtaggttgtttcataatatccaactcatcaccttcgggtttgataaaattctctctagggattgggattgctttttgcctgcagctatgtcccactctggttcaagaatttatcgtccaaaagttttaaattttgagtttcctacagaatcagccatcccgtataaacccaaccattcaaaatccacttccaaactagaattgaacgatgctacgattaaggaacacgtagtgagaacccaccaggaagatattgctagctgctacaggcgtttcttgcaagaaatctctaaaggaaaatgccaattgttgcgagaagcagcctggtcagaacctcatagcgtgtcctctattcttgtggcaaagcctttgtttttacccaacgtcacgattgcttttgaaccaggtgacttggattttgaaataatgcctccnaagccacgtacatcaaagactccctaggacccccagagtcacctttgaagttgagatgatagttacgaaggtgctatctatctcaggctacataggcgatatactaaagacctgtggaattgaacttgggcaatcatgccaagttagatcagcacgagagggtgagttcagttgtttccctcctgcgtgtttttcaagcagtacccgagggacccagtggtgagactagtactagtggctcggctggtatgggcgcctagagccttgagcatattagtgcaagggccatacttcctcttcgagactacttcaaggacttcataaatcacgttggagtttccccattccagatttggctgatgttatcattgagaaagaggatgcagtagtattatcctaatgcgagtgtcactactagtaatgattatgatgatcgatggtgtattgttggtacattcttgactgagagatccatagatttcgatgcaatacaacatatgatgccttctctttggcaaccggggaagggtatgttcattaaagaattggattttaacagacacctattttaattctatcacgaactagatattaaaagtatgatggatcgtagtccttggacttttaataagttcttgctgatatttaaaagattgaaaaggggggaagatcttagacaaataatgctgaatgaagttgatatgtgggtccaactgcaagatctttgatcgggatttaaaacgactacgattgtaaaaaatatagcctattatgttgagaggtttgtcaaattggatgaaaaaaatttatgggattatggcgagattatttacgtgttcgagtaactatcgatgtcacaaagccattaaagaggcgaatgaagctacagaatacgaatgggattgtatttctcaattttttttaagtaagaatatactatacatcatgaaaatctatcatgaatgatatgctgatatattgatgacaatatataaaaatatgtagcattttgtcacgaaattatgcttttacaaataaatatgtccattcattaatccattattttctgtttcaatataatcatataagcataatttctaggtcttactcttattgttctcaatgctaatcaatgtttatatataatgaaagaaaaataataaaataaaataaaaccagaacaggtatttgagaccattgaat

SEQ ID NO: 17585 - DNA, 5300 bp, Cannabis sativa
acagtatttttgaaaagatttccgtgtgatagtatttttgtaaaagttaacctaaattccagtatttttgtaagtttcccaaaatatacattttggctttggtctgttcaaaagcatcaccctaatgtaacatgttgcaaagtataggtggcccaacaagtggtattgtaaataagttgaaaaataccacttttattaataaattgagctaatttacctttaattttatatttaattgaaacatacttctttctatatgtattgtacccaaaatactccgacataagagtctcatggagagtatcttgaagtgacagagacaaaattggtacaatatttttttaaaaaaaaaagtaaaaatgatacactttaaaaaagaaggtaaaaataaaagagtacaatataaaagtagtatagagtgcaatttatatttcatgggataagtggagggtctcctttttctattcattaaccaaaaatacattcatattatatttcattaaaaaatacccacttttgtgaattggttgtccaatataccctcatcctccacttaaatttagcacataatttacgtcaatctaaaaagtataatagaaacattatttataaaagtaaatacatcttaaaaaatataaaaataaaattaaaataaataaaatggatgtaaaatataatttcttcatgtttcattgagtactaactatatcctcattgtcagactatttaaatattttcattgttattttattaaaatctcaccccctatggcgggtccaaacttgtaatcaacctatggatcacacatggctagtattgatataaattatgcaaaattataaataagagttcaacttgtaagttttaaccacacagccatttcatttgacatcataaaacttgatagccatgttagtgaattatatacatcttcatgctagagttgcagagtgttggactttccacctttctactcctctttgtattaaaacccattgattaattcttgtgcccagattcaaaagatatcacaagtcacaataaaaattgagcatatcattcagatagagattttaacagccacgctagaattaatttccattaaaaaaagttaaaagaggaaaccttgaagttgaacaacaccaatgtacatctcaacgaccaaaaactattaaaaccaaaatccccaactcaaattcacaagtgagggaaagaaagaaagaaaaaataagtgtatagacaaagggggaaaaaagaaaaaagaagactaaaaccttaccagaagtatagaaggataaacaagaagattgtgagtgaagtagtaatgttatcactatacatcccaaccatccttcctgccatcaaattcccacttatgtgcagccaaattaccgtacatctctgaaaatttgagcaagcagtcgcttcttttctggtagtgcaccttcgtgtttcggctaattgcagcaccagacaacttggatgtatctatagcccaagctggtttcacgtaatctactgtcctacccgaagttgcatttacatacaagaaattcaatagcacatcttcacagttgaagtatctgtctaccacttctctaccttccctagcttcttcactccagtatctcctaaaagctattttactatcaatgaaagctgcccctgtaaggatcatgttgtaccctttatgagttctcgcataacgttcacccctatatttcaatgggcttccattaacaagtcgagggtagaaccccacgatgcgatctgggtgttgacgccatacattgaatccacgttcgatatcatcgcagctcatcataatgtcatcatcaagctcaagaacagctctggtatttatcagtggatccatcttgaatcgattattcagggagttctctttctcaactctgatcctaacaggtactgttgagtcaaaatcactgactttagggggtactcccttgttccatacaacaacaatctctttgaccgaagagcatctggaatagtgcttcacatacaattttaaattccaaagccgagcttcataggtcattgttaacatagtgaactgtgagtactgacctttccacgggtaagcttcttctgcaccacttcccccatatatatatttaacccctgtgcacatcagtacaattccaactacaaaaattactgccagaactagtcttccagtacatgtattaagttttattctacacctgaggtatgaagctgctctgttcaagcggctgcaaaaccgtctcactttcgaagaaaacaaataagacctttcccaggacaataatgcatcacttctctttcctgaattgtgagtgcaccagtttagaggaatgatacatttcacagctccagtcaacaaacccagcaatgcaatgagtaggagagcaagtgccactgaattacaaccaacaataaaacgccgaactgcatctccagaaggaactcgatccccatccattactgcaatccactttccattacttagcttttgaacatcaagttgatggtatcgagcaccattccaagcattccgacccttgcttgactcagagatgcctaaaggaacttcaacttctttataatcatcttttgtaagaacatccaccctgaagacacgaactcgtcttccatatgtttcaccacagtcttgaccaacacgataaaggtttccatcgtacaaaaacggtctccctccattgcgagccccatagcttgcatcagagttatatataggatttttcctgtgtggtttccaaggaccaagaagtgagctactataccaaatttctaactctccattctttgtggttccgaaaccgctgtgatcagaaccaaagagccaatacatttcatcatgcttgatgataaatgaatcaacaagaggtttcttcaatatgactttttccagtttccattgcagaggaaatttgagtgcacgatacagacgaagttctcctttctcactgctctcaggcaccatataaatctagaagaatgaagaaatatatgaaattattatgggttatgttggaaacaggttttcaaggttcattcaagatcctttttttagattttcatattattatgtgtgtgtgtattttttttattcagtgaatcaaaaggcattcaggcgttaaaagaaattgggtcttacctcgccaagctcttcaaagacatagggatatgaaagatgccattcttcatccaaagctatacccatttgctgccatgttgctcccccatcagtgctttttgcaacgccaatgtccccttgcatagttattgagttcttggtctcaaaaaacagataaaaggtatcatcctggtaaaaaaaaaataccacacattagtatggatgatttcaagttattttccaacacaagaccataaaaggtacttatatagatatagagagatagacagatgaacaaggtttatactattcctatgactataaccctaaataattactaagcttgtcgtccttaataactatgcatcataaattgaatcatgatcaagtggaaagcatttcacataagcatatgataatcaagcattcacatacaataatctagtaaatacatacataagcctctttatcaatctaattcatcaacaatatagtaaacaagtaattatctagactaagcctccataagttgcaatgtcactcccaaaacgatcttgtcaacaagaacaaaaaaaaaggctttctacagattaaaatctagtcataaaacaaaaacatcttacagtttactcaataccaaaaaaaatgtatatccaaatttaaattttcatatcaatttatagatttgttcccgtatcaaatatcttttaaaaatattttgtgcatgagccatatatgatgtgtgggttaaagaccaacaatttgggcattcttaaatgttgaaaatgatcctttatagcatagataattctagctaagaaataaaaaaggaacgtatgacatagcacatcctgattcctaatcactagcaatgaaccagaattcctataatctcagagcactaactacaggcagttcaatggggcatccttgcattatatcatatacaaacttccttaatgccatcttcttcactaattcatcccaaggtaaagtgtaaaactgaaagttccttttccaaaaagacaggattctaggactcaccttggaagaaatacttttatgcatacgcgtaaatacaaaacagatttaaagtattcttgacaattgaatattattatcccaacacttggttatagaaaaactgaaaacaaagctacttgggacagttgcgaaactgtatatttcaggacacagatacttgttattaactcatagcaacgacgtgaaactgtatccttcaagtagcaatcacaaaaaacatcaaagcaaagaagaaatagtttcctatcatgtgcagccacagaaactaaattcttcctcaaatgaaccgatccctgttttttctttctttctttttttcaccccaacacaggtttaacaaacattcacaattctccttccttaacttttatttagtttcaccaatcaattacaaaaagtctccccttgagagtttgaatcaataattcattgaaaaccaacctagattataaaaatattacttctcccaccagtcattgattataacttatttaatcattagtctatcaacaacttggcttgaacagtgacaaatacaaagaaaacaacaacaaaaaccctttttttcacttttcattttggggctcaagaacaaagcaaatgaaatgaagactatttaatcattttaaagaactgttccaacaacccacttcaccaattaacttggaaacaaaataacgatttgaacaaacatttatttatgtatgtacctgaatataaagaaaaggatcagcaacgaaattactaggaaaaccagcatcagaaactgaagcacacgtcacgacagggttggcaaccggccaagcggcactttcatcgttccctacattcatctgtgaataagaaaaagaatccaaaaccccaaacatcaaaatcaaaccaaaaaccacaaattcaaacaaaatccagaaaaccccatatgccaaaatccaaatattcaccttcctttttcttttttaattatgaaagtacccatatggacccaatccaagaaaaaaaaacaaaaaaaacttacagcctcgattggcttgagagaaaagggtgagtcaccgtaaaagacaccaacggaccatgaaccctcattgtcctcctg

SEQ ID NO: 17586 - DNA, 5594 bp, Cannabis sativa
ttttgatttttaattataaaattgaaaagatattttcacttttccacttttaaaaataaaaaactgattaaaaaagtattatcaaacgccacctaaattattattttttatagaagtatatctcttttaaatttgacatttttcttttttgttttcatcacataattacccaaaaatacacatgttacacgagcacaatgcacctaacaaccaagttgttgaaaatcgaaacaaagacaagggccctcagccaagatccaagacccactaccaccaccaccacccttatcaatttattattattattattatatcaacatcattaaaccctataagacacatatataaaatatatattgtattaactcacattcatttctttgctcagttattaactcacattcattattcatttgaaaattaaaggcgaaatttctacgaaaataagtccaaacaaaacttacaaacaataacataacataatatttggtaatttaatttaatttaattaaccaaagcttaattaagcggaggaagctaaaccagagacggcgttacacaagttaaagccgtaccaaacgccgttagggatgaaagtattgtaatagaaggaaacggctttgacgtgataaccgtagagtttgaccgtctctggtttccaaccatcgtaaccactccggtaaaggtagagataacagatctgataagtacaaggccctgatatctcaaatgtatcagttgagcaacgctcgaatgtcttcgatcgtggatcgtctagccgaggagcataaacctttttcaatttcatcgccaaaattaagcaatcaattaatcaatcgcccaatccaattttgtatttcaaattaaaatattttacctggtttccatatgcatcgccgaatgaaaggctgatttcatcgcgagtgtatttcggtgaagaacagctcgttttgattgatactgtgaatgagcaggtcccttgattctacaataaatatgataattttgtttttaattacaaaaaagaaaaaaaaaaaaaaaagaaagtctttgtagctttgagttggggactaactaacctgggtgtgagtattgttgggaatgaaggaagcgagagattgaggttgtggaagaatagaggaggactgagctagtgcgaaggtgaaaacgaaggtcgtatagaccagaaatgtgggtaatgctgatatcgttctccccattttcgctgcagtgcagtgtttttttttttttttttctctaattgaaaaaatagaatgtgcctatgactccatgggttgattttaaaggagataaaaaaaggaggaactttctagtttgtaagggcagattagtctttaactttcactcatttactcattattattttttctttaattttgttacacattatttatttcatattacaaggcaggtgacactatggttatataatcgtttcaattaaaaaaaaaccaaacttgcattttttaccaaaatagattaattaaatgttcaaaccaatctattaagaaagtagtttgtattttgttattgttattttgtttttgtaattattatttttttaattcaaaaatttattgtttccaaatattaatattgcataaaaaataaacatatttgtggtgaaattttttaaatatttataattgttataaccttaataaaaagagtggcggaaaaaataatttatcttactattttgttgccgtcgtatctttttttagccattaaatgtcaactcataaatatgtggcgacatattattagattacgtattacataagctaaagaaatatgttgccacttgtttttgagctgacacttaatgggcttaattgacatttaacagctaaaaaataatacaactataataaaatcgtaaaataacatattttaactgctatttttttattaaggtcgtatgtgtaacagttagaaatattaaaaagatttcgccgcaaatatccttttaaaatataaaattatataaaaaaaatcacacagattagtttagtttaaaatcataaacggtctgaatttaccaaactattttcacataatctatttagtccagattggttaaagttcaaaactagacattacagattggtatgaacagcaagcccaaagtccaaatgtaagtgtgtttaattaggttaataatttttattagtgatggataatatcaatatatcatagctatgtgacaacatcactattcttattgtctttcttatatgagaagaaatcgacttctaaacaaaaaatcttcacaattcaaaaacaagactttaaagacttttactataaatctaaactataatatggtgccatgaatatgacaatctgagtttatgacccaccaagaaaatgacaaaaatacttagtagttaagtaccaaaagaataaactatacaaatattagtattaagaaacccacttggagttggagttggaatacacaaaacaaaacaaaacaaagataaacatatgtataaaaaggaagaggacaaaagcttgaacttgaagatttcataagcaagcaactcaaaagtccaactaacgttggtacttggtagacacatgttttgggccatgactcctagtttagggcctcctctactttccttgtttgcacattaattaatttatagctcactttcccaactggaatagaatcaaagcccttacaacaatatcctcaatctgttcactagtgaacttaaccttatttcgaaaattatttacaatcccttcagaactagcaactttcttcttgtaaataaacttaccacatttttttattcaccaagtctaaactctcatcaccataccaaataatcccaccagtgatttcatcagagggatcgaattggatagtgtgatttgaaattcattaaaaaattttttttaaaaaaaacattttattcagcttcataaacagattactaatttagtatttagacaatccataatatatacacaatattacaatcaccccatatatatataataacaataataatcatgaacaggagtaattaattgctataattatatattaaggagctcctcaatcatttgcaaggctaatttctcctcctcatcaagtcccatattgcatttactcccaccaatattatcatcaacttcttcaggcctactacttggttgaacttcttctactacttgaagttgttccacatcttgataatgatgattttgattcttaggagggactagctgagccatcatgacccagttggactcagacccagactcagacccagacccggcccgtttctgccaaacccctatgtgggaattctcagtgtcaagcctcaagcaagtgagagagggtgagggtgttgccttgccaaacttcttaagcttttcaccaagtattgccgaaaacgacgtcgttgcagctccaccaccaaccagaaatctattaatattattactattagtattatttggtttgattgggaaattagttttggcattacggccactcattaagatagctgcctcatcatatgctctggctgcatcttctgctgtttcaaatgtcccaagccacactcttcttttcctgtatatgtgtacaaaaataatatacatatatattattctcaattaaatagtaccatatatttataatataaatatgattattatgatgaaacaaattagtgaaatgttcagtacagtaatggatgacgaatttcagagacccaagaaccccaatggcgtctcctgacacctctgaatttctttggttgaatcatatgtaaatggttttggtatagacttcactctgctgatcagaagaagtagtcagaaatgtatacttatatatataccaatatatataatgcatttaaatgctacatacaaatatttaacaatattgtgtatgagaaaactttgagacaaatcactatcacctttctatatacttggcttgagtttaacccattttcatgaaatttggtggttccattgaattaaatacgaaataccccacaactagtactctaactcttctttcagtgatcatatttgatttaacaccaatattgagtgaatttagggtaatattgtagtacactaaaaaaagatcgacttagtgcattcttatcagttttggcatttaaaaaaataatcatatcagttgtagataagtttggctctgaatatagacgggttaagtctgtgtctaactttactttattcagcagctaaaaaaaattgtcctattttaaaataatatatatattttaataattttaaaaaatatcatatttttgttttttctaaataagggtttgaaaatgttaattcttctatggcttactaaatctagagaccgccctaattgtagttatttaagactgtaggtaaatttttaaatttttttaaataatttacactgttaaaaaaaaaattaatattttattgcagttgtaattctattttttatatccaccgtaagcaattgtttgaataatatttttgacacaataaattatttaaattttttcaaaaattaataaaaaaattgaaataattaaaatatatataaaaaaaaaaaacaaaactctcctagataaggaatctgataaagagagtgtcgaaagaatcttttgaggttgtactattgatttttcgttgaaattattagtaatgacaagtaattaactactgtacataactagcttatatatcaaataatttatgatacttggtattagaatagaatcttggtataaggatatgatatgatttatatgatgaatatatatttaaaacagttttggtaggaccaaacttcctgtactactcgaatcttttctgatacagagtttgagaattcagttaccaagttattaaatatgtaaattatgtgtggtttatattggatattgttggaatccaaatcaagatttttagctagctatcttattattatatttgaataaaggcgttttgtaccatattttaaagaagcaataattcaatacataagggtcattagctaatttactccattgtatattgattgtgaattttcatatctttaaaaccttacccaaattaaattccccgtacgtgcggctcctccacctactaactatattattcaacttttaactttggttacattttggacacatctgatctgaactcaaagatttctcaacacattactcaaaaagaattctgacaattttgtttatttgtgcagttttgttgattttaaattggggtattataagcatgcatagatcctcaaatttataattatactcttataaatttcattctagctcctcctagagtccatatgtatttcaaacatactactaatatgtcatttttaaagacacagttttattattattattatttgtggtataatttctcaaaataaaaagttctttaaaagttatttctgtaaagttttttgtctcctggaaggagggccggcccaagcattgggcagcttgggccattgcacaaggccccatctttttaaggcccaatttttttttttttttaagaaagag

SEQ ID NO: 17587 - DNA, 3926 bp, Cannabis sativa
cccaaaggggttccaaattgcttcctcgagcagatggtcagtttaaagtgcttgaaaggattaatgaaaatgcctatcatctcaatttacctagtgagtataatgttagtgctacttttaatatttctaatttgaacaattttgatacaggtgaaaattggaggagaaattcttctcgaaaggggggggggcggaatgatgaggacacaaagagtaaagatccaagtcaagttctagttgtacaaagactagggcatgagccaagagattcaaagaggagcttgacaacctagtccatagagttctaaaacaggagttcttagttgctgccatattttgtgttgggtttcaccataatcgatggtgtggtttgtgtcaatcttcttctcccactcaagctatgcttcaggatcactcttcccctgaaaaattggaattttcatcttgatatttcctaaagaattatctaactggttcctagcttctctatccttaccatacctcttaatggtacccgtctacatcctatcaaactcttcatcaaaacctaccccttcaaaatccctttcattctcttcctccttttcgttcccttattcctcctaggcctccgttgtgtgctctcttctaccctatccaatctcgtatgtatttgttgatactcccctctcaataacctcctcatctcccccattaacatttgaatctatagatttgacccgtaggtggtggagtttcattgtttgtattttgtgacatgattgaaaatcttcaaaaataaggttagaacaaatatagaaatgacatcaccacacccctcacatgtttcactcaaagaaaattggtcattcaaatctagtcgtctttccctcaaatttgaaggcttttaaccttaaataagctcatatctctacctttttccaatcatattcttctttaagctcatttaaactaattagaaagtaatatgtaggaaattcaagcaacaaatccaatcaaacaaagtaaataaacatggacaaaaatgatgatttttggaacacttttgtggcattttggcaaacaagcctctagaccatgggaaccaagaataaagcaaaattttttgagagagttttatggactttttttagagaagacaaaccaactaatttgtggcactataacagtcttgaattacacaacaaattaaggaaacaaattaaataagatttatgactatagaattgattttgaaatattgaaacaagatttgtaaaacaaataaggaaaccatagaaacaagatttgtgaaacaaataaggaaactatttaaacaaagaaacaatttgaaacaaagaaatcaacaataccaaattgtggctctataatttaatttttggatttcacacaattaagggaaactattgaaataaggacacaatttgaaacaaagggaattaacaattttaatttgtggctctaatactttcggatttcacaaggaattagagaacatgaatatagaacacaaatttaatagaaaagcacaaaagaaggatacgccaaatcagatgttccaaagctctgataccaaatgatacaaaccaaatcacaaggtggtgaaacctgacaccaaatatggcaaccactaggaactcacaactttgggatgttgaactgtgacccaatgcttagttaagaacaaaccttagtataaggaagacactacaaatggtgatggaattatatttgataagtcagattgaatcccacaagcaatacccttgataagtttgaatagtcttctcaagaactcaagaagaaaacctctcaaattttattcatcaaattctgtctttccaaagcattttgaaggccttatatagccgaaattacagcaatgaaaaagacctttttgtcatcataatgaaaaccctaacactcacaaataaaaagactttccaaataaaaataatggctaataaagaaaaacgtgattaaaaaggaaagattccaaaatccaataaatattatcaaaaatgtgatcgagctcctaaattgagtctactctgattagcagtacaaatctttgttctccttcaatgttgaccacggtcacctcttattactctatggagtaggttgtcaagtttctctttaaatctcttggctcacaccctcatcaccaaactaattggaacttgacttggatctttgtcttggtgccctcatcagctttgactctcccattcttgttcttgctgttatacattgttttcatacatttcattgttgcattaggaggccttgatggcagagagggccactataggcaccctattcacggagcttgagcaagctaatgctaaaaatcaatagttgcatgtcgttaataggggccttttggttgagcttggggaagtcaaatctcagattgctgttgaggtggtcaacactgagatggttgctaaaggtaaaattaggaaggtgttgtttgagaatgatgctcttaagaggggagcttgtggacttgaaaaggaaaagagtttttggaggtgaattattactgataaactattgttttgaaaggtatctgcataatcagtgaccattgcaaggatactatagatatgatccatagggaagcttcccatcaaccatccaacatcacttggacattcaaagcttgagccatcagctgaggcagtgacttctttgaggttgcgatccaaaacttcctagagcttcccaaggtggcctacatgcttctcaataagttctcttctcttttttttgttttaattttggttttacaaaaacaatcttatctgtgccctaattgtggagctgtttgtggtaactttttgagacaattttttattcatgcatgcttactctatatccacgttcactatcttgtttgcttgcgttactttcatggatttcctttaggactttgtgaagtttttttgttccaacagtcaaaaattcatactatttggttcttctaagcttgcatttgttttatcaaacctttcaaattatgcaaaaccacacaatctttaagtgtcaacttttgtcaaggttcttatcgtgacggtttataggtttttgaaaaatgaaccttttgtagagggattgtaaactttgttcctggatcgctaaaggagtcgcgaagcttacctcccatctatgcttaacccaattaattgccttaagcaggatacaatagaaaactcatgttattcgagttagtgagggaaggaagaccaagcatgccacaaagtccttgccaggttctttttaggaagacaaggctcgatttgcactagtgtttagactatcttcccttgatccaaagtgacaaagttgacttagcattcatacttttccccaagtttgtgataagagagctgctggaccgcaaagtgtttctaggcatgcttcttttctctcactccttataggaaacttgtcaatgtggctgataggctaaggcgactgcaatagttctcaaccaatattccctttctaggatcatgttaaagatatactagtagtgccctttgcgagaaccatgttggacgtgtagtagacttcaagcgattttcaggaaggagggttgaagatgtatttgagtccaagcggtgactctgctcccaagactaaaaaggtaaaaactaaactcgtaatgcaatagacttcaagcaatttcccttccaaaaaggtggattgaagacgtatcgaagccgaattgatatttttgaccaatagtttggatattttcaaagtagcttgcaagcgtaaaactagatgaaaaagcacaaaattacatacaaatataaacaagaaaagaatagagtaagtcacttatacatttttaggggcatgtaattaggtgtactaccaccaagtgatttaggaagtttgtgttggaaattatt

SEQ ID NO: 17588 - DNA, 8684 bp, Cannabis sativa
aggcctgtgcctagggcccacctagccgaggggcccaaaaaaaaatcgctttgaaaattataccattttttttttctgattttgaaaaatgctacatttttttctaaataagggcccaaaataaatttttttctatggcccactaaatttcagggtcggccctggtgtaagaccttgttcaagtttggtgattcccctattatacacttgtggtgtagatggtgttgagattgctctcacatctcatatatattatatatgctatttatatattgtgtttcatgtgtagcttattgttttgagttgtaatccctctcttcatctctattttctactttatgtgtatattttatttagtgttataacattatttaatacatattttgtcttttgtttgtcatagagttgtaatcttattgatttgatatatttttattggagcacaacaatttccgattatctcttgtttggatgtaatacttatctattgttttctttttgtcttagtcttttaagtagtttgatttggttgttatggtgcctgttcccggtctgtaaactttgatgcaaatcttcttgcttgatgggctacactttctaaagctttttctttggatgttttaagagtggtggtctccttggtggtcactatagaaattgatctagtgttttatgaagaagttttattcataaaaaaataaaaataaatattaacatgtggatataaatttggcaaactctaattttaataccatccatatgttatgctgtacaacactccaagtttctctcctaggcgtaggtagcgtagctcactatgtttactttgtcattagttcaggtttttcttcctcaacaaaaccaatatatatgatatggacataaataacgcgataatcaattatatatgttatcttttttgtagaacaaattaacatatttgctgtaagttatgatgatctgtgcttcgtattttaatttttatttcttaagtatattaattaggagttgaaaaagtaaaggattcgatgtcctttgaaaaaagaaaagatagaacgatatataaatttttcattcgaacttacagaacacatatcaaatttaagaaaaaggacaatcatgttacacaagtataaaaaagtactgccatggaacaccggaaatattgcatgacagtctttattatttacatcaaaaccacttaattaattaaaatacaatacatagtacatatccaaccattaatcacactagacaattccattatttatagagtgagatgatcatatatcccattatcctaatatcaattaatgtgttggttttttgtgtggctcttgtgctatgattcgcccatcattttagcacttacagcctgagccgcagctgcagttggaaccacagttgcagccatcattttctgctccaaagctcatctcagctccctcaaagctcctacaattaaaaataaataaataaatacatattattaatttttctttattattacttcgaatttatttatcttttagctagctagatatatagaatcccaacaaactgaattgggatatgcacctttagattttttttttattaatgatgtttatcttcatttctttccaatttttgtcacaaataataaaataatataacaagataagggttgtgaagtatatttattatattattttttattattattattatttagagagagagataatgaaaggaaattatatatacttacattttgatgagtggtgcaattccagcgatcacagttacagtggtggggttcgtctctgagattcccaagtcagggaacttctttccacacttgcaatcgctaccacagctacagctactgccacagttgcaagacatttttctatataaaataaaataaaatacttttggcttagatggtgaagagagaagattttaaagagggttattcactttaataagtaattactccttggatgattggtataatgggactgttacccaatgttgctatttataatgcaaatgagggttctgccagtacatatcctccgtacacgtggccttgatgtgtttcggtatttatgtatgtctttgtcataaataaatgttatgttaattaattaattaattaattatacatcgatcttgttttccatacctaggtgatttcattgatcataaataacaattaaaatagtcagcaagacataaataatttgcattgtttttaagtttcttttctttaattccaattatttatttggccccaccaactagaaattttggatcgagacccaaagtcaactgtggtagttgtactagactcttataattaaggaaaaaataatttcaaaggaatgagcttttactggttgagataaatttggtacaagtaatatatgtaatattaatttggttacttaattaaacaagttgatcaaaagaaataaatgatgatggccgatttaggagccataatttttattaaaatataatttttcattatgtagaacaaataatattaaaaattaaaataaacctgagcatgcttcagcccccaaacatattataaagaaaattagactatgtattctttttatattgttttttttttttttgtaaagtcttttacttttatctttttctttttatactttactaattttgctctgccactttaatataatttccatgtgactcccttatatcagggtattttatataaagtacatataaaaagagaagtatggtacaattaaatataaattatagataaatttaattaattgataaataaaagatgtatttttcaatttacctccttagtaggaggaatgttgttacaaggtaccttataatttacattatttgagttgactataaatagttgcatttatttgttttaatattttaagttataatattgaatggtattcgattttaaatttaacaatttatattatgctttttgagtggtgttgaatccatataatgcctttaatgttagtagaataaaaaaaatatctttttataatcattaaaaaaaaacttacaaaataattaacttttataaatatttttagaaatcaattttaaaataaataaccttaaaaaaaaataaattaaagaaaaagaaagaaagatttttaagttgttggagcgttaataagccttaatccacaagtcaatattattgaactaaacaaactttaaagtattcttgcacaagtgttcttgctctagcttaagaaccctaattcttagcctttgatgtaagaaataatttttaaacctttcgcatggagggacaatgttacatttataggatagagttgggtatgggcgaacccaaacacgataaggtttaaaggtgtcaactaagcccattgatagggtaacatacaatatatattgactttgggctaattgggtgagacccaattctcaagataacgatcatccatacaagtggtgattgtttggtgatgacaggtgtcatgtgcaaccatattggtaccgagaatgtcaaggaatatggcgttaaagaaaatgatggtttcctattgatggtgtgcgcgctctcaaggtttgacataaggtataaacctctgacacaacatgactttgtgtctggaggatgccacgtaggatggtatctagaggctgccaaatgtctcttcagttgcccattttgaattaccttaagagggtatctagattcgtcatgatggaccttttagcttcagggcaggataatcattcccgaacgactttcttgcatctataagatggacttatatctggatctagagctgtagctggactccgcttgtgggttgatttgttaacttgattgggcccatgaatgggcctgtcttggctaatattggaccttggaagtacacgtgtcattaatatgaaaacacatatatcatttacccccaagccttttgctaggtctatttttatgcatttttagagtttattttaatatttttatatattttttttatcgctttattgttcatattaatgcttggtatttgtttttgtgtatttttcaagtaaaatattgggagatctccattttttcttattttagtgttcttcaagcctttttatgatataaatggttaatgatgaggaaaaaagaaacttcgggatttgaataatgcttagttgggattttcattgcctaaaaaaggtcaaaattcatattttttgcttcaaaagttgtggtccaaagtcaagagttctcactttccaaaaataaaatgaaaaattgaaaatttagaaaattatctggaatgtcagagctcagaagggaatgtcgcgacattcacttggtcgttggaagaaaaaaagggaaactaagaattatcgaaaaaaggaaaaaaaaaaaaaaaagaatctcgcttggaatgtcgcgacattggagatttttgggaaacagtgttaaatacatatttaaaggggctaaggagctaagttttaagggcattcaaacatggagactaattttgagcatatgaggatcaccaggagcagaagacaccattggaggattccaaacagtgttctttctcatctatctttatcttttatgtttttaattgaatctttgttgttttagaataacttttatgagctgattttcttaaagaattattatgtgaaccacttaaatttattttattgattattattgttattcaatttcattttccttcgttatttaaatttcatgtaatctgatttaattttgtaagtaatgactaatcacctataattgttatgtatgaattcgaatcaaaattctaaaaaagtgagatttgaatatgctttgattgttatggatgcaaattgatttatgacgaaagtatctagattatttgtatgattttatgagtttctttgtttaatactttctttgtgattaaactttaccacaggtttatagggagttttctattatttactttatctaatcgctttatcttcgctcactgtcgttggctaaaagcgaggtcaatacctcaaaagttgataataaaactagaaattttcctgaggaaactctgaagctgtattttctcaaattcagcttcatattgtacttttggattatctagaaggcttcctttaagtcactaatgtgctccctagaagttttagattttacctacatatcgtccacataaactttcatatcttttcccaagacatctttacacattttgttcaccagacgctggtaggtagctttggcattgttaagcccaaatggcattatgaggtaacagtacaaaccttgtcaatttgtaagctagtgtgttcttgatcttccacatgcattttgattatattgtatccaaaatatgcgtctatgaagcttagaagttcatatccagtggtggcgtctatcatctggtctatctataaaagtgagaaaaaatcctttcgaaaagctttgtttaggtctatgaagtcaatacacattctccaagtcccatttggcttagggaccagacccagattggcatgccaaactggatatagagcttccctaaggaactctatagaagtctgcttcttaacttccgcctttacagctttggaacgtacaagatctagcagtctccactttggcctgactggattagcatcctggtatatgtttaaggcatgataaatcacatggggattgattttcatcatatctgcatggttccacgctaggatgtctttgttatgctttattgtggacacaacttgttcctttgttgttggaggcaaggtctaacccacttttattaattgtgtgggatttctctcgctgatgtacacttcctccacatccttcagtggttcaatcattctttctacccctacacatagattcaattcatcttcctctcagaatatcccctgtgctggctggacgggtactttggaatttggctcttccatttcttctcgcaccatgaaaattgatctaactaagatgttgtagcacttccattcactcttttgatcacctcttactgttccaatacttctgttgtcatatggaaacttcatgcacaggtacctgatggaagttaggaaaggtcatcctaaaatggcattgtaggttgttgaatagtccaccataacaagtgtgtaatacttaaaagcataagaagtattgcttctagctaggcccccattcagcgtatgtaggagttgaattttttctataggcagtagagaatctctattgaagccttgaagctagataaggcataaggtttgctttgactgacccaatggcttggaaataagctttaaacatgatgttgagcgaactcccagtatccacaaagattcgggatacttgtttgtgggtgacttgagcctcgatcaccaatgggtcattgtgagggaaacgtacatgtctagcatcttctcttataaaggtaattggcatatttaacatctgtgacatttgtgttggtatctgtaatagagcacacacttcccttcctactcaagctcattaagatacttttttttagcattcttggttctttcggcaatgtttgggcctccaaaaatagttttcacatgactgtccaccagaggtggagtggcacctaggggatatgggttccctggtctgggagcttatgcatttctaggtgcctagatgcttaggaccccctgaggggcttgtattcttggagcttattgggaaaccactccttgagccaaatttatggctccacattgttcaataattgccaactatccttgggctacccattgtcccagatagataatcagaatccttacccactcattgagatgggaattccttatcaaattctctatttcatcctttgaataatcacactcatttattgtatgcacgaaaaccatggtattcacaccttttgtttaggcctcttttgtttctacctcctttgtacattggaggcaggttcctgtaatgaaccatgttgtagttggcccggtagacattctcaatcgtgtaaactagattggtatattcaggatactaggcttcataccctttccttactttttttagagcttcactctgaatttgagttactctgcttctcttactctgggactggcttacgcctgactttgaaattttgtttgttggtttgtttgtgtctacccgagagtgacaatgcttttagcatgtgtcgctctaaaatcagagaaactagtctatagtgatgcataccctcaagcaactggtccataaaaagttggagttgtatattggattttgggaggtatgaaagatggaatcaagagttgcggtgcatatgcaaaaatattgacattaattgaaggtgtcgaagtcacgctaaaggcttgtgtgtaagcatcctccagattcataaaaccttagtcccttaacatgatgtttgacaaagtgttggacctttgtctttgcattttgctaaagaatagggatcctgtagaaatcccacactgtaggtcactaaattcatgtcatcattgacttttgtcttggcgactgcctccatcattcattagatataggtcttgaggctttcccagattgctgcttgatattggtcagtgatctgacatccatatcgaagtcctttacacttacgaattgcttctagaacataaactgtagatccttctagtttcaaatacagatggatggaaaccttttccaccattctttggcaaatttagaaaaagtcaaagagaaacacaaacatttcccatcatcactgacttgcgctacttgcattaatctattgtacttggattggtggtccttggggtccaccctgccctcatatagttctatttacgataatcaaaaattttttggcagttgagcctcaatgatttttttaacacatggttttagatcctcatctttcgagtcgtatatgtttccacactggtttcgggctagacggtccatgagttttgttagagcagctatttgatcctctagtcgtctgtgtgatcatctaggagttcacgtccacaaattctatatttgatgctgttacataaattgcctccgtgaggccttgctttctcacccttagcttattctcgttttacattttgatggtcccttacgttcgctatggacatgttgtatatcggatatagatcctccccatgaatgctatggttaacaaaatcagtggggcagtttttccatcccaaaatgttaggccattttacctgagtacctaacccatcgtttagcacaactgccccgtgaattgattggttggcctagccttggggcttgagcgaccctttctttctacttgggttggcaaggtgctcttatgatgttccatggagcattgtgtgtgggtttttgcggagggtctctaattacactttcctttttcactgggtgaggcaaacgacccagctctaggatggttaaaatttttagcaggaggaatttcttaagggaggttagcttgtggttatagccgtgcaagagcttcttgcatttgaatacgaaacttcctcttaatatgctaaccacttttaggtattcgcaagctcttgctacagtcgtactattttagggtcttactcttagtactcttattcataatccttgttgtggtttttattgt

SEQ ID NO: 17589 - DNA, 5066 bp, Cannabis sativa
taagatagttagggtgttacaaggggtgtcacggattttttccccatgtaaggaggagtttctgcagtgccataatgtatccgagaccacatagccacatagcaaggttctcaccacatcttccttcctgagatttaaacacagattcaacgtccttgtctttacatcctctccctcgatcagctctattctgacaggcaatggggctccgaaccagagagttttagccaaattgcactcaaaaaagacatgaagaggattttctaccttcccatcacaaagcaagcaatccaaatggtccccaattcctaacttatctctggtaggcaaagccccactgcacattctccatagaaacaggctagctctcggatgcatctccttggaccatataaagttccacaagtcatgagtatctccgaacttatactcatttttcaaccagtaagcctcttttacagagaaatttcccttgggggatctcttccaaaccaccctatctttaccaagcccttcaacaatatcgatagcattaacttggttacccaccgttggcccaaaaaggaagttcacatatcccttattccatattccttgaccgctcagaatcagatcagagacatttctcagatttggagctttcatccttacttcctccatagtcaatatgaattcctcatagtccatccacgggatccaaggttgataccatatatcaatgtctctcccattggatataatagtacacgtcccttcatagatagtcttcctggcatctagaacagacttccatatacttggatcacccaccgttttttccactacccagaaagaattccaaaaacaaaatttctccttaaaaatctaaacccatagcttctcatcatttaaacccatttcccaagctagtttagtaactaaggcttgattaatgtcttcaaattttcgaaaacccagacctcctctagcttttggctgacacagggagtcccaacttctggaggctagaaagtgtgtctacgtcaaacccccagtccaccaaaattctctttacaagagcatccatcttcctacaaacattaagagggatagtgaaagttgacatagagtacactggcatagccaaagccactgccttgatcgcggtcattctcccaacatacgataaagtctttagcctccacccttcaggacgggttctcaacctgtccacaaagcacggcgttcttcgactcatcgttactctcgacaaccaaagtcactagaacgatccttagatagaaccatcgggtttcccaaataaaaacctcctgcctccgaacttttcatttgaagaatctcttcaatttccttttttctgccactagaacatcttttcgaaaataagatgcccgacttctgagtgctacaaagctgaccctaccaactctcatagttgtgtaagcaatctttgatacaaatagctgctttcttgtttgccttcatacacaccatagtgttgcggcaaacatgagatgtgaaatcggagtagctcctctggcaatggaaatgcccttaataattctcgccaatttcgctttctgcaacaatctagataggacatcatgatagaacagaaataagaatggggatatcgggtcaccttgccgcagacccctcgagggtctttgcttcttgagaggttttccattgagtaggaccgtataggaggcagtagtaacacaggtcataattcgatcaatagtctcactagagaaactgtgagctcccaggacttttctcaaaaagcaccattcaatccggtcataagctttatgcatatccattttgatagccataagacctccactactcttgttcttcctcactgaattcaccacttcttgacctaacaaagttgcattcgcaatctaacggcccgggataaaggcttcttggaaaggcgaaataactctatccataatcccttttaacctttgagaaaggatccgagaaatgagtttgtaaacaaaattgcaaagactaatcggtctaaacaattccaccctctccgcgtttggaaccttgggaatcaagcagatatagttgaaatttaagtcgtggtccaatgtggccgatcgaaaaaactcttgaacacattctatcaccttagttccaaccgtatcccaacaattctggaagaaaatacctgacatcccatccagcccaggagcttttagcggatgcatttgagatacatgatcaaagatttcttcacttgaagggatgtcgcacatcataatgttttcctccacatagaccgaaggggagatcagatcctcaagatcatcgggaagacacggatttgaaaacttaaaaagattcccaaaaaagtcattaaggatgtcacccttctctctgtccctctctcttctcttatgctcactgtcatgaagcgcccatatatgggttcgtttgcgtcgcaccatggtggaggcatgaaagaatttactattccgatcaccatgcttcagccacagttctctggacctctgtttgcacaccatttcgttccttgtccattctttagaaatcttcttttttatcatctgttcttcttgatagaacttttcaaaatcctcgtgcgattgaatccaggccaatctatcttcgaagatcttcaggttggcttcgttgtccccaaacgacttcttttttcacctctggagggcccctttgacagctttaagctacatcaccaacgaatttctccctctgcccttttcactcagcttccaagtatccatgatcacctccttacatgtactttcacgcaaccatgcctcataaaagcggaaaacccgtgatcctctaccctttttcatttccgtatagagaattagaggcccatggtcagaggccacaataggcagattatgaactccaccattaggacaaattgagagccactcagtgttaacaacggctctatcaatccgttcccgaattaaaccccctttaaatcgcttgttctgccaagtgtacttacaacctttaaaacccaaatccactccccttgtgcaatcgaggaaagactgaaggatctccccatccttctccacaaaccgtctccctccaatcttatcttctctgttcaaactcacatttagatcacccataaccaccaacagatcctcttccttcgaaacatagctggtaaattcttcccagaaccaagccttctcatcgtcgtaaggggggccatacaccgcaaacaaagtccaaaacttttgacattgaggctcccacagacgacattcaaagggagaattgcgtattctcagaactttaatattggcatcagctctccaaaggaaacaaaaaccaccagctatcccttccgacagaataaattccccgtaatcaaaccccaaattctttcgaactaaatccatatgatcccacccaattttagtttccattagaaaaaagcaatcaacatgaaacttacttgtccaagcttctagcgcttgggatgcctcggtccgggccaaacctcggcaattccaggaaaggataatcattgggcatgggggggcttgataagggccgcctcctcgtccatctgaaaatcctgttgaatggaaatgtccacaaaaacttcccccgcctcgcatagttcctccagtcccctgctctcaaccccgacacctttttcatggcttttctgggagcttttacacgtaacactctttcttggtctcgctctcttcttactagatgaagagttgttcaagaatttcccaccgcctaataaagtctctttgtcagttttcccaatcacaaagacgggtgatccttctggtgcaaaaattttgtctgagtccatgtttctcactaaggcatctgggagaggctggcccaatccgtcaatgggcatcacatggactaaggcctttcgtttcttttggcctggcccaggtaaagcttggccttgaattccttcctcattctgactaaagaccattctttcatccgaaggaatgactccacttcctttcacgatttgggccatattttcctcaaggcccaacccaatattccacttaataggaatcggttcaagatgttggtgaggggtccttgacttgcacactttttggtggggatggtcaagcatttgggccaccgaaggcccaacattgggcatcaaagaaaggattacctcctcatcactaggattctttcccaggttagccatagggtggtccccattgtcagtactatgacttgtcatcttcaccacattctcctgagcacctttccccaattcgttaccccctgtaccatcagtacgaattttaatgttattcctcccactcaacgtccttcccttttgtgggcccccgatcatactagccactcttcccaccgtcttggttccgtctcctccgtcctcctgaatcgtgagggattgcaggcctcgagccatcctctcagagcaagagctgtctcttctaggtccgccattgccattcccatgaaaacagcttcaggccactgagttggtttttatccacgtcccggatagaggcacggcatcccctatcggtggatatgcatattccatttgtcttgaacattccttactttcatggaataaataaccacaattaaagcaaaccaaaggaattttacaatatttgaattgaacccattctttccgacctctgttaatgctcaggtggaaccctgccggaattctttgggtaaggtcaatttccaccattaattttaagaagcctcttctagcaatcaccctaggatccgccgtatcgaacttaacaaaggtccctaccttagccccaatgaccggggcattttcaaccgccaagtagggagtcgagaggccatggattcgcacccaaactttcgccattctcatatccacagactgccaataaccatccttgggcatctagccccccataatccagggtcttccatctaagacgttcttcaaatcgtcttctctttcaaaaaatatgccccacagccctgtctccattgtcttcatccaccatttc

SEQ ID NO: 17590 - DNA, 3529 bp, Cannabis sativa
gagagagagagagagagatggggaagactgaatacaagaggttgaaaggaggccagaatctcaggcagcgtcttcttctggcaacggtgtcctccacacccattcttattgaggacattcgaactgacgagacatggcctggtctcctccctcacgaggtctccttcctccgcttgatagagaaactctgcgacgactgccatgttgaaatcaacgagacaggtttctttttctttttgctttccgttttggttgtgggattttatgtgggggttttttctttgtgcccgtatggtgtttgattaaatgtatttgtgaatgtttttctattgtaggtaccaaactgaagtacaaacctggtattgtgatgggtggcaagagcattgtacatgattgtggagttagtcgttccattggttattttatggagcctatacttttgcttggcttgttttcgaaaaagcctcttactattagacttaaaggttactcttttaagctcagttggaatgattttattagtggttttcttgtatagtaattctgtattataaatagttattcttactgcaaattcaaagcccttagctttttttggttttggcttctacctgtttaaaatgtcccgttgctctagtattagaaagtaaaaattgttattttttttttctctctgctttttcatcatactttaacatatgctgcaacaacagcataggtagtcaaataatggtgtagaactctagattttctgtttaattgtgttggcacatgtaaatgtaatatattctgcagtatttttctccaatataaattaattgtgttgcactttttcaggaattacaaatgattcaaaggacccatctgttgatacattccaatctacagccttgcctattttgaaacgctttggagttccttcagaaggtttgaagctaaaaatagagagtcgtggagctcctccacaaggtggtggtgaagttgttttgtcaattccaacagttttgactctaaatgtaagtttcataagtttgttcattatcttgtatgtcttatctacttcatgttatatgcatcttatatgttttgatgtgcaggcagttacatggaccgatgaaggcatggttaaaagaattagggggattactttttcatccagagtgtcttctcaatttgaacattctatgatatattcagctcgtggaatctttaatcgtttgcttccagatgtttatatagctactgatcataaatctggttcacaagctggaaagtaagttttaaggcattacttaccatatccatataatgatataatccttatgtattttgttatggaggtctattttctaaacacacacatatataaatatatatttatgtatataaatttatcctattacctttgttatgtgtttgtgtaaacccacacatgcatggacaacatatttgtccccaaagaagcaataaagatatcgtaaattttaattcaagttcttatttactactttgctgagttttcttctgtggacattgtttatatacattagcaatagttatataaagataaaggtaagtatatctatgttatgtatgcagtcttaggtgtatgagtattgaaaaaagaaatggtgatatatctcatatagaattattgtttaagttggtatccactatttgcactatgttcttatatagacattttatctataacagctcaccaggttatggaatttcactggttgcggaaactacatctggttgctgcatatctgcggatacaactatttcatatggacgggtggacgagacagatgaatttgaagagaagaaagagctgacacccgcagaagatgtaggtgcggagattgcttctgttctgctaggggagattgagcaaggtggagtggtagattcaacacatcaggtctgtcttgtattctacagtgttattattatgctcactgagtgttttagtttttctttgaatagatctgcagcctttgctgtagatggatatgcttggttgtttttgttttcccctacttatttagttcacactttccaaacatttgattgttaacatgtaatcataaaacaagtgcaccagtttatggtgacaagtgtaactgtgattgttattcatgactattgtccttgtggaataagtcaccttatatacaatacaatgcaagaataggttaatactataacatcaattttgagattcactcataattcatctctctctctctcaagagaatgggaagttttgatgtgacacgtggttatgtgtttatgttttctcatattgcaggtggttattgtttcataaaacccctcttggaatattttgggttttgagtttcgattattcttagtgcaagatttagaaagttaaaaacagtgatgagtagggtttctgtattggctgtatgctcgttcaacttgctatgaatctcatagaatgcattgttttttgctgttgttttgtagggtctgttatttctcctttgtgcactatgtccacaagatatttcgaaagttcgggttgggaagctctctccatatgggatggaaacactcagaaatatcagagattttctgggagtcaaatttgtcataaagccagatccttctacagggactgttattctgaagtgtttgggttgcgggttgagaaatctatccagaaaggtctcctaatgagagagtaaatatccagacaacttgatatgctaaattgatgttatagttggattatgtagatgagtttttggcatgttttcttcaatctgtgaagatgtgatgatgcttcaagttttgtggacttaacttttgttccaaacaagttgtttgggatacaattttgtacaatgctaagcaattttgagattgttttttattacccaaatgtatgttagtgtcacgtatagatccaccactaaaaggaaaatttgatatccaatcttaatggcataaccaatcttaatattgtatatgaatatctaaacatttatcgtatagttcataaatgtctaaaactaagtaaagggaaatggtagtatgaacgaccaagcataatacacatgttgaccataaaattgaaattgttgagaacttgtaattagcaacatacatcttgttatctctgtattcctttctgaactatgagaaacatctccatcctctaaatcatcaataactaacttatcagataaattatcagtgtgtaattcatctttcttgtaagaaaataggggtagggattctaggtttgtttgggagctatagtggctctggcaatgttgcaatttcattaacctgaataaaaaataaagggtacaatgagaacataacaggtaaatgtgggtataaatgaaagaataagaaaaagaaggtaaaaattaaaatggctaagctaaagtgggtatactgtagaatataatttcctcattctgttttaaatagggcctcttttaaatatgcaaaagttaggcccagtatgaaaatatatgtcataagtccc

SEQ ID NO: 17591 - DNA, 5331 bp, Cannabis sativa
tgatccctttgattaaagaaacttagtagaattatcccaaagtcttgcctcttcagtccacgtgtctcaatccggttggtccacgtattttggacaaaatcaggggcaacactaacattaacagttttattaaaattattattctaattcacaaaatgtctcatttatagttaacgaaattatgagttaacaataataaattaacatgagatattagcaaatttatataacacaactttataattatataatttttttcttaaaaaaattacataaaatatagatatttttatatttttttattatatttgattattttgctaaacttttaaaaaaattgatatttacttaacttatctatgtgtttggggctattttccaccttagccttgacttaaatatgttgtatatacatatttttaatatagtgtgaaaataaatattttttaatatttttttttttgattaagtagctagattaagcatggaaattcaaatttattttttattgttcgccataggatcaaaatttaatagtttaatatttttaaaattaatatacattgttaaatttatttagtaataatcatgaatgaataatatcaattgaaaagtattctacatagtaagttctataattaattttattaatggacacaataaaatatttataataatactatatattttgtataggattatgtaataaaattttcttgcacatatattgtaatattttaaatttgggcaatattgtaataaaatcctacaatttatttttattttctaaacaataaatttggaaaatttaagtacatataatttgtgcttactagcagatttattagttggtagaagtactaaaactttatatttctggtggtcaaaataccaaaatatgaaaaaatcatatgctcacagatgactattaacaggctaaaagtcaaattcaacgattagtactaaagaaaaagtaacgttttgatgctttggccatataaaaaaaattgtacttatgtgctagtaaaattaaagttttagtaatttagccgcacttttccagaaaaaataataataatgaactcttttcaatataatttatccttcaagggggaaaaactacaaaaatatgactatgctcaaccactaatcctccaaacaaactaaatcgacattataatacaaaacttcacctaagaaagtgaaactatttattgaccaagatggcagcttttcacaaaactcagtttattccaacatgagtaagatgaaatcctatctaagaaccttcagtccagtcaactttttacgcagttcaccagcttcttccgacataccagcagcggctatagctttaatgatagttgtgtagatcgactcgtctgggatgcatcgccttgatatcatcatttccaaaatttgtattgaagtatccaccttgttatctttgcataaacaattaatcactgttctgtaagagatagttctcaccctgtggcctctcttagtcatctccatcagtaccactgcagcttcctcaactagatcagccctgcagaatccgaaaatcaaggattggttggtaatttcatcaggaacaattccattttccatcatttgattatacagtcccatggctttctccatataacccagcatagccaatttatcaatcacaatattgtaagtgataaggtcaggagaacagttggtgccacttagaaaatcaagtagttggagggcctcatccatcattccttctttgcagagagggcctaggagtgtattatatgttataatgtctggagaacaattctgagagaccatttgagcaaaaaagttaatggcacgatccatgatcccgaatttacacaaagcattaatcaagatgttgtaagtaacaactgtagggggatgtgagctctcgttcataatgttcagaatctcatcaacttcatcccagcagcgacggtcacaaagagcatggagaagggtattataagtaatagcagttggctcaattctacgagatagaagattacgcataattgaacttgtttccttaaagtttccccgtttacaagtgaaattgattagtgagttgtagataacaatatccgggtgacaaccctcaactgccatttcttctagtacctccatagctttaacagttcccatgtgcttgcaaactagcttaatgagaactgtgtaggtaactagataaggaggacatccctttctcagttggtccttccaaaatccaatagcctgatcaaagtttccattatcaaacaggaagcgtattattgtattataagtaataacatctggagggcaaccactcaagctcatgtcttccaagagatcaatggcagacttgaacatccttctcttacagagagcactgaccatcatgttgtatgtaatgatatccagaatcctaccggacatgatggtgattttcaggaccttggcagccttgtctactttatcaattttgataagaccccggattaagtttatacaacactgcaagtctggaatttggttaagacgggccataacatcaatcaaccctaacgcttccattacctttccacggctgcaaaaatactgaagattatcattgttggttttctcattgttttgaacaaagcgtccgttcaaattcatcgtggaaggttcaccagtcctctttatattcattttctgttcagatttttgctcaacattcatttcatatgcatcagaggtccattcaagttcatcctgatcaactacatctacactactaaggctaatacttctctgcaaacctacaaaccgtgagaagcaaacctttcttttggacccaaattgtactatccaccctaaacgattacactcactatagcaattcatgtgaacaacggatactttaatactagagctacggccagtggcgcaacagggatcatgtctggaaaatctatgcaaactatgaccagcaatcatagaactctgctgggtcattgtataccccatctctccaccaacctttaagtaaataaacaccaaaaataactacaaaagaactttagagaaaattctaataccagggaaatagcataacctcaagctgaaccattcaataacaattaacttctgctttgtctagctcctgcttaaattaaaagcaacaataatattatcaaaaagtgacaatctttcagagctttaacacaaaagagaagaaaacccacttacaaaaaatcaaaatttgcataaaaagtagaatgactagtatattacacggtaattcaaatatggatcagttcaatgccagaatgaactcctaaaacttggtcatcataagcattcaaacgtaaagtaatatgcgaaaatcattagaatttacaagcatggagtttgtgaaaacaagaaataggagaccagaaaaagaaagaagccaacaacatccatatccaagtaaaaatacgcagctgaaaaaccctagttgaaaggggtcattcgtggttgaatatgacataagagaaagttgagtgtttaccttgaatttgtgtgcgcactgaacttggtagctgcgagagggaataagtcccacagtgaaggagttggcacaagggacgggacgttagtaactaggttatagataatcacaagctgttaacttttatagaggggcaaaaggaaattacaagaaatatgagggtactttagcaaataagaaaatttgatagcatagggagaaaggcccaacaacacagagggcaccttcaactgatgtttcttcacactctttctttctcagtcttgtctatattatataataacccccttctgttatgtaagttgtaaatgatatcattctgtgttcaatccaatctgtaatctctctgtagtgagactaaggtattaaatgaatattactattttgagtctctctctctctctatctccctctttttgggtaatatgaatgttattgtggtggttcagaaactaaagattgaatctttgacttagttttcattgatatccagatagttgaggatgcaagggttttcagagataggtgggtcacaggatttggcccaacttctgtccaccatgcacgctatcgagcttgcttgtacttccattcaggtgttaagtctctcttgctctttttggttgttgaagaaaatttaaaagggttatcgatgataatacaacaaatcaactttcacatttaccgaaacttgttagaaagattgaactttggagcgttgtcgatgttaatcaaaagaaacccactttcttattttcaagccaaaaaaaatttaggactcgaaaatccaagttgttgggaatcggtgaatagaagaacataaaagtattggagtttagtacccataagggaattttctttttcacctggactttgcaactatttggattgagatatgttattgaattttgtttgacaagttatgagcttaaattgctcatgtgatgttcatttgccgagtgagctatttattgtagtcaattttggctatagcttagactctcacttgacattaatccctaatgacattgcagtttttgttcacatgtaaaaactacactaacacacgtttgttatccttaagcagatgcacatgaatccagctgaggctgaggcaactctattgtcgctgtcccagtcccaacagccatatcaagcttgtaaatacatccttggtaagttgatattgcacaaatatttgatgcggtgattaacttcaatattgttcttttgcactcaatgatcgtgtcaccattggcctgtggaacattttttatatggtagtatgcagatatagcttaggcatctgcagaggatttacatctcatataagttattccgtgcaaatatgatgaatactctattcagtattgtaaaacaatttgttttagtttagtgctcagtgcagctcttttgatatgccaatgctgataatgatttcttatcccagagaattctctggtgccaaatgcaagatttcaagctgcagcagcaattcgagatgcagctataagagaatggagtgtgcttacttctgatgacaagagaaacttgattaggtcatatcacagttacatttatttttttgacttatttttgtttttagattaaacatttcagctagttataatatcgtattaaatatatatctgttgtgtaccttggttggttatgccaggatgaaaatgcgtaagtataattttagtatactagtacttgattgacattctcgcgtatggttctattaataaatattgttcttgcagtttttgtttgtgtta

SEQ ID NO: 17592 - DNA, 5393 bp, Cannabis sativa
atgatttagtttaataaagtttatcctttattcaaaaaaaaaaatgatatccaaacactttaaaaagtgatttttattgaaaaaaaattatataataattattcaaactataaaaatattttatgattatcttatacttgtaactataaacaaaacaatctttcaaaaaaaaagaaaaaaaactataaacaaaacaaaagtagaaggttaagctaaaataaattttgtactcttttataatttacaatagatcataattagttcaaaaataaaactcaactactcggttaccatgcaattagcatgttccttaataaaatgaaaccaattaaggatagatggggcaactacatacagataatgatgatgatggtaatggtaatgataagataaaagaccaacaattaattatgagcgtcctaatgctttaacctaaactacaaacagctacctagcttccatggatctagaaatagggttaccagagattctcattggaggggtgctactactaataatttgctttctcggggcggttggccgaccagtcttcggcatgtggccaaaccttcttcgaaacattccccgcctacatgactttgcaactgagtttctaagacaacgcgatctcaccattgagttcaaaggcccctggtttgctaatttagatttcattatcacttgtgatcctcgaaatattcagcatatcctaatcacaaactttgccaattatccaaaggggccacaatttaaggaggcttttgaagctctaggcgatgggattttaaatgtcgattcggatttatggagacttcaaagaaagatgtttcagttgtggagcagacaacataaaaaatttgactcttttgttgcaagaacaattcaacaaaaggttgtaaacgatctgatcccgtttcttgatcaagtctccaacacaagaactcaggttgtcatttatttacataacaattttagttatatacacaacaatgtttagcttgcattacaaatatataaatatatatatatttctctttatttacgatttacttatttatttcaatcaatagattgacttacaagaagcattccaatccatggtcacctttgaaagtgcaatcttgctgattttcggccttgatccggataattattcctttacattctccaaattggaatacagaaaggcaatcaacgacattcaagaggctacacttcgtcgacactttctaccagaagtttggtggaaattggagaggtggcttcaagttgggcatgagagaaagctaacaaaagcaagaagagtcttcgatgaattcatgtatcaatgcatccaaataaaacggaaggagttatatcaaagttgtaaaagccaaaataaagaacaagttgccaactctaatgacttgatgacactttatatggaagaaaaagaaacaccctactccgaccaatttttaaaggatgtggctttgaattttgtagcagcggcaagggataccttaacagcgggtcttagttggtttttctatcttgtagctactcacccaactatagaagccaaaattctagaagaaatgaaggaaaatcttcctaccgttaatgaggataataaccataacaagtatcagttttttgatgcagaggagctaagtaagttggtttatttacaggcagtattgtatgagacactgagactatacccctcggtgcccttgaatcacaaaactgttgctgaaccagacattctacctagtggtcaccgggcagaacgaaagacaagaatttttctgtcgtattatgctatgggaaggatggaaaaaatatggggtccggactgtctagagttcaagcccgagagatggatttcagagcaaggtggatttgtgtatgtaccatctcacaaatacactgtgtttaatgctggacctaggtcatgtttgggtaaagacatggctttgctccaaatgaaagtacttgcaaccaccatccttagcaatttcaggcttcaagtggtggaagggcatcctgtctctccaaatattactgtcactcttaacatgaaacatggtcttaaagtttgggtttcgagaagatgtgcctgaaaattcagttcattattgtaccaaacacaaaattaaggaataggaataataacaaaaaattcccattggtatcgctgaatgctctatctttcctatgttatcataaataacaaaaatgaacaaagtgatataaaaggtcctacaatcatcttcctctccagctaattattatgataaacagatagtttgtcgctaaatattatcagttaggatcatcataaacatgtgacttttcccaatcaatataacatgaagacgtaccatctgatgcaaagtagttttgggaaccttccgacgtaggtccagtttttactgcatttaatgacaaaaacactatctcagggatggaattaaatctaacccaaaataaataaataagaattacacatataaaatgaacaaaataatttacctttaacttagatcaaaatcagtttcatccgcagaagagaggacgaattccgcatacagattttttaatgtgatcatcactgtcatcagtaatggacccataattgctcccttcagttcaattaaagttttattatagatagaagatttcttacaccatataaaatcaccttgatgataagaataacaaaatagtttgaaatgaaagagatattacttccaaaattgatggaaatagtgcaattccaccaagcatgctcagccctgtcaaataggcattctgtcctgggatctcatcctgtatggcgattgttccatattccaaaattagttgatgaactactgtcaaaagaacagcctccacatatcttgcttccatggccaattgcaccgcagccggaattgatgagagaaacgcaggagttatggggaaaacagcactcataagcgccaaaaaggtagacatgtaaaggaaatgaatcttatagaatctgaacagcagatatgtaagacagccttgaaagaaagtgaccttagcagcagccaataagacactactaacagcttggtcaagaacatgggcacaacgagctctagtggacctagaaagtggcagcatttcaagaacatggtccatgacaccaccagactcagtagtaatgagataatagagtagccacaaaaacaccatgaaccctgaaatgaagttcattaatcctgcggctcctgagacaattgacactgccataaagaccaagaaattcacacctccagccaacaccgttgtaccactggcgagtaatcgccttgacttatcaagactctggaggagaagtgatttgattttctccatcaattcctccctactaattaaagataccaaatccctgaacacattgtcaacgtctctataaatcactttccactcactattacgcagctttgatataattttgttcaacttttcagtaagtgacagagcagagacagtactagcacttgatactattggactaggggatggactattcaagtaatgtctaagaccatcaacaatctctgtcacattgtaatgtgctgccaaagaattaatgttctgtgaaacagcttcgtaaaaattcattgtgtaattatcaaccaattcaggaatatgattatcatacacccactgtgtaactccaattctctctgcataattactttctttcaaatgggtgttcacagatatcactgcatcttttccttccatagcaatcttatatgaaaagaaaacaagcccaaacatagaaccaaaaatcatacacatgatcaaaccaatcccaaccatagtctttaacctattgagcatccagcaagtaatgtagccacctaccttactaccgaaagagcttttcttgagaagttttctcccaccccgtcgaaaagacgtgagtgcagaaagcgatgttcttacaccaacattcgttatagttctagaacccataaaatacacaatcaagcaagctatgcagaacactggaaccgaaaccagccctatatactcatacacaattatgaataacgcaaaagagattagccattgaacgagcttaaaaaacccaaccttttctctactccgagtctccgactgacgaagaaatccaaagaacgcagcttgggaattgacgacggagtctgtggcagcgcgtagggcggcgactgggacggcgattagggtctcaaaaagaccgattctgagggaacgagaccagaaagagacgagagccgtacggagctcccgaagaggcatagaacagagaatcgcccattgaattggcctccagtagccttctagaagcttcgtaacgaagtagagtaaagccaaggagagcgccagccctgcatgcgccatggccacgtacattgcgatccgcacgtgcggatcacttcgcatcggcgatctccttctcggaacagaccacgggtgatcactctctccttccgaatgaatttcatgatcagaatgggattggtgttggtggcgaccatggttgagcttccttcgccggattcgaattcgcttcggtctcggattattttcaacggtggttgaggttgaggctgcggagtcatacattttcgaaaatgttccatttcatatgaggtttgatacaagctttttggattggatttcatgtctgaaaaaccagaaaaagggaaagatggatggaggaggacgaaggtccgaacctctctctaatctttgtcgatcattgcctttctactgtgattacgtggattcagatccttcgctttcggttgggcctcattctgttcttatgtgggcctaagccccgatactataactttaaagcccagcccagcccaacccaagcttattttggaattatttaaaaaaatatataaaaacaacaacaaaatttaaaaaatatggctatacggaattttaaatattttaactacttttaaaattttatttacataaaatacgttatttttatgttgtacgcttgatatgttattattaattttttattatttgtatattattttagtgttgttttcctattactttaataaaaaaaaattgtgtttttataaaatgtcgtaaaaatttaaaaaaaaactttaaacataaaattgttaaatttttatcaaaataaccgtgtatataattgtctctatttttattaaatgaaaaataataaattaatacttatttaaaaaaaaaaaaaaagcttcgaaagaaattaaggatcatcaatgaaattcgacaaacagtgccgtaaagaaatggccgccgaaaaacgactaaagtaaaagcagtgattccttaaagaagttaaaatgaaaatcatataattattactttatata

SEQ ID NO: 17593 - DNA, 7570 bp, Cannabis sativa
tgttgaataaaatagattatattgaaatgtagttttatttagggcataaaacccaacaacaacatagtagagagaagttagagtgagaaagtgagagagataactgagagtgagagttggggattgagaaattgtgttgagcaacattatcgattatgttggctcgggttagtgagttactgggtgttgagggattacaccatggatgacttactgtgattatttccttgtagctcctgagattgagatctcgaattctctttattaataaagatttgtagcagtactttcaaactggagtatgaccaagttcacattgaacttaggatcaaaactaatataattctcgcgtgttgtgtttagaaactatctagattcatctacgtttatgtttctagtttaatatgtctttgctaatttttggttcttgatttgtttgtttcgatttaacttttgtttgtttaagtgtgatcttgaagctggaattacagagattaattcgtatgtatcagagctaaagttcttacaaagattattttaaataaatttattaattaaagtatatttaattaatagttgggtgagattttttttttgttaatattgtatttggttaattagcggaaattctctatcatttttttagtagttttaattgactctataattttatacttaggtggtgtttgattgggaggaatgaaaatataagaataggaatgagaatgagaatgagaatgagaataggaatagaatagatagaatagaatacaattaatacaatttaatttaaaatatataaaatatataaaaaattgataaaaaaatcataattttttttttcatcatgcattggaatgatatttcctttcctttcaaaatagaatagtcattccaccaaaaaatggtgaaaaggtcattctattattataataacatttcaatactttaatatgcaaccaaacaaaagaatgaaataaaaataatttccttttcattctactccatttcattacttccaaccaaacaccactttagagtaatttttactaaaaaaaataattttttagtgaaaattaagtgagttaatttatgttattcttgataaaaatttaagttaactttttttattttaaatataaatttttaaaagggagatgtacaccttaagagttttactctcgaatttttaaatctattaaatcgtattcttttaactttttcaaattgttaaaatgtttttttaaattataaaaattattagatttaaagatttttatctgttcaattttactaacagatacccaatatagtgattgtccatatatcaaatcatgtcttttgaattttctttcacgttagacactcgttagtaaaattaaacaaaaatcttcaaatttaacaaactcaattattcagaaagaatttttaacagcttgaaaaatttgaagaaacaattagtacatgacaaatcctaattagtctttattattaaaattgaatttttaaatgtgtactaatcaccatttgtaaatgtggtagaataatatttgaagcaacaaaacaaacgttttcacgagtcacgactacaagtctccattcaatgtatatgtatattttaactacaaaccaatatcaaaaagcgcccgtggcctaatggataaggcgtctgacttctaatcaggcgattgtgggttcgagtcccaccgggcgtgttcttttttcacttttttatttgacgtttaatttttcattaatgtttaaaataaaccaaaacaaaaatatattataacctgtcagacaaccgggtgaccatcccagtaaagccgaagcttaactgagaacgatcctctacagccacgatgaacagaagaacatcaagcccattaaatcacgctctgatcacacggtcatgattcatccaccaggtttggtttcctgtctccttagaactcaaggaaacagaggtacgagcctatagaacagatcctgttcaagtaaggtcgtgatttgtaacgtagatgccagagtataaaaaggttaaagatatttactagaaggtcgatgtgggactcctatccatcctaattacaactcacgtttccaaaagattgtaactcgaacccaaaactaaccagaaagattttaattaaattttatataaaggacatatattacatacaaaaaagagcacccgattacattaaataaaatagaaagccaaacaaaaaaggttgttacattccttaaatctatgattctaaatcagtgatctctctaaaactaaactacctattctgatatataatacaaccatacaagtttattaaattatccagtaattgaagaaggatcaccaccaccaccaccaccacttcttttgtttgaagagtgttgttgttgttgatgctgagaacgatgataaagctcaagcacctcaagctctttctgtcgaatgagtagaaccattctctcattctcaagtcttctcttctcattttcaaacttagctttctccatttccctctccttcttgctactaaacttcacccacttaagcctttgtttctctaactcaaaagcttcgcattggaagttcacttgttgttcctccaactgtatcatcctactcttcaaccactgcttcttttcccaagaactcttcgacccatcttgaatcaccccaagaatctcacagctcagttgttgaatcagctgggaagattctgataagactccctttcttggcctttttcgcagtcttacatggctaacatcatcaatatcttcgtgaccatgcccaattggaccacgagaaccaccttcagcttcatcatcatcttcatcatcatcgtagtcatcagaatcatcatcatcttcatcatcatcctcttcgtcttcaccaccacttcctgaggcttttactacttttgatccatgctcagttcctggcctgctcaaattagaaaccacatgggagttgtctgtcgcatgaaagcaacgttgttgttgttgttgctgctgttggttctgttgattaggctgtacattagatgagggctctgaggtagccagctctgatgaatggttggctccactagctacaccattagtagtagtagcaccagcatggctacaactattgtggtaagcacacatttctctgaaaaacaagtgcttggaattgagcaactttcgaacttcttcttttatctttggtgccaaatccatggtatccaacaagctctgattctccacaaccttgcaagctgtacctttcccaagtatatcgtttaccctcttatatcttttattcaagtcattaaatttgtcttcacattgctgtggagagacatagaaccctttctccatcatagcccgagaaaccgttttccatttccctttcttctgtaataatcctccggtaggctttttcttgtttgcgggatcaattgcttctgaactattttcatcaccaatgtaataaaccgccattataagaagcctaaccatggtatcagtccatttcattctttgccacggtgacatcttcctcttcccatccccactattgtcatcagcaccaaaaccaagatcatcttcatcactaagggttggtggtatttgtttggattttggagcgtaagaaaaaccgtgtttaacagagggttgagcttgagggtggtgatcagagtcatgatggccataagccaccatttgagaatgggacaaaaggtgaggattttgagtatttgaagggttttgctgttgttgttggagaggtatttctagcccaagcatcccagcacccatggtagaaaacaacccacctcctaaaccattagcttccatccaaaaacagaaaaaaaaaaaaagaaaaaagaaaacaattcagcaaccaatttccaccaatccaaaaaaagaaaactttaacaacccagataacccaaaaaaaaacctcaattatgaacaacccgctgtggaaacgctcacattgatctctcaaacatttcaacaaacactttacaaacagtaaaaaagaaacatacccagtacttgaaaacagtggataaggaccaacaactcagttagtcagagtctcagagagattatcaacacagactagttctttctttgtttctttctttcttgtatgaaaaataacaaagagggagagagataaagagtaagcggtggtatttagattggacggcagagagatgagagagaaacccatttaagaaaaatgaatatgaaaattgtatatacaggtagcagagcagctggttttggtttggtgggtttgagttgatgagaaagatctgcataaaactgcccatggttttttcgagtgtttcccaactttgcttagctttgctttgggttcaattaagagaaataattagatccttaattagacccacaggttttcgttaaaactggggagcttcttcttataattctttctactacgaccgctacactacacactcaatttctaataattatataaaatattatttatttttacagattttcttaatataattttttataaaaataacaaataaataaaaaataaataaataacatcaaaataataataaaaaataacatgcaaattccaatttctacatggacaccttcccatgcctaacctaacccaatatattatattatatatcaaattccaatttagtttttaatagtaataccactcttatattaaataaggtaaaacttaactttatatttttctttatttttttttacctaacaaacaatggaaaatttgacgaaaaaatatattgtatttgagtcctaattaggaattaaagtgtcaattcactttccttaccaaaaaaaaggaaaaaagtgtcaattcacttaacattagaattaattaagaattttttaccttttatatataagatgggtcccacataagtggtatattgaaaatgagaggttttgtggaacctggtatttgtgaaataccgggacacttgtaagttttggtagctttctattttattttctctattgtctaattttataatataaaattttagaggattgatgatgtgacttaagattttttcaaagcctttgcctaaacatacatgagagattataccaaaaaataaaataaaatgaaagggcttaaatgaaatgagagattattcttgatcttgacatccaagacataaatgtttcatttctgtatacatttatggtatgtacttaatttaaaactttgtaccctcaaaaaataaataaataacttatttaaaactttgacaccaatataattatcaaaattgacatggtttaaatacccaaaatcaaaatttatattaaaaaaaaaaaaagagaaaacaattttattctcctgtaatttaattaattatcaatttaccacccttccatctctcataaatacttaaaatgaactattttaaaaaagtaatagataaactactttttaattcaaattatttaaaactaaatatgccaaattagtagggagcgaattctcactaaaaacacagccaacattcgaacacgaagaaaatgctaaaatatgcgtgttggaattactgaagtagaatgattagatgctgagctggaaagttagttacattcaattaggattagttttcctttttaactaacttctgttggttgaattagattagtcacgtattctttatactagtcttgtatgtataaattgtttacaacaataaaaaaagattgagctgccatttttattctttccattcagtacatttccatcttcctattctctccttttctgtcaaaaccaattgtttttggttttcttcatggtatcagagcttcaatggccaacaatggcaatcaagatcctttccaaccacaagcaccagctgcaaatctaggacacgaagcaacattaccaaacaacaatctgagactagaccgcacaaattacacactgtggcattctcttgttcttgctgctgcacaagcttatgatttggacaactacattcttggaaacaatccttaacctccaagagttcttgtagataatgtccctaaccctgcatttcacacatgtcttagattcgatcagtttctaatgcactggttaatgaactctatcaccgaggctatacttggacatatcatcaacgctcgcatttcagctgagatctggataatttttgagcaattattttccatgagatcaagggcacgactacttcaagtcagaggcctactccaatcaaccaagaaatgatcatcaacaattgatgagtacatcttgaagatgaagcaatatagtgatactctagctgctgctagacaatctttgactgatgatgatccaatcccatacattcttggaggattgggacttgagtatgaagatgtcatggtgaatcttactttcaaatttgaaactttatccttgcaagaagttcaattcatgcttcacagccaagaattaaagatcaatcaacacaccacaaaatctctcaccaatgtccaagcaaaccttgccaactcctctttcaacaacagtggacgaggttcccagaattatggtgggtgtggatattgaggttcaaatcgtggaggcagagcatccaatttcaattctgttgatcgaggcagaggaggcaacatgccaatttgttaactctgtggaagatgtggccacactgtccttaagtgttttcaaagatttgtcatcaacttcacatgatctccaactgaaagtacagcttctgcatccaccacccttactgagtccccacaagctcacctctcacaaacctcaaacacacaagatctcaccactacctggtacatagacagtggtgccactcatcacatgacaaatagtgctgacaacctcaataactccactgactacaaaggcaaggccaaagtaattgttggtaatggttctaaactccctatactaaatattggatcaaatgtctcacttcaaattctctcactcaccctttaattcgacaagatatattgcatgtcctaagtgtatctaaaaatctataaagtatctctcaattcaccaaacataacaatgtaatttttgaatttgatgatgtttgttgtctcatcaaggataagaacaccaagcaagtacttcttcgggttaatctccatgaagcactgtaccaactacaaatttagaatcactagccccaagattagtctttccagccctcaagttcacttcagaccacaccaatagccctggattttactacttctagcaatcctatgtgtgacaaaaataaaatttctgatgtatggcattgtagactaggacatccttcctttaatgttctaggtaaagttctctttcaagtggctcctcaagccaaatgtagtaaaaactccttctgtgatgcttgtcaaataggcaaacaacatcactttagcttttgaagcacaactaataaaactacaatgccctttgaacttgttttgtttgatgtttggggaccctctttttatactttaatgatggttatgttgggttttatgc

SEQ ID NO: 17594 - DNA, 5419 bp, Cannabis sativa
aattctgcgctgtttttaattagtaatcccagttaggggattagggtttcataatcattttgggtagcgtgcctaattatttagggcgttacatctacactggtaggttcttgattatcatagctccattgagattaacctacatagacattaggcttgaatatccctgccttagctctagtaaccatggggtgagatagagctaaaatgactatttcgcgtgctgaagcatctatggtagcatcagtttgagtacctgattgtctagagttgttatagttgattaaatcattgactggactgtgttgtgaactgacaggtaaactatcaattgagccaggtgaagtagtagagaaatcagtttgtattacctggttttgatcatgagaatccgactgaggtgttgtgtcttctctagggacttgagatgcaaccacttggggcttagatgactaagaattttgtgaggtaggagatttgtgagattgaaataaggctgaccaagaagggacactaacacacactgattgctcatgctgttagttattgagaattttagtcttaaaggggaaattatcctcattaaatatggcatttctggatatataaagtctccctctggaactaagacatttctagcctttgtgagaatcactataccataaatttacacacttaacaaaatgaaattgaaacttgtgtgtctaataaggtcgggtaacaagcaactccaaagaccttaaggaattcaggcttctttccatgaataatttcatagggagattgatttttcaacactggcgtgggtaatctatttattaagtaaaaagtagtttagaaggaatcccaccaaaattttaaaggcatatgtgcttgagcaagtaaggtcaagcccatctcaataatatgcatatgttttctctcaactcgaccattttgagctgaggtgtgaggacatgaatactgaaaatctataccattttgaataacacaatctgcaaggattaaaaatcacctccctaattagttttgagatctttaatctttctcccaaactgattttcaaccaaggttttaaatcgaacaaaggctgaaagagcctcatttttggttttgaggggttagatacaggtataccgagtatagacattaacaaaatgaaaatagaatttttaatttgtatttgatgtaattggtgctggaccccaaaggattctgtatcaattctaacaggtttttagcacgatcacaattagcattaaagggtaaggcatgtaattttccatattgataggcttcacagaatttcacttttccattgataattgactttacattaaatgtactcaacacttaactcaatacatgactggaagggtggccaatctcttgtgccacttgtcctttaggaaaataaactagatacatcaactcgctgatcatttgatttagacactacaccaatgaatgatttaatagacatcaaatttaaaaaaaatgtgagttggtggtgggatttccttgttggccaacaacttgatacaaaccatctctaagagtccctatgagaaggaccttcttggtgtctagatccttcacaaaatattatttgacaaaaaattcaaccaacactttatttttggatgtcaattgagagattcttaaaaaattcttagtaatgtttggcacatgtaacacattttttaaaaataagcatttattatcacgagagatcaagagctagtacaaacatgagaaaatttgaaatgactaccattgcccattataagagtttcctcaccagtgtagtctgttctctgggtcatattgttggtgtccgatgtgatgtgactactggctccaaaaatccacataccaagctccatctccaatcattttaggtgtagcaatgaaaacaaatgctccattgatgtttctattttgagatcctttactgccagaggtagctccagatgcagatgggtatgaactcatgtaagtttcatcataacgattataacaataggtaacaaagtggccatatcgatcacacatctgacaagttggtttggagttgttattcctgccatctcctctacctctaaacctactaggatctctgaatcctctctgatgagttgagttgccacaattttcttgtgccaaattgacctgtattgttgcctctatttctagagaagttgggatatttggttgcagcaacattaatagttggaaaggagagattgagattttcagttgctcctagcagtgttgttaacctatcaagtttgtcattaaagctcaaaagaatatcctatagttctttccagtttgtagacagtttagcttcaacttgaagcataatgggtagatactcaatatcaagcccatagagaatatttgacactagtagttttttcagataggggtcacctgctagggccaaaatatcagcccattgacatttttgttgaagttagtcatccatggacatctactttcatgcgagaatgagccccaaataacgtctccaaagcctgtcgtaagcttgaagatgagttaggatccatcgcttcagtggcgatactttctgttattgatccagagagccatcctagtagcagctggtcattgacgatccagatctgaaactctggatttgctgttgcgccctcttctcttgtcgacagatttgtagggaggaactcgattggtttcacttcggtacctttcaagtatccatccaatcagtgaccacgaataatagttgaaaccattgtcttccacaatgtgtagttattcccgtcaagcttaagtacaaaaggttgattcaatgtagtaacaatttgagatccaacaacacatgttgaagacatacaggattgagctactgcactcgaggtgatcaattcacctgaacgagctggagtttggtctgccatggagctagagcaagagaagcactattggtgcagaaagtggctctgataccaagttttaaacatggtaaacagagaaaaaatgacagaagaatgaaaaactcaactcacttctaatgaggctggcccctttatatttatattcaataaatgagtattatagaatcatttagaaaattgtaccaattatatacacgtttgataagacaaaagaatatgctagcaaaagtataaaaattgttagcctagggatttacacaaaatctgttatgccacctcagcaatagtagtagtgggagaattttatttcttgacaaaataaatcttaaaaaatactccaaaatacaatattacactcaatataatatattatatatataaatatataccaggttaatattacatgtaatgtatgtatacttaattttttattttggttaagtatttttttagctgtataattaattttttttggatgttattcaataaacaaatcattttttattaaaaaaaatttaatttaagtgctatttataaaaataaattataataatattcaaaatttattgttaattataattttagtttaatcaaaatactttttactttttttttttagaaatatcatacaagttttctattattttttttaaaaaataataataagaagatatctttttcgtaaaaaagaagataataaaaaaaaatatttttaagatatctgtaatgaatttaaatttgaattgcaatattaaaaaaatactttatatagactcatttaatataagataaaagataagagaaacatgtgtagttattttaaatttgaatattaatatttttttaataaaaagaacaatacattttgttatatagcctcatttaatagtatagatatatataaataatatgaatagtatgatatttataaatttaacgatctttctgataacatattgttattgttgggtgtgcaactaaagttctacattggctagaaagggaatggtactctctattttttagctcaaaagttaaaatagagatttatttttattgttgctctaatcatgttctctgctatagttaataatatgttataatttatatttttcaaatataaaataatggaaaaataatagtatttttgattaaaatattattaaaaagtttaacaaaaaagtagagagctccttattcattctctattatagagagccatttttgtgaacattatctccagggacagaactactttagctccaaagggggccatgacccctcctaaaattttggacaaaaaaaattataaagcaatttaatgttaaaaattttattttttcaaaaaattatgtattggacccccttaattatctctattggtatgatgtcttttggaaatgtgcacaaaaacaaaactttgagggcttaggtccaaagtggaaatatcatacaaaaaatgcagatggaaggtggagaatgcacggatggaaaattatttgaagagagacaaaatggtcttttgtttgagaggaggattgttactaattcacattgctagaaacgaaataagatcatgatatataaagatgtataatcagaccattttggaaatacatggtgtcttcctaatacatatctttgaccatttgataaatttacagtgaaagaattgttaaatattgatcatttatttttaaataatattttgttgaactccaactaggatattacttgtcaactttaatgaacaaggccaaaatttagcaaacaataccttaaataacacattaaagaaaaagaaagacaactccatagtccttggtataaagttaaggtgtgaactgtcttgaatcataactattaatatgcaagttgtagacttgtagttaattaattgttattagtagcactaatttaattagctatattatatggttggccacctgtatttttagttaaaatttgaattttcaattggatttttagttacttatttaaataaaaatagcttaacaaaccaagcaaatagatgccctcattaaaggacagctgagcttccaaaacctaaatatttgggttttaatttacaacaactattttttgtcggcaccaatattgacattgtttgtttaagtcatagctattatacactttattacattattgttttcttaagaagaaatagtccttcggtaaattattcagaatgattgtgctgcacaaaaattaaaacaattttatttatttatttaaggaaacatgacaaaattctcgcctaaatattgcacttctagttttacatgcatatttttattttcagtaaaaattacattaaatatgaaattttataaaaaaaaattataaaaatatggtatttgtagatttgccattcttttatgatattttttcatatttaaattctttatggtatttgatatgctgtatttttataaatctaatatctaaacccatat

SEQ ID NO: 17595 - DNA, 5021 bp, Cannabis sativa
tcatattcaaattactaataaataaacaaaattaagtaccttattttcccattgccatgacccagcttttcctggtgcagctaatcctatgtaagcaaattttgcactcgtattgttcttgttcaagtatctaaaatcaaacaaagaaaaaattgaaataaaaaatagttatattcacttaatccataaaaaataatattcattgctttatctttgataaataattggtgatataaattaataaataagtacctatcttgaacaaacaactgacccttaacactgcctcgctgattagaaagaggaaagtctttggaatttatgaaattatatggccatttcgaaccttcctcttgtgcctgataaccatttaaatcattagttaatcaaaaacttaggaagaaaattaattattataactacgataatatatgtattgtatgtacgtacttgtgtttttgcattttcccataataccgaatgaggattaggattggttgagactgaattaagaaagatcgaaatggggccaaaaacttttttccatgtctctcctttctcaagttttataattagatcctttccaacatagtgacaactcatgaagacctgcatttcatttgattttttttttgttggggtcatattatttacaaaatttaatgtactaatagtataggcatagctaataatttctatgtctatttaattaattattcttaaagaaaaaaaaaaattaatagttgggtaataaacttactgagagagatgttggaccgacatgggatgtgagctcttgctttgtaggcccagttgtgagaaactcttgactgggtgtgattacccaaaaccctacagatgggtatgaactaatccaaccatgaaccttaatgtctttgtgatcacttgaatattgatatttatcatcaacctaaattccaagattttataaatattaattttttattcataaaatagacataattggtaccactatcttagtaattattttcaataactatttacacatatttttgaaatttttgggacataaataagctagctgtaatgtaactttattttatttaatatcacgatttagaataaagttacaaaagatatctctcacaaatttttaaattatttaagatgtcggaagcaagactcaaacagcttatatatataatacaccatcatcaagtaatatatagataaatatatagagtcagaatttgtcaatattctaaaaatacctaaaaacaaaagattaaaacaatccttatatgctacctaacaatttgttatatgcatgtgacatattaattattatatttgtaaagtatttgtcgcagtaacccaaaactttatctagtggtaagttttatcacctattttttttggtgaaaccatccaaaacttgatcgcctttttgtaataaatagtttacacttgaaattaatatacatatatatatatatatatataagaataaactaataataaaatactcatcgaaacttaaaacacaatatatacataaatgaaagaaaggaacaaaaaattggttaatacctctcctttaaggttagggttggaaggattagtcaatagtacagcttcagggtaagcaagttcctgaccatttctacggtctaaggctgatggcataattctttgtctatcgtctgagactgccatgtaattgaatctgatgaaccaaaatttatatttatatttattgattgatttggacattaattttgagattgattaactgaaagtcattttttaaacttgtaaattccatttaaaatagattaatttgttgaagacaataattaaataactaaatgtgttaccgtacttgttttgtttaagcttgaaagcagccctaataacactaatttgtacagctggtgcatctctaggatgctcaagtattccataagtatagaaacctgaataattacgtaacataatatacctgcaattattgtataaaagattttgttttaattaattgagaatttattattataaataatactattaatttacaaagttctagcgattgaaaagttatttatatatattaccgtttgtccatatttacaggaaacacctttgatgaatcgttccatttcttagtgaaagaaatttctatctgatcattatttgctgttataatctcaaattttgttcctactaatctgcaatgaaataatttatgaattagaaaaattattattaggatatatatttacgttttagaagtaattaaatattataagaatttattacctatcataattactagctgagcttccggcaatgtcttcaccccactcaatatcccaatacctatatatagaacgacatgtttgatacactcttataatttattatatgtatattacaaatacaatataactaaatttgaaaagaggaattacaaatatgatataataaattagattaaagaatatatgacaatcatttaccctctgttaccatatttattactattttcaagcaaattagtaatattgttgtatcttattccaattaaatcaccacctggatttgaaaaggtgagttgcacaataccattgtctaggattatcacctgaatcatgaatatatacaaattataattaaaacataaataaaagaacactgaacttagttaggatatatataagaacaaattatatatataaaattattaaaaaaaaaacgaagtaactaataaaatatgatcaccacatattcataaccaaaaatatttacctttcgatttctcttaagtgtttgactgatcctaagtgtagatgaggtacttattagttccgaacccctaaatgtttaattgaagaattatatatcaatttcagtaacaattatataaattaaataaaaatgaaaagttaataaccttattgggttgatggtcttggttcgtattattgaacttgatgcagagatgaaacacaaatgtaaaatcacgtaaagtgataaacctagaatcagatttagtcgttttctccaatttccgttcttcataactatatgtgaatataaatacaagaggaataaataagagatgagaaaattaaataataaatcaaacttattgtgtatgtaataagtgaaatattatattataccaagttcaaagtggagattaaaatggtttactgtttttagtaatagaaaaataaaatatctggtgtgaatttggagaaacatcattaatacatgtgtgatgagagagttaatattctctctttgtatattttttattccgttacaattttatattttcctacgaaatttcattaactacgaaaatatttagtttttacataaaaattgtgtagatgtgaaaagtgttagattttcttcaaacatgtgtactaatataatctaattacattatacatttaaatatttttttaaagagagattatatatattttgattataataaatagcgtgtaatgcatgcaacgatctaaaaaaaaacataaaacgaaaaaaactaattaatttggtctattttgacaccaaattaagtcaaacatgtataatcctaattgttgagcatataaataatgttacctcaaatatgaattgtgaaaaaaacagctacaagatgagagaaaggctaaaagaacctgggtagaacaacttctgagaaagggtgtatttataagtttttgtatttattttgggtattttttataggatcaataagaaaatcccacatacattatctcaagatctcatttataaattaattttcaaaaaaacttctataattgatagatttcaggaacagtgaaataaaaaattaatttagtcaagctggattatttacctttattatgattctttttctccttattaacaacaagtatcagtatgaaaaataacaaaataaaatccatgagatatattgctcttttataaatatatatatatatatgtatagatatatatttcaagtaatctgaaacaaaaaactcaacacctaatctttaataaacagaaattaataagatatatataggggttcaaaataattaatacaatgttttacagtgcaagtgtagtatttttttttttttgaataagtggaataattttattcaaaaaaaaaaaaagtgtagtactcagtggcagattcaacatttaagttgacactttttattgtaaatgagagagggtgtttttttttttttttttatagattgtataacatattaaaaattgatgtaaatttgtattttagtattaaatataatataaaataaaaaaaataacaataaaaatattaggttcaataattaagacactaaataaaatttatttattgatagaagttcaaaaagtaaaattcaaatataagaaaatgggacatcacatacacaatttagaatgataaagattaaaatttaagtaaatataatttttaccatccaactatgatccttataattgacttttacctctaatttttttgtgtgagaaaaatcttcttgagctatagaactaattacaaatgagtatattcaattacatttcattcattttttttatataattttctaatatagcactaatttggaaatatggtattgttaagaacagacaaaagaaactatgcataatgaatgctgtaatgccaaattatatgataatgtatttataattttagagctaatatttttatgtttaatactatatattgtacttagtttcagctagcttacattagtcaattgtaactatacatgtggctcgtggccaaaatagaaaatagtttcaaaagataaacaggatgcaatcgaatggtcatatttacaatgattattatagtttggggagattgtattttatttttcaaaaaaaaaaaaagagaaataaaagttagaattctaaaatgtcatagttagggtagaaatgttatttattcctagtatttagataaaactatttcagtagatcgaataaaaaaa

SEQ ID NO: 17596 - DNA, 5147 bp, Cannabis sativa
caatacctatctgtactgtacatactatgaattaattacgttagaaaggcctatatacattcaacaatcagggagttgaggaatatgctaatataataggttaacacaaaaattaatacaaaattcacaaaagaaacctgaacgacatttctgtgtttggttttggtgatttcccttggctcatgaccattcaaactttgtaaacttctgtttgttatttctgttgatattctccagataccgcttcacagatttgtgattcatctcaaacacaaacgacatttctctaatctgtaattcatggtttaacatgacaatttgtatcactaggtttagtattataattttgattgacagtacatagaaaatgatcaaaaaatattaccagatgaagaaaggcagattatcaaacatgatgcaaaagaaatttctcaacatattgtttatacagaagatgggaaaccatttacctcgatcaaactacttgagctaagacacatgcgatgtctggttggtatttcttttccgtttacgaagattgaactctttgcgatattggtcaaatagaaagaaccatctccttccatctttataagagcctagtatagtaaagaaaagtcggagatatgagttaaagagtccaaatttatggaaatgcagagttcatcagaactaagaaacagttataagatccgttatattttatgcaatacaacttcatcaaaagttatagacgatagaccaagttatcatacttttcaatttggagatattaaagttgaaatcaaataagaaaacatttcctgggcatgtacaaatataaaagagctaatgggagaaaagcccctttggtcctctaccagtagtcacttaccctcaaatcattttgcttttctctcattctataacgcataaattttaaaagtggagttgcaaacatattatgctcatatttgtttgagttaggaaaatgtggtggttccatacaatttagaaacataaatgcaagttatacaactaggccaagacgatcagaatattaagatgaaatctacctgccgcctagatattttgtttgcaggcccttctcttcccaagtcaatgtcaacttcattatcttcggttgctcttccaagtatgacctgtgaagtagaaacaggttgcactcagaatgggaggagaatccatcatgtagtcatagaaatgtatgaataacacaattttatatggttctagcccaactatacaaagagaatggcattcagattattgaatcaatggaatgagtatatcagacaaccttgcaagtgtggtacgggttttgcatattgatatgattaagcataaattagaaaaggatcgatataaaatgtcaggtattctccacttaccaagaaattggatcttagaagtaaacaagaagctatcagcactagacgctttgtgttacatccctcttattcataacaatatgaaagaaaatccgaatttatacaaaagtgtaaaaatattacctcaggttttttaatatattgctttgaatggcggccatagaatatagccaatgcacctttagatgctatggctctttgcatggaagctcgagcacactgttccaacctcatgattttccttttagcatcttcatgctgataccttaagactgtaaaaccagggaaatcataagagagtactgttgaacataaatctcactcattcaataaataaaataaagagctttttgctaaagatgattggtaattggttttcttgacaaagggtcatgtgtttttgtgtttgtgtgtttactgatacttgaaccataatagttgccaaataacataatataatgctaagagaagagatttgtaacatataaagagactttgaacctccataaatgatatggaaccagaagaaaataattcatcacttaattgcataatttaagataccttctttactgatatatggatcctcatcatctggacataaatccatctctagtatctggaagagcaaagacatcaatgagtagttcaagtagacagtgaaagaaaacaaaaaacccttaaattagagaatcatgataaaatattaaaaacttatgtttaccatgttttcaatatcagaaaaagaaggaatatcatcatcgccatcatcaggttcttcctcagattcatcatgatctagtgcagaagagattgcttctggtttcaacgaaactggacctagctctgtagatacgagtgcttgtttccccttaattgtaactggagcaggtaatgcctgtttacaggaagcagtttaagcaattacaagagcacatcaccaactggacataataaatgaatacgccacttatatgaagtaactccaatctaatattgacaacctcttgttttagcacttggtttgctgaatacttaggagttggatgtacagatctgtgttgacttggatccacatggatttcttttgtttttttggagactgaagctagatggttcccatcaaaagattcttccttaacatcacagctgacaactgagaagctagggctggatttctgaactattctctgtcctgtcaatttggaagcaataaatggatctgcaaccttttcttctttcttcaagattatattttcttgcctgccattctttttattcaaacaggaagtaggaggattacgatattctgtaaatctggatagtatcacatcgtcattatccgggacctcagggtcctcggtgtttaatgtacactccatttcacggaaaatttcaggagaacaagggtttggcactgatggaatgttgatttcagaatgagaaacattatgctgattaccaccaccaaattgactcacactagcattatcgttcttccctgcaccagacacatcatacaatgtttttccatccaaggtctctgattgacatacacttgaaccattatttccatttacatctttgggaaaattcatgttctccccatctacaactacaataacaggctcattttcattagttaagttcaacagtgaatccgataaatcagcaaaatcatctccggagataggaatcgacctattcatctcagtatccggtaatgactcccccaatgtcataggtgagggcgcaacatcatatccaggcgaacttattttaacgccatcctcttcaacatccatgggcatttcgggtgctgagacatcttcaattgtcttccaaagaggcatatccggcattgtatgagatgtcccaacctctccatgaacattagagcaattaccaaaatcaaccaatccatctcctgatctaagcaactggtgatcaccattctgctccttaccatgttcaaccaatcctcgaccaggatgaatatctaacagagaatcaacatcaccaactgaaacatgaccccccacaagattaagacccttatcctcaaatccaaaataattctcaacatgatctccaacaccataattcccatccaaaagctcattattagctattggttcatcaatataagacaaattataactattaaacgaacacaatctcttacgcctctcgtaatacttcctacgaatactttcagattttcgtttcgcaggagaacttcctagtcctacactcgctcctcctttagaaaccccaaacctactactactactactagtactactaggcttagaagacaagctattatgattattagaaagctcaaattccaccatacgagcagaagcttcagctgaaacatcagcatcataaagcagagactgccaccggtctctcaattcaccaacagtgaatttgcgagagaatcgaaccgcacctttagcaagtgcttccaaagaagcacctgcctgcgaaaatttgcacaaaaattaaaaaaaaaaaaaaaaaaaagcatgcaaaaaggaaatcgccatggaaacaattgaagaattgcagagaaaaatacctcgacagcgttcttgagaagaagatcgtcttcggcgatccatggaagcttgggagcgaatgccgccattaattagtctcgaaattcttcagaaaatttataatttttttttaaaaaaaattattttaaaattgaaaatttaaatcagagatgagagactccatgagtgagtgagtgagatttagagtgagaaaatagagaagaaaaaaaagacttaattaagaaactgaactgggctcgctggtaagacttttgttccaggccatccactctacccagattcttattcttttgggcgtttcggaacgtttttttagctgttgttattcggttatatggagagaaagaaacgtttctttctcttttccttataaaaatgtcatcagtttagtatgactaattagttattagttattagcgtgtgtggtgattggtgattagccacatttgtaatattaatttattgaacaaatacactttttttttttaaacaaaacacatttgattcagcatattccttttatcctattctctctgttttttttcttttttttaatggttacctgatttcttcttttcttagatatttgttgggcctgagcccacgaagaaagcctattgtaagcatgtgtattattcaaagtaagaatattttattggtacttttagttttaatttctttgtaatggtaaaaatacttagcaaatctaatcatattaacaggtggctcattttaattcgcctaaaatataaaatataaattatttataaaatactttaagcattttttttttatgactatattattatttagatataaactatggggctcaaatatcttgttcaattgatttggatgctaaaaatagatacatttaatttaggaaagtataaattgtaagacatccttagaaaaagaaaagaggctattctattctttttttcatcactaagtatgtacacaaatattaattacaaatttcaacttaaatatttgatccttacttagaaaaaaaaaaagcctgaaagtatttgataaacaacatggttactatctatgttgttttatttatttatataataagcatttttatatatacattgaggccgaattacacaaattttggatttgatatcacactataataattttaattttggaataatta

SEQ ID NO: 17597 - DNA, 2878 bp, Cannabis sativa
caatctagtgccgtttggttggaagtaatgaaatgacatgaaatggaaaagaattaatttttattccattcttttgtttggttgcattttggtattgaaatgtctttttaactattttgatggaatgactactccattttgaatcgaaaggaaagatattccaatgcaaattgagataaaatttaattattttttaacaattgcttttatgcctttcaataaatttgattgtattcctattcctagttctacttttatgttttcattctttgcaaccattatttgagtttgtttggttgaaggtgacagaatgaaaagaaaaatcaatccaatgcaagataaaaataataataactttttatcaattttttttttcatctatattctattctcattctaattcttttgtttttattccttttaaccaaacttacccatagtgtttacaaaagctaccaatcaataacattatataagatcaaaataaccctccccaaatcaattataattaagcatattcaattgtatacggattcgtttggtatcccggattgagtctgtatatgtattgtattgattgcctaaaacaaatttatatagttctctctatcttctttatttactattaattatcttataattgagacacaagatcagtttattttaaattgcttgaattattgtgtattgacatgtgataattaatcaaaaaaatagtcataaaatctttaacactttaataaattaaattcaatacctcacctgaccgaagtatatatatgtggcctgtaaacaatataatatatatatacacacactgatgaagtgattatcacctacaaattcaattatttggatgacaagttctacaaataaaaacacgctacacaattgttagcaacaattttatcatcatatgatataatcatatagtatccttaaaattgtaaacatctgcattctgcatcatacatatttcagaaataatgttcaagattataatacagccaaaatttagaaaaacatctcaaaatatataataagttgccacaaaaacaagtacgctttataagtaatcaaaatattaagcactctcatggttaacaatcaaaacttttgtaaacataattggcttaagtaaaaaaaaaaaaaaaacttaacacttattttctaaacaaatgacatcatgttatttgatattgttcacatatcataagtagtaattaagatgtaaacaccaaattccattaattaatccactcttcctttttttcctttttcatattcttttgcctattaattcatgttataagtaattttttccttttatcttatgaacatggtcatatatatatattatttgggagtgaatcacgaaatggtaatcacaccatggtgtataactattgaatcaagattgagttgatatatcgattgaaagccaaagtatatactagctagacattcctaattttttccattacttctatagatggacaacttataaaactcatatgtaacccatgtaaaaatcttatgttttgttagtagtgtcatcgaaatatcatctatacatgaacacatataaatatatatatatacatatatagtgttacctgggtagcagtgattaatacatatatatatatgtatgtattgtatgacaacgggagagagcacgcatgtgcacagtcacgcacgtttcgtttttcatgaatattaacacaagcgtgctctctctcgttgtcatcccaacccaaaccaaccaccactgatcctctctccctatcaaaataaatataattaaattaattacttcattattattacttattaattcattaattaattaattatatttttgtacttaccgacgaatttaattaattaataatgattagacagctgacccaattgagaagaagtactccaccttaaatctgatattgagaaccaacgaacactctaaaaccaaacaagaaaaaaaatatatattatttattctgatttaaaataacaactattttatcattttccacacgcattataaattgtcgaagaagaagatcagccaaattaattaacataatgaccaaaatctattttttccaaaaaaaaaattaaataaataaaataattaacacttacgaataatatatattagatcaaaagaaataatatcgcatgcgattatgatattattgtgtgtaaaatataaataaaccgtatatatatttttctaaaaaaaagaaagagagtagaaaactggaaatattcccaataaaaggtaaaatgaaatgcatgcagccctaattgtggtgatgatgagttaaatcttcataatatatacagttttattagagacaaaatatgataagaatccgtatatatatatatatatgacggtatgagaaagaaaaaagaagtgaaaaacagaaatattttctgacagatttctgatgaggaaaattacaatagtaaagttttgttgaacaaaccacaaaaggaaataaataaaaaaataagccgtacacatagaaatagaaatagaaaaagaaaaagaaaagaatagtgtgatgagttttgtgtaatagtgacaaacttaaataatcaaaacatatatattttagatctttgagagcctcactacttaccagattcaaacctttaaattaatgggtttttgaaattagttgaaaaaactaattaatctgaacaaaatataataaatagagagaataataaagatccaaacagtataaataataacctaaaagagatggagaaataagtagttgtgtaagtaaggattgggagaagagaattgggaccttaaaaatggcgaataagccctttggagaagaagagaaagagtttt

SEQ ID NO: 17598 - DNA, 4481 bp, Cannabis sativa
gaaattcaccctctgtttctccttccttctctgcagttcttctaaaacctcgattaaacacgctgctgcgtctactgttacagctatttcatatctcgaaaggcgaattctttcgcaaattctaacagagcacccgtcattcgttaaggtgagcatgaacaccttatgaatggttcaaaaactccagtatctttggttccgctggtcacaaaaggatctaagttggtttttgcaaaggccaaaaccagtgggataatgaccctttttcttcccaaaaccagtagggttttggtgcctactacggccagaagggccatggccgctcctaacatgcatggatacatctctcagaaagaggagagagaagagagcacaaatagtctctaattttcaaaaataagatgtcaagttcctaataagtcattttgttttcttttatgtattcgttaaatgaaaaccctgacaacaaaaccctcctttcatataaggggctttatttcttggtaagtgtataaagctcaaaaaagggactcccaatatcaatcaaggcatggaaataggttgatattattgactattaaccttatatggtatatgctataaggttttttttttgtctttctatatgtttattcttttttaaattatctgtatagacaaggctacacgcaaggcactcgatgagctttcagatctcactagctacttgagattgtggaggatagactcccatgtttatatagatccgctaatgtcgccaactgaaatttaccacagggatttgttctttcaggtatttagatttgttttcattcaataaaccttttctcttttccaattgtctaatagatattttgagatgcaagaatgggtcaggtctgtgatcctgcccatctttttacaaatatatattatatatatttttgcaaaagaaaaagctgtagctattttctaaatcctgtgctgatgcaagggctagtgacgttaggtatatggtcctctttattagtactctatttatttgtaagggaatgcagtttgctgtttttttacgaacaaaataaagagagaaataaaacttgctataagaacattaagttcagagtttaagtttgtgtggatgagtggtatcagaattaagttgcatgacaagtcttgaattttaatcataaggtcatttattgattggtgtcctgcagagagtattttttcatgttttcaccacattatgtggagaatcgttgtatgacatagaactaagtggcatcactagtccgcttttaatgcttgaggtcatattaattgatttccggtggaaagtatctttcatgtgactttacagatagcattttcactatgttgttggcatacatgatgggattagcattgcagtaatgcacaaaaggaaatgaataatatccagtataatgagagacctgcctgaaacttttctgaaagttgcaaaaacggcttgtcttcatggttaaaggaaggcaatgtatgagttgccaataaaccatttcttaccatgaattgttaaaataaaaaattcatttaatgataagtgtgagaataaaaattcatttggtgattcagtttaaggtcgattttgaactgtttgcacaggtatacctgatgaaggaaaacaattctgggtcacttattgatggtgtattgcttgctattgggggtcgttatgactatttgatgcatcagatgtggaatcaagaatatgtaagttctggtttccaaattcattggcatatttttttaatattctgaaatggcaagaaaaaaaatctctcgtctccaaaatctgaatgagatataatgtggtgttttgtttccatcttgatatatgctgtgtagaaggacgacgaatctgttggtaatttgtttttgcattttgtaactgctttaaatatgtaaatgattatgtttaaagtaattggatacatgtaaagattgtttttcttcaagagtggcttaaatttggattcatgaacagtttcatcttctaagaattttaagagatcacctttttattttctttgactacatgtaaagagggagctttattgcattaagctggattttgttttggaaattttttcctgtgtattttcttatctaaacatgtcactgtcataattccatttgctgtcatgcagcttaattgttcctttgttatcagcaattaaagtgctttgaaaaattgagcgtcatcattattgtatatcaattatatcatgaagttgtttctagttcctgtttttctcataattcatttttaaaattttgtttttttatttatttaaaaagcattgtagctgtccttttctcaaagtaatatttctgtaactcctttctttcttgacagcagaaatcaaatgctcctggagctgtaggcaccagccttgccttggagactataattcaacattctcctgtagatctgaaacctatcaggtatatgcattaacttatccttatcacttcattcctcaagttgccactgaatccttgaggctttattgtccttttaccattgtttcatattctgtctgttgcagaaatgaagatagcattgatattcttgtttgctcaagaggaggtggaggtcttttggaagaacgcatgcaattagttgctgagctttgggaggagaattttaaggtttgaaatggaatatacctttggacatagttacaataagttcttgcatgctaactggtgatcattgttttgtaggctgagtttgttccaaaaccagatccaagccttacagaacaatatgaatatgcaagtgagcatgatataaaatgtcttgttatcataagagacactggtgggtctcataaaggttctgttaaggtaattgctgtctcaatttagttaatttttgtttagttcaataacgggttggttgaacttgtaaatttatttgtgctagttaatgggttggttgaaattgttgtaagttcattagtgtatgtatgttccctggaagacatgttcactcagtggtatttcttgtttgacctgaataaataggattatggaatatgtgtgggctattgggatagaaaggagatgtaacttttgaaaatattgtagaaactatcaaattatgggttgcattggctaaaagatgtttcaaaattcttttgttttgatgatttcttaagagattggtaggctgcttgcggtttccatatagtttttggactgcttgtcttcacttgcatgatttgtatttgttagttttggaagaataatacagttcttgtattttagtgaaaagtaactgcaaatagttcaatggtattagatctatttcttgttgattgcaaaatagtttctttaatatatattttttgttatgctttattatcaggtttttctttttcattgttactatttattgttttggatggtccgataccataaatagtaacactatgaagcttcttatgattgaaaatttgatcaattaatttgagaaaatgctaattatgtaatgtaaattgaatggttttatttcataatttggaaagaaaaaaaaaagacacaagcattaaattcatctcacccaatacaatattgtgttaagaaaccatcacactgttgaattccagttctgtttgttgttgactctccaagtgttgtattttttgaggactatttgtttatcaaattcatgaacagctcatgcacaacattgaaaaacaaactgatggaatttctcccctaggtacgccatttggagatcaaaagggagaaggaagtagaaagagaagaccttgtgaagtttttaagcgacgcaatggctgtacagttccgggttccttcaatatggagttagaattgtctatttcatggcaacacgttttgttggttgatcattgatgtatcaagatgtttggagacttcatttcatatttactcaggtaaaggaggagggttttgctaattgttagtgatagcattctttcacttttttattgcacgaacgccttgttgtttgtcgctgcaatgtaaacaggagggagaagtagtagttgttaatgtctgtttcctgattgaggagtcagtacattgcttcaagtttttcaaaattgcacttgcatgctggctacactgttatggggaaagtaaacttttgaatagggagaaagatgggaaaattccatttcccctttttcctgtcaattctagtgtgtatagttgtaaatataaaattttgtgagctgtccaatagtctcattattacaatatatgtatagttttaattcatctctgttattctgtgctatgtcgtgttggatttacatattatttccttatttcaaatatctgttgcaaagttccaactaacttaatcagtttcaaaatattaagaataataaacatacatggttttaaatctgactgatgtaaatgtagggaaaattcagagtagtaaagtttttttttttttt

SEQ ID NO: 17599 - DNA, 6307 bp, Cannabis sativa
tcataacttctggtatgcttctcattatttttcttagtgttagtgaccgatcttttctttatgatcttattgaatctcactcaatatgtcattatccacagcaacggatgcttctcagaatggttaaggcgatcagaagagaaacgctcgaatgtactctgtcctcaatgtagagccgttgtgcagtttgctggaagaaaccactttctgaagaacattggagatgtaatggttaattcttatatcataatcacctttgaacgccgcaaagattaactttgcttcttgtcttgtttataggatatactggaggctgattcttctctaacacgttcaaaggatgaagttgcagttttagataaatatgcatcaatacaatcaaaccttgtgagtaatcgtttacttttctgttaggctgtagaatgtgcatacatctgtacgtgaatactcatctagaaaattgtgatgtgaaccttttcaactttgacatgtttattttatatcattgattattctgcatgtaatgcccggtaggtcgttaagagtggaaagatgggtcgtcggaagagggcctattcacccgtggacgagttaagtggtggcatagatcttccatgcccacaatgtggtaatactaatagtttgataatgactttggttaagaaattattacctcattttatatattgcatgatctcgaagaggttttcttatatatgtgttctgtttaattggaacccctctgtttacatttatttaggtactgaatacggtagctttcgctgcaatgataacactatccacttacaatgtcaatcatgtggaggaatgatgccttcccggtccaatgctaatgtaacacaacactgtaagatttttccgtatacattagaatactctttggtcttttgtttcacaattaatattcggagacaacactacaaggatttcaaatgatgaaatgatggcctaagaatccctttaatatactgaagggttatgtttttgcaattttttatgtgcttgcaggtttaggctgtgatagggctttttgtggtgcttattggcattctttaagagctataggaacaggagctcatgcaatgtgcagttctgagacctttaaaccggtgtgtaaatttcatgtgtttgtgttgagtttatagacatgcatcccacacactctcatgcattcatatttactagtgtatatatgcattttataagaaattatatatataattctataatggaatgagtaaattgatagattgagtgaatgatgtaatgtttaatggtttgcagatcagagaacgtactatctcgagaattcctttctgggcgcatgaaaagaaccgacatgagcaagatgtatgtatcattaatagtggagatagcacagttgtttcttaatgataaaagtttcgaattactagtgtattcttttgttttttacttcttcttagattacagagaagtgttttagacaaatgggcagaacactacaggatgttgttacagaatggattggaaagttgaacaacagagagatcggtacataagtttacttttgttttaagctccaaagttctccatttgcttcccacttatgctctctgaatcgaaatgttggtcttgttgcttagattctgactcctatagtagttaattttgtttgaatttaagattcttctctcacgaaacatgctttaccgttcttgctccaatgttcacttctaaaaaggcagcttttatgggtttgcactttgttattttggttgctgtgcagatcgaagtagaatgccgcttaatcatgctgaaatgataacagctgagacccatttatgcaagtatgtttccctccatagattctttcttggtaaaactgaattttatttattcatcatgtcagtgaatgattatgtggtgtaatatttgtgtgtgttgaatggaatatgcagtgattgttatgagaaacttgtgtcgttcctgttgtactggtttcggatttcaatacccaaacatgtaagtaaagactaagactttgttcgtcgatcatatggttgagagtttttgagatgaattgagaaggttgttttgtacacttgtgtagcttcttccgggggatgcagctgcaagagatgattgctggtatggatatggttgtcggacacaacaccacagcgaagaacacgctcgcaaaaggaatcacgtgtgtcgtccaacaaggggttcaaatatgtagttaagtcaattttgcattcgtataatactgtgcaaacagaaaacagatggatttattttgtgttcctgaattcttgactggtttatttgcatatatatctatgaatgaatggttgagttacttttcaatgtcttagcaacaattgccaattgatccttcttgcaagaaactgttcaaattgtcaattgtaccctggttttactatgctgcaaagtgttatatatgtgtgtgtgtgtgtgagatttgaaattataatgaaaaatgttttgaaactgaagtgagggattttccatagagttgagaatacaatcaaagcagcaaataatggatgaatgcaccagcaaatagcgaggaatgaatgaattctgagaaatcttagtgagcgagtgattggttggttgtaagaatgagatgactacttaatccaataatcaatagataaatgctaaaacacaacagtactgtctaatattttttaacgtgtcatattactattagtataattatgtattaggtcttaacattgctaatcgtttacactgtaacgtttccgcttcaagcttttatcgggttttccttaagggttaataactcttatatacgggttcgtctcttttggttgcttcatagaatgatgacttaatcttgtagatcaatacgagtctttttagcgttttttgatcttactcgtgcactttttagaaatttttttcaagagattactcatcttgaaattactctaaattaagcacgcttaactttagagctctttcataataaaaaaaaaatgtatcttattaatataagtagtaccagtcaatttatttaagaattctttaattgcataattctatatctatacagtcttaaaatcatcacattctcaattttttttctttgtagatcacggcactcttagattatcaccccacctcttatagtattactcttaatcaataatatggtgcatgatatgctattgctatgcatggtttgaactcaggtagattcttactctctatatatgttgttgttacttgttaggtgaccaatcaaatcgattagagatggaccccacttaatatcattactcagtgaggctttttatattattattattatatgtaaagtttttaggtaaaaattagaaagacatatataagaaagtagttaattttatgaatagatcaaagtaatttgtataagagattgtgttctagaatcctagaagaaaacaaaagaggtaggtgaagggtaacgtgggagagagagagacaaaggaagtggttaactatacgcacaaacacataactacgtacctttttcatcaattaattaaattaaatataaatgtagatatatataatagggttcctttaaaataaatacatccattgatgcacttccaatttatttcaacatttgagaaattttttgttcgatttttttttatgatcgttcatattttaattatttaaaacatcttaaaattttttgatagattcgaaaagatttaacatgtcaaaaataatattcaaggagtcttttaaactataaaattctctatggtgcttcataatggaaattttttctatattatatatctattaataattataagaatgagagctagctactactagtactactattactacccacgtctttactatatattatacacattgatctccttttcaatgacatgtgtttacgtaatactataatacctcttctttacttaattatacattcatgtatcttaatcccaatcctaatcctaatcctacctaattaataatcaaatatgttggattggatggattcatctcctcatcacttccatgtatgatttatatatatgattgataatattaagtaataatatcataaccaccatcctaattaatacttgtgtatattaatataattaattcatgttataacctctcaattaaaatatatttaacttattaagtttacctgcaattcatgtcttgagctctggctgagatcagggatgggtgtgcaaagttaatgttgatactgcgattgattcgattagaggttcttgtagtctagggttttcaaaaatttgatgaggaagtcttagtgtctgcatcatggagagcccttgggagtttttccctagaagttgatgaggaatatatagtcactaaatcttagtcatattatgttgttatatagattcacccttaggatttgttcttaatgatgatactattgatgcttgtaatttttcacattgttaaggatttgtggcatgggtttttttagtcacatatttttacagatgccaattattaatgaaatgcattattattcttattcagtatcttagagtaaaattgacacaaaaagaggcaaatataacttacgagtgggttaattaattacttctttttcttcaaaattttgacgtggttaaattgcaccaatatcatcatatagcaccacctcatctcatttgttactagcatatacattatacatatacataagaaatcattaatatataaaaatgttatagtagtactaaacatgtatattatgagtgtacatatatatatctaggttggtaacaagtaagtaatacatacaaaaatttaagttgagatgagaatagtgaagccaaagagagagattaatttatcaaccattatattaggtagtactagttgttgtataatatgtatagagataattactatgaggagtactagtagtagtagtagtggtggtggtgggtactaatacaggttttactactctttgatgagactgagtctcagagtgagtagtagtattaatattactattgcagttacataatgatgatgattggcttttttgcaatcctaaattgtaacacaaacacacatgagtagtaaacaagtgttgttgttgttgttgttgtttttgctctgtacttgtacttgtactagtagtagtagtaggagtaggagtagggagcccaaatggttgtaggcctatggagaggtccaagttgatgagcccatgttgtgtatcacttataataacatcatttcgattatgatgatgatgatgatgatcactactattattactactactcctttcaataatcccaacttgatgattatgatgatgaagtagtaagttggtgttgggattgggaatgttattactcttctcaaacataataagtttgttatgatcacggtgatcatgatcgctgctgctgctactactgctattagtactagtactagttttcgttactggaagaatactagtactagttttattattagtagtagtagtattagacatgagtagaagtggtcgatgtgtttgtggatcgattcctctactatacaactttcttttgatgtgagtattccaataattctttatttcattatctgttctaccgggcaatcttgatgctattaaagaccacctatcataacacaatcatatagattctataagtataattttaatatatatatatatagttaagtgcaataaataaaattatttaacaattattattattaaatgaaaaataattattacttgtttccaagcaagctatgaaggttgatgatgagttcatcttcatcttctgtgaaattccctctcttcaaatctggccttaggtaatttatccatctaagcctacaacttttaccacatctaagcaaacctgtacatatatgtacatataattaatatatatatactttttcaaatcaaagtagatagaaaatcttcaattgaagctaattcagacttttaagtgcatgcacaattaatttatgagcagtctttattcataccatatcatatgaataagaagtatatatgtatgtatataaatttatatatatatatatatatatatataccagctgctttgggaagagatctccagcaaccttcaccatggagtttgatatagtgaatgagacgttgatcttcttctttagtccatgcacctttgtttgtgtgctctttctcacaacaaggagatctccccatacttattaatat

SEQ ID NO: 17600 - DNA, 2692 bp, Cannabis sativa
aatttaaaattaaacataatttttaattttagtccattcagctaacattagcttttaggaatccattagttttttttttttttttgaaacatgtatattcatcaatcaaaaacaactacaaaagtttaggcaagtacgccattatataggcagacgcacaagaagggtaattccccaaccacaacttattacaattagaagagatagccaatttggccaaagaatgggcaaccatgttgcattgcctgctgatgtgagtcacgaccaagcaatgagtgaactccggagcttcacgaacttcatccagcaaagccccccaatctgattttgctttgaagtttcctttgatgtactcaaccacccgaagacagtctaattgaatgatgaaaggggttgctgcaatttggacagccagagagatccccattcgaagagctaaagcttcagccaattcaaccgagaaaacacctgctttatactgagtttctgcagcaacaacctcgccagtatgggtccttaagaccactcccagaccgattctagcctcagtacatagcacactagcatcactattaatgcagaagctatccatggggggaggctcccagccgatatgcttaataggaggggttatcttgcatctgtctactgatggatcatggtgcattaggtagtcaacttctatgtgagcccattttgtccaagactcgtttgaaaggacatggtgattaagccgtttcttattccttcgattccacagcagccaagacatgattatgaaaaaaaaaaacaaaatcctccttcaccacctgtcatttaatgtgaatgagaatatcaataattgtacctttgctctgtttgattatcttccagattgaataattcttccagatctgttttgaagagggggaaaaccataagcaatgttcaatggtttcttcctcttgtccacaccagtagcaattgatattaattttcattctgcggtgttgcaatatagtgttcacagggagccaaccattaattacataacctccaaatgaagtttcggattttgggaggggcctcgatcttccatatgccattccaccagttttttgttgttgcttcagaggaggggcctggaatgcagttatttgcatcggctatcttatagccactacttacattatacattccatccggggtgaagtgccacacaaagtgatcattggagtttctattgcaaggggccattcctaatctaataggaatatcatcatgatggaaacaatctttaattagatcctgattccattcgccattctcctcctttagtgtatccaccgttgttccattggggacctttgccggagtgcgcaatgtaaaagttaaaggacggggaagccatttgtcttcgtttattcgaatgtcttttcttgatagaaccctccatcttattcctttttctacgatttgccttccccaaattatgcttctccaaaagaaagatccaaatccttctattttagcctccaaaaaactagaattggtgaagtagcaagcctttaatacccgagccatcattgattgggggttatgtaaaattttccaaccttgtttcgccaataaggattggttaaatttttccaagtttttgaatcccataactcctttctctttaggcttgcataatttgtaccatttccccaaatggattttatgttttgaatccgaggatccccaccaaaacctggccatcattgcatgaatatcttttattaattcttttggaaggcagaaacaactcatgatataagtagggattgcttggattattgctttgagaagaatgtcccttcccgcttgagagaatagactggctttccatccttgaagtttggctctaatcttagaacgaatgtcctcaaaaacttccttttttctttttccaattgtcgccggcatcgccaagtactttgtgtgccattccacaagtttgactcctagcactgccgcaaggtactcgccctcttcctttttaatcttgcagccaacacataattctgacttggtgaagttaattttctgacccgatagcatggaatactcatctaagacagctttcaaacttcttccctccgaaggttttgcatctacaaatatgaaactgtcgtcagcgaagtatagatgggataatttgataccttcttttccaaacttgagcccgtgaatcttatcggctctctccgcttcttggataaggcaagaaagaccttccgcacatagtagaaacaagtaaggcgagagagggtccccttggcggatcccacaattaggttgaatttagccgcaaacttcaccatttatgagaactgagaaggaaaccgttgtgatgcaattcatgactttgtttacccacttctgttcataccccaaacaaatcatcatcgcttcaatgaaccgccaacccactctatcatacgcttttgacatatccagtttgagagccatctttttcccattctcaaatctaccttttttcatgcagtggagactttcaaaacccaagatagcattatcctgaattagccgacctcgtataaatgcactttggttttcagatatgacttcttttagactgtccttcattcggtttgcaaggcactttgcaattattttatagctgacattgcaaagacttataggccga

SEQ ID NO: 17601 - DNA, 6551 bp, Cannabis sativa
  modified_base (4407)..(4414): a, c, t, g, unknown or other
ttaatgccggcagtaacggtatggatgatgacgtgtcacggtatattaagatattttttttatataacttttttttgtaatattaatgtatataatgtatatttataaaaaatttccaaagaagtattacgttatatatatctttattatttttattttaggccttttcttggcgactagattggataaagattaatgcccctttcgtctctaacttgttacatcatcttattacttaaccttattaagtttgtcgtctttgcgggtcatccttttccatctcataaatttttcgatatttgttttattatattaattttcctaaaacaacaaagagaatccaacaaaaattggttactgtcccatttaaaatacggcaattataggaactatttatcacgatccaaaaggtatatatgtgttgtggatgtataaatatatatgtgtaatacatataaatatatagctcgagccatgacagtacgtaaaactactattcatatagagattccaaaacaatgaaactttacattattccatgtatacatatcatcatcatcatcatcctcatcaattcaccatcgcccagtataatttctttttctttttcttttctgttttataaatataattatatacatataaataggtagtacaacaaaaaattattttacaaagagtggcacatattggcactacttggtccttgtatttactaggttcattcatagggttgtatatagtagctagctagaaatgaaggctgcaatgtatataattgcacgttggtttgcttttaataaagagaagtgggcttttgatcttttggatttgatgctttgacttttggactttcactagcaaacttctctttttggatttaaagataagtctcccccactcacatggtttgtttcctgagccatcactattcaacttttgctattggccaaaggcaaattctaaggactatggatcaaaaagatgccccaaattaggagggccccaacattgatctaaattcatgattagggttcgttggcccaacttttttcacattttcctctcatcccccctctttacatttaatagaaaagattttaagaaagaaaaaaagttggctttttgatcagtatggacttactttatgcttataataataacttaatttcatacagcattcctttctcatgtcggtcttgctttaattatttgaaaatgtgtagtttttaagatgaaagtatttcctatattgttatgcaaaacttctaattttatagtttgaatatgtgtgtggggctagggttttataagtagttatacatataagggtagagtaagacaattggtaaaacttttttttttttttttgatgaataatataagtatttcctatagaaaaacttttttttttttttatgtatttaggttcatttggtatttggtacgccgtattacaccgtattgtatagtatactattatattgaattgcatttcatgaaatatttttatgtaaaactctataaggtattaacttttatagttacctaaatatataatattttagtataaattaaagcttaatacattagtattatataaacatatgatatataatccaattcaatataatacaatatagtacaatacgaactaatacgacgttctaaacaaaccttttaagatgtgtgatatatgtttttatagggcgcggacggttttattaaactgacggtaataaagttttaaaatttttaaaattaaaatttgtgtctgttagtaattgatggtattgtttaaagattttttataagcaacgggaattttggactaattaacaacgtttgttataaacactcacatgcttttaatagctatggttttcgaaaattttggattttaaatgggagatgttttgttctgtagtattcatatatgataatatacatgcagtttatttattcagagaaattaaataataatgatattagaaagaaagaaaaaagagggagaaaaacattgtgtggcctttagatccttcccctgcaaagcatatgtcaagtctggtgaagaagctttattgttgtaaatatatgaattactttattctttctatagtgagtgagtgagtgagtgagggagtgagtgtgagagagtgtgtgacatgttaccacttctatatatcaaccaagctttctttttggtcactttttgtttgttttgttttatttctgcctttgaaaatgcttctaaaccagttgggggaaccaaaactctgtactccatgcactcacataatgacacgtacggacgcagctttgcctttgcctttggcgtataagcttaaatttattatacattaggtttcgtacgtgggtgaggatatatatatatccctatgcttttagggcatttgtctttcgtgtcacttaataaattatatattatatagtatgtatgagataataatatatattgtatatatcttttggtatcgaagtagcatattggtgaaggtgatggagaggcacatggagactaaaaggtcgacatctcttcccagaaaaaaaaaaaaaaaaagagtatacatcacaactcaaaaagttaaagaaaagagaaaaagatacatgaaagttgaaactaaagaaagaccaagaaaaaggttatcaacagcccacgctcctctgtcctttcctacattattcaacctctctctccctcccatatataaatataaatatatattatataattttactaatgtatgaccttttttttccttcttaattaattaatattctatcgaaaatgccaaagtaattatcattagtgaatttcaaaatattgagttatgcatattttaattcataagtaatatatatatatatatatatagtatgagaaagtgttaattgacacatctaattaaaatggttacctcggtgctgaaaactttaaaatgttcctaataacaatgttttttaaacatttcatggtgggatgaaaattatcaattagataaaggtaatgaggtgtactttaaaagagagaggcacatacatcataataataataaatttcatacaggaagcttttgatattattgccaaaaaaaaaaaaagtgaatatattaatgccttgtaaaaggatgtggaaattaattaagaaataaaaatatacaattggaagagtactgctatactactgcaagttgaagaaaataagcaattaaaaaaagtgcgtagtgaatcagtgaattgtgtttgaaaagaggtttctttttggaaactaataagtgtaaaaagcttaatttgcttcacgagaacttactgaagaacccgcaaagtaatctgtcccttttctgtttggctcatatttattaaggtgtagccataaactatatacgcattagctttattgtttgcaccaccatttccctttgttttgtgtacaaaataattaatattattattatttatttatagttttttaaactttgtgggatcaccaagggaacaatattttcagacacacacactactctctctctctctctctctctttaataattgaatcatattattataaacgtataatttagatatatacataaaagtacttgggattcttcacatttagataacaacaaagaaaataaatcaatcactatacaaacttatgctatatatggtagaattcaactatacttttacccttgtaatttaaatccttatataatatagagatgatttccttttcttcgattgctataattcaccaaaaccagcttcaaccatatttcgtaactaatgaataagtttctctagcaaaactatcataacatacattgttaattatataataatagttgcttcaaaaaagaaattacatattaacaagtattatagtactatatatagggttggagaagttaattaaatcattttataattagattattcacatttacacataaattgtttcttttcatattgcaattaaaatttaaatttattgcacgtatataaaaaatatttttccattaccatgaacattttttttacccaattcatctaaaaaaaaaaaaaaaaaaatctattttttaacaataaatcaatgttatgttaaaatgtggctacatataaatctattattgttcatcataaaaaacaatagttatataacagaatatattatttttttttctaaatatatttaatatagctttctttttttttttttttatattaattagttgtggtatataacgtagaatgtttttttttttttttgacatcatgcagttcaaatttaggacattttacatatttaaaaaatatttttctattatatctttttttatccaatctacattttttaaaaaaaatatctttatattattgttnnnnnnnnaaacaataaaatagaaaaaatatttatatttcttaaagaattaccatgttgatgtcgttacatattgcagttataaaagaatatatatatttttattattactttttttaaaataaaaaattaaaaaagtatataatatttcaaaaaaggtaaaaaatatataaaattcaaagtattacagttaaacttaaattataattgacaaaaaaaattaagttattatattttctttttataaatagcacttaaattaaatattatttaataaaaagtattgttgtttattgaataactttagaaaaaaaaattaattatacaactaaaaatatacataattaaaataaaaattaagaatataagtaagtatacgtgcattgcacgtacgtaatattaacctagtgatatattaagtattacaattcaaatttaaacctattacacaagtctaaaaaatattttttatcatcactttttatccaattcacatatttagaaaaatatctttctgtttttgttttctttccaaataatagaatagaaaaagtatttatgtttcttaagaatcactattgtgacactgttagcttattgcaattgccaaaaaacaaaatctttctattattatataaaaataaaaataaaaattgtatgatatttctaacaaaataaaaaatattataaaattaaaagttttacggttaaattaaaattatgattaataataaatttaaatattattatatactttttttataaattgcatttaaattaaatactttttaataaaaaataatatttattgaataataacataaaaactaacgctataactaattatacgtgcattacaagtaatattaatttagtatcactataaaaaaattgctacttttagtgactattttttggttacagtataaattttttgtgactaaatgttgcttttagtcacagtgaaaacttacttatgactaaaacataatatttatatacaagttatcacaatttagttttagtcacaacaaatactgtgactagaaacacttttagtcacaacaaaatatcattattagaagatatccaatgaattatatagtgcattaaaaatagacaatattttatatggtatcccctgtaaattggttggtttatttatcttatacatatatagtatcccacatttttattctggtgccacatatatgtgggtgttttgcaaacttatatagagaaatgtcactttctgatagaacacttcctctgattttctatgttgatgcaaatagatattttgtagacatgatacttcaacacagcagaaaaaagcgatgtttcttgtgctagatagtacagcagtcaacagtgtaaggttaaaaaaataagtaaattatttatttgttaaaaattatctaacagaagaaaaagtttattactttttacacagttaattgacttaattagaatgaaatgattataatgataatgtcataataataaaatagtgatggtattttattataatgagatcgagatgtacacaaatatatatacgtacttacgtatgtactacgtatacccatgaaacatccctagtctttaatttattgggggcatatgtatatcgatcatgaaatgtgtgttgtatttgtcttgagcaaaaagctgttcaacaaatttgacatgttgaacgaacattatttggggatatctcttgtgtttgtccatgtaatatgtaatataagtatgtatttatatatatatatatatacataaaatagtaaattaagaagaaaaaacaagaataaaggaaaggagaagacgagagaatcttatcaataataaatcatgacaacattaggaaacatatatgtcttcaatcaagacataattccaataggaaataacaatcatatcatacatggagaaactcaataatgaaacccaaaatggggtccttttgaacaagacaataatttattaggagtattgtgatatgaaattagaattacatattctactcatcatctttgattttctatttttatatatttctattctatataaagtgtgcctatataactgaaattcttggtttttgaaaaatttatgggtgatttttaatttttatttaataaaa

SEQ ID NO: 17602 - DNA, 8470 bp, Cannabis sativa
  modified_base (7736)..(7744): a, c, t, g, unknown or other
  modified_base (7798)..(7803): a, c, t, g, unknown or other
aaaaatattacactcaataaatataattatattaaacatcgacctctaaatctaattataaattcttattataattatttttcaattcttgaactttgaaaaaagtatttgttatagtcataatattatttttgtaattattttaaaattttaaattatttatagtattaatgacagagttattgatattacagtttactattcatgtttaaagtttgtttttaaggatgtaaattatttgaatttttaaaatatttataagaataatgtcgtaattattaatattacagtttaaaagtatcctcactaaattaattttattttagaaattaaaaaaaaaactattttcataattttaaatattttgtttttgtttaattataatttgtactctaaattttaagcatcgatagttaaaaattcactttgaattattgagattgttgaattcaaaaacttccgtttaattttacgaacagatatttaacatgaatagaagttcaaaaaatacgagttggtcaagtaatacatgtcaaaggtcgaatgaaaaaaatatttattagaattttttttcttacatcttaatctatgtaatgatataaataggatttgctcctgaattacaagctttgtagagttttatcccctttaactttttttattgcaattttttttcttaaaataaacaaattgttccaaatatttttctttagttatattatatttatttttttatttaatttgttgatgtaacgttaacatacaatactatttatctcaaaaaaaaagaaaaaaacatacaatactattaataaattaggaatatgtgtatgcatttattaaagcaatgtttctatgtttaattctaataaattatattttgggtagtttaataaaatgttaagtttttacactacagtgacatatgaccacataaacaaatttaagtgcaataaaattaactatataaaaatcttaatttaataaagtaaactatataaaatatttatgtttacgaacaaattttcgcaataaaataattagtggaaatgatatgaaatatgtttttctttctccttctacaagtttgataaaattagaactttaattttgcgtatgactttttctatttaacatttttaagtaaatggtcaggccacgtggcaaaacgacttaaaaggggcgggaagagtcccaaaacgacgtcgtatcactgaaacaccaaccatttccaaacaaagctttggttggaaaattcataaacccaaaaatggagggaaaatatcggagaagaagaagctcacaaccaaaaccagaaccaggcgattcggtgaagaacaatatcaaaggtaattcctcttcagctttgagcattgaattccaatcacctctaatttcattcattcaattcattcccttcgatcaatttgtatatgtatatgttttattttttttgtcatctccagaatttactcgagctatagttgaagatctttgcaaaggacggtctcctgtaatttcaatcgatcgttttagtagctactgcaccaattcagattctatctggttcagtttttatctctctaatgtttgagttaccaaatagggttaagatttaattgtttttgtggtttttggtagttatggagtgtttaatattgacaaatgcagttgttgtagctctgattttcctaatgggagggaaattcttacatttaagagggaaaaccaagtgcatagaattggtgggttgtgtttattttttttatttgaatcattaagactttgaattgtgtttatatataatatgtttgatgattggtatctgccttttttggtcctctttcagatgttctgctgagggttctgttgattgtgcagaagcttttgcaagaaaacaaacatggttctaaaagagatatatattacatgcacccagctgtattttcaggtgagttttttgttgaatttcagttcagatgttggttataaatgtataattgatgtctcatgtgatgatgcaaaatatactctttttaaagattgaaatctgaatttgtctttttggaagatgttgattactttttcgagttgatgttcattgggttcttaaagtaatggtcaaaactaatttttgcaatacagatcagtcagttgtagaccgggcaatcaatgacatatgcatccttatgcagtgcagtagacacaatttaaatgtggtgggtacgcttcatacatttcatttacaaacatgagacaatttatcaaatttctgtgtcaaataatagaggattaatcaagatagtcaatcaaatgaagagacattgtcttttttctgtaattcaaatgtagtttcagcgacacttcttaggctgcatgcatgagctgcttttttaagctacattcagcttctgagattcttcactttccatcattattgcaggtttctgttggaaaggggtatgcacctgagctcacgtcatggcataagtttatgtcttcatttttaattatattctaaatggaaaattttgaattttgtattcggatatgcaatttttggtctgtaatctgatgtttccttctcatgttaattaccttcattgtagccattaaaatgcattgtgaccacatatctaatgtttacactttcttggagtgaagctaaattgtagaagaaataatgttgtatcttttcctcagttaatttgccattactatgggcatgcattaggggtagttacccatcggtctttaattagctaacattcttgttataggtttgtgatgggatggctaagattctcagaatctgaaaagatatttgattgcataaataggccaagcacggtaagaatggaggatataattatgctctggaatgtatcttcttctttcctctgtatttgagttctatctctgcctttgggttacttacaggctcacccaattcctgttcacgttgaagaagttaaaggtagctagacctttgagaaacatgatttagataataacttagttcaatgtcttttgataaaatttgctcaaagagatagaaatttccgttactcggtcttgcagatgtagttagtgttgccaaatacattcttgttgtggagaaagaatcaggtaccttagttgtttagccatccaagttgcttggattactagatgcatttctatcaactaaacttgtattgttatattttggcttagtgttccaacgattggcaaatgaccaattctgcaacaaaaaccgttgcattgttatcacggtaagagtaactttcatatgagtcttaaactgactttagatatgtgaccattacacctcttagttttcatttcagggacgaggttatcctgatatccctacgagaaggtaccaattccattattttctaaataagctaagatgaatatctttgtaccatcagctatattgatttctcctaatctgtaaaaactttgaccaggtttttgcgtcttcttattgatactttgcatctccccgcatattgtttggtagattgtgatccttatggttttgacattttgtgtacatatcgatttggctctatggttaggcatcttgacactgaattatctactttccatgcttgcttgtacataattgttagttttctcatccaatctaaactcactcttctgttatttaagcaaatggcatacgattcaaaaaatttaagggtcccagagataaaatggattggagtttttccttcagattttgacaagtactgtattccaaaccagtgttttcttcctttgacaccagaaggtgagaaatggactggtctttaataaatcgtaatcttccagttgtgatcttaaccgatgagttatgactttttcagacaaaaggaaaactgaatccatgttacgcagatgctatttacaaagagaggtgccacaatggaggtaaacctccttgtgctttttcgatgctaaccttttttggctggctatgattgttataatgtacgacagtttcttttaacttgaaagagtggagctagaggtgatgctgcaaagaggagtgaagttcgagatagaagcattatctgttcgcgccttatcttttttatcagaggagtacctaccatctaaaattcaaggtggactctatatctaatctaatctcttgaaaaatggcctgtctgcataagtgttacattagcaaattttaatgattcaaataacactattgggaatccgcccaagaggcatggagtttgagtctttccttcttaaattcgagttttagagatttataggtattaacaaaacaaaaaacaggattgggagcactgtaattaatcgaaagtaaaataaaacattatggttattattttcattattgttaacattagataatatgaggttttgcctcatctattggaatagtatccacaggctctcttttgtaaatctcactgtaatttaacattgaagaatctattatgtaaggatttaaaaatttattactcttcatgtttcaatattgctctgtaatattaaatagcttttcactttagatggaagcaacaatagttggcttacataatagattagaaatgctctttgtagttttcaaacatataggaatgaaattttgtgtttatattctaaaaggtgaacggttttaaaactccattgatttggttctaaatttagatttttgtttggtaaaaaggaaaagttggaaagaaaatagaggagaaaatggtaaaaatagaaggtgaaatatagggtgggacctaccaatataaaggattctactaatctttgctcaaattaatctcttttttcaggtgattgcttcctagattgaatcaagagatagataaacatacaatacaattattaaaactttattaaatcttgacttggccatacctctcttcatcttaatggtcaattataagacaaggaaatctcacaattatcattaaaaaaaaaaaaactttctttgattgataatgtggaatacccttagctagtttgatttataatttagctttgtatgaaaatagtatgtggaaaaagttacaaaactaaaaggaaaatgaatttttaagaacatatgaagaactcaataatgtataatgactatgattaatcactatcaatatactctctaaaaattaatcattggaagctctattataaataataaaggagcaagttcctagaagaaaccacactttgaatagtcttaatcaaactcatagtataattaacaaaacaatagagtgattatttggtggataccataagatttatgagattggagatctttttattttataggaggtggcagatttttggtctcataaaatgttcatcaagttatttggtgtttgtattttgttgctttacaattatgtatttgattattatttctttcataaattgagcattcaaatcatatagtgaaaaattccaagattgttgtatacattatggggtccaaaaccaaattattgaaaagcttaagtctttttaatgattttatgttcgtacaactattgtacattttattttattctcttaattggctaaccatagaatgcatgtatacatatatatatatatatatatataaatacacacatatatatatatatatagagaccccacttcccatttgattgcaaaaaaccacattattttgaagaatccaaaaatgaatccatgttagctgctttccttatcgatctcaaagtatacaatcattcaactcataattattttttattaattttttttttttcaaaaaaaaaacctcaatcattcagtcttggccacgtgcacatacaaatgtttttgcttggaacaatcttgttctcttgttctttgatctcatctttattatatagatataaatataaatatatatatactttaatattgtgtctgtggttatgtacaacttcactaatgatttcttccacttgaagacatgaagaataaacatggaattataagtacattgtaattctaatacttagaaatgatatgtttagaaagtaagactcaattggatattgttgaattaataatattgtaagttaagaaacatggaggaataaattaattgatcatttttgccaataataaattaataatatagagttatcattttttttttaatgagataagagatttttgttttttgaaatgaaatgaatataagagattggatgggataaaattaaattaaaattttgatcatattatcaaatttattcaatctaatcttacattactcgatgttattattagagaatttgttgtggtgatcaatggcggagctagactgatggaaaagaaatatttaatttatttatttttttattttttacatataattcttttaaaaaaattaaaaaaaacttgggaggctatggcatcctccaactctgtagcttctcagtgttcgtgatatatacatttatttatgagtattgcttttgggcaccagtggtgtctaacacctctagacatgttatcttgcgattgactatcgatacttcctaaaaattattatattaaactatatgagacccgatacttagttagaccattaacgatattgacacataaaaaagtgttaagcaccactagtaccctttaatatttttctttatttatttatcgatttttcttttcaaaaaaataggacaatcaatctagtatgttgacaaattaagagaatttgtgaccgtcaaagtttagtgattcgtaaagagaaagactaggtaagttgtgtaatcccacatcgtttgaaaaatgtcaagtgatgattctaagactgtataaatataggactacataataattacgtgtgcttttgagagacacatttaataattgtgttatatttgaattttcgacgcgtttaataatcatttcatgtcacaatcgtggtagtatgtttaataattgtgttaagatgataacatgaataatttatcatagatttcataatttttttccttatatcctatttgttttgtacatgacacattaatcgtgttattgtgtaattgtgttacatttgtattcgtgtatcataattgtgttgacataacaaaactataacacgaattactaaccctattgaatatcaatggcatgaattagtaaaactctagcattagacagaagctaggagaacaaacaaatctacttaatttattaagtgtgatttttcaccatttcagagagaatcataaatataatgtgaatccatatgaagagagaaggtgaaaacgaaagcttatgatgtttcaaccacatgagtgtaaagctttccactcatttttactcacaacaatattaaaagtccttttcactagagaaaaccaaagtttctatactttgttttcaacaatagtagatccatagggaacatatgctcttttagtatatttcctatttttacaatatattattttgtattgtacgttttctataatagttatcgagtgtcaaaattaaagcagaagaaaatgatctcgatatgctgtaatttaaattatttttatttttacagtatatcttgatctcgatattatatgtaatatatttaaattacagtatatatatttaaggtaatactaaaaaaaaattgctacttttaataacaattttttactcacaatataaatttttttgtgactaaatgtaatttttagtcacaataaaannnnnnnnntgactaaaatatagtatttatatacaatttgtcactaatttacttttagtcacnnnnnntattgtgactaaaaatacattaagaattgtaactaaaaatatacttaatcacaataaattgcaatttttgtgacgggaccttttcgtaacaacataagaataatgatttataattagttacaacttttttacttttagatacaagttttgttgggactaaaagtaaattttttgtggtgtaacatattatatgatctaaatattggagatcagagtattattttatacagacttaaattataaaaaaccgcaataatcgttattaacataatatattagaattatacattgttgtaaacataagaaaccaaatatattaataaaatacctaaaaagacatgtaatttactctcaactaatagctcaatacaatagaagaataggagagcaaagtatttatttattgtttttttttttcaagtagaaagaagaattagtcattgaatgaatattccatatgtgatcactaaaatgaaatttgtcagtttttattattattattccaaataaaagttagtgatgaatttgattccatagggatctttctgaattaatgtattgctgtttttgggtgaagtgctgtttcaaacaagtgaaattcttgtcacatctagctatattatctcatatttgctccccactatatatggatgagaatatatatcta

SEQ ID NO: 17603 - DNA, 2507 bp, Cannabis sativa
tttttttttttttttgatagaatttatggttctacttgactaaacaagctataactttgtcaccgttgaagcttcttccacaagtaatacgctctcctgataacgggatcaactgaaaatccttctgcgtaggcacccattgcggttaacaggctactgaacctctctccattatcctgcattcatcaatattagcaatggcataggggtacaaccatatctattatctaactccattatttcggggtagttcctcgatgagtatgacaactagtgtttctcatgcaaaacaatggatgcatagctcaattgaaatttatagagctaagatagtacaaacctctggatgcttaaatatgagatcttcagtgacaaatggtaccatgtagaatggaagatccgaacgtaaaagcacctgtgttaagtcatgcactcaaataattatatcccaaaatccaaacttgaagaaaaaaggaaagaaacaaaacaaattcaaaagggcaaagaagtggtagcaatgttagtataattaccaagttcttgcttagaagagcttgattggcatttgctaccaaggtctacaagaaaagtgcagtagatcatgattcatgagttagtttatactaacaatctttacaaaaacaaaaggcacaataatttgcaattaacaataatttaaataacaaagctcaccaaagattgttttgcagttaacatgtgtcgtctcgtctcttaaagtaaagaaagaaggtacgaaagaacatgaacattataataaatggatcttataagttacaacatcaaatcagtcatataactgataatacttgcctttttaatacgatcctcctttagctcatcaactcgttgcagcaaagtctctatattgcctgccaaatagtgatagcagttagattcccaatactttaaattccagatttagaaaggggtggaagactaaacaaaatcactttgaaatatatgaaggaaatcattttttttttttttgacgaaatgaaggaaacccattgtcagcagaaagtataagtcatgtaatgtgcataccgaatctagagattagttgcaccgcgttaacctctccaataccttcaactcctgcattgaactatcataagtactcatgcactaagttttcatttaaaaaaataaactaggccctctaaattatcttttgggattctgttttaagactacaggaaactttcagatttaaatccagttgcaggcattccaatgtcacgggcttatatttcaagcatagtttcaaatatgtatatccctattaaaacgcataacatattgagtgcattaggatttcaatagtgacacgcagatggactccattctattagctcttaaggataactggtaagaaactgaaaagaaaaacaattgtaaatgaaaatatctatgaggatttcattacagctttctcataatcaaaattacttatcacctggaatattatctgatctgtcacccacaagtgcaaggatgtcaacgaactgagaaggttctagggctccgtatcgtttagcaaaatcctctactccaaatgaaaccattctgggaagggtgaaaaaaacttgggtcaattctaatttccctggatggtaaaagacaattataaaagagaaaaagaaatttaaatctttctacttcagccgtttcgctttcaaatttcaacagctaaacttgaggagaaaaagagacttgaaataatatgcttcaaaacttggtattaatttagtctttgtgaagttctagaggtgataaacagaatttaagtacattagagtcaactggatcagaaaaaggtggataagaattttgatacatactcaccaccacgtggagcaattcgtagaagacgcaatgaaggagacaagatctggaagaagtctttatctggggagacaactcgtacctgacaaaaagtcaaggcaatcaagagaaactaagcacaccgatatatcatatgcaattattcaaaatgcaatcataattttaaaaaaaaaaaattagagaataccacatcgaactattaagatttcaagcacaaataataaatagtgttgaaagtttatatacagaaactatctcactaaattcactttttcgaaatttcagatataaatttttcagaaatcacctaccttgtatccagcattaacacttctaagagccaaagttccaatcacatcatcagcttctacaccaggcacctgtgttacaagattaatgagtaatttacagccaaggaaagcaacctagatcttagatgtacagctattacctcaataaccttaattgacatagccttgatggatgcttttaagtattgaagtccctgaactatagtatcaggagtaggaggtcgattgctcttgtatgagggataaagagtatgacgaaaattcctgcctaaaaataaataatttgcatataacaagccataagttttaaaacagccaacacagcatata

SEQ ID NO: 17604 - DNA, 3042 bp, Cannabis sativa
  modified_base (2998)..(3000): a, c, t, g, unknown or other
tagcctttatgattaaggctatacttaataaatgtacaaggggaagacctaaactgaagtttatgcttgtagtaggaccttatgttagggtaacaaagacatccaaagattctaaggttactgtatttaggttttgtgtgaaatagcatgtcaatgggagagttttggttcaagacaggtgtgagtaacctgttatgtatgtagatagcacacctaaaggcttcatcccaaaatttcagtggcatggaagcttgagcaagcaagcttagaccatgttccacaatttgcctatgcttcctttcaactaacccattttgttcaagggttgtggggcatggatgcctatgaatgataccaacttgttttaaaggctcagtaaaggacctatattcacccgcaatctgtttgaaccactttgatctttttccctatttgaagctcagtttcagctttaaaattcagaaaagttttaagagcttcggacttagttttaagtagataaatccatgtaaatgtactgcaggcatcaacaaatgatatgtaatacttgtagccattatgagagactgtatgggagggaccttataagtctgagacaagtagtaagggttcacagtattcagtgcaggatgctttgggaaaaggcatcttatgaattttaccaagacaacatgcttgacaaacagacttaggtcttttattgctttcaacagagatgttacaagattttaatacagaatgaacaactttatcttaaggatgacctagtctattatgcttaagttcaaaaacagaaacaagagagttattacaatgactacaagtgctgacattagattcaagggaacttgttccagaagtgacaacacaggcatgtttctggtgtggaagactggaaacagactgagatgaaacaggtggagttgagacagctcgaaattgatctgaatcaaaagtatataggccattgtgcagtgtcctagtcagtataacaactttggtcacctggtccttgacataacaaacaagagggtgaaactcaaagaaaacatcattgtcaagggcaaatttagaaacactaagaagattctttgtaatatctggcatatgtaaagatttttgagaattaaagtcttatctgacagtttagacttaaaacaagcaaagccagtatgttgaatctcaaaacctgaaccatttcccacaaagagtttctcctgtccattatattcaaagctactcatcagattttttttgtcagtagtgcagtgatttgttactcctgaattttggataccaatttgcatcagtatttggagatgtttgagcaacatgggcctgcattgatgtagctccatctgagggtggtaaggctcttgtgaagcttttgtcgaatctgtaaaagcattcaagggccatatgtccaattttgtgacatagttgacattgaggcttattcatgtgctgcaggaaacattccaccactttgattattgaaattgcctctcccatggttgtatgaaggaaatccacctcgagacatattgctcgaattagttcatctgttattatatggataggaagaactaacatatggatagggaggagtgtgaaactgccctttattgaagttttgtcctctgaaattacgattgtagtgagcaagaaaggcttcatatgacaattggctttcaagatcaggattcatgtcagcaacaacaagattagcacttagatcgatttctttatcagtcttttctattcttgattcacaagcaagaaggagagcctcaatctcagctacagaatacttctcaactctggtgttagaagatatgataaaggtatcatactcactttgcaatcctttaaagattccagcaacatgatctcgaggagaaagaacttctcctacagaggcaatcaaatcaacatggtgttttaacttgagaaggtaatcattgagagaagaagtttccttttcaagattctgtagtttggtgcgaaattcaagtatctttgatgagacttgaagtgtgaaatgcttttctaggacactccagatttgtcgagctgtatgacatccaaccattctagtgagtaagctttcaatcatggaagaaagaagccatgacacaagcagctgatcttgcacctcccattcgacaatggctggattctgaacagaagcagcacgatatgcattagtcaagaattgaggtggaggagcaatgtcttgggtgaacctagagacgactccctctaatcgcagcttgaacttgctgcttgcattggagaaagttgtgatcgtttagcttgatcgacaatgtatgattgaaatagattggactttggtcagtttcacgagatcgattcgttcctggaacttgggagaaacctaggggagctgtaggattgccatttccttgactgttgtttcctatgttcgccatattcgccaccagaggaggataatgctctgataccatattagaactcttgttccatgccattgttgcagaaagaaaagcagggaaccaaaaacagaggaagaagaagaaggaaagagagaaaagacagtgaaagatagagagaattaactgaaagaatctcttacattgatcaactggaaaagcacattatatacagcttaagattacaataataaagcccaacaatactaacaaactcctaaccgaaaaccaactgctaacacacaagagcaactaactaagagacagttagaagctttaactgtcttgacaagtatgtatggatggacattaaattgacaaaaaaaataattgtgcattatttgttttattttttgcacaaactaatggatcaattgtacaatatattgatctgtatttgtcgcatatatatgtcatattatcaattacatacacttagctagtttagttatctagttagctttttctccacgagagtcgtgtgtaaatacaaattaaatgatatatatatatataaatttatnnntatatatatactagcaaaaattacgtgcgaggcacgtatact

SEQ ID NO: 17605 - DNA, 6625 bp, Cannabis sativa
ttggtgctttaatggctctggtgactgcaagttcatccctcaagcacctccagatggccctccggtactattggaattccaaaaacttttttgtgtccatttcatgaaatttatttacttcaatgggatcttatcttatatagaaaaattctatggtagcggcatcacttaaattatagtccaaatatttttatataataatgtacattatggttatacagcggtttgttaaaaaaattgaatagtttacttacgatgtagtgcatgtgcaagtgactgattgaaattatttagaattttttgagaactggtggaataacatagcagttatataaggatagtcttgtatagtcttgtccatgtcatataagaatgctataaatttctctacttctgtgtgttattagtgtcttcttattcgtacatttgaagctcatgacatcaatggaaagcatgtttttctgtttatccaagcactagaaaacatagcaagcttttgatgatgctatgaataagaatacaagtaaggaagattattaatctcttgaaagatattatataattcaggttcacacttccaagaaagcatgtgtttctgtttatccaagcactgtgcagaatggcattgtatggttttggcctaacactgatccccaatacaaagatattataacaaagcaaaaaccaccatacattgcagaaatggatgatccatcatttactaattcgatgggaaacagagatattccatacgggtaagtgaaaaagatgctctaaatgacaatgattgaacattataggaaacttgatatttttcactttgtattttcagatatgaggtcttgatagaaaatctcatggaccctgcacatgttccttatgctcattatggtctaatgaggaatccacagagaaagagtaagagctttcggttttgtattcatcttagtatgttcagtttattgcatgaggaaaggaattgatatgaaaaatggcattgccacctttaacttcacaacagataaggctgatagagaaggtggcatacctttggaaatggctgtggagaattttcaccctaacggttttaatggaaggcgggagcctggaattaacaaattttttgcaccatgtgttttttattcttctttgcctcttggtggatcaacaaagcaagataatggggctgcttcctcaactggaaccaagaaggtaatagtgatatactgatcaatcatgacaagtctttggtgattggtaatttaattctattgtttgtctttggtttgttaaggaatcatcagtacagaagagaatggtgttagtttttatttgcataccagttagtccaggtaagagcagattaatatggactttcccaagaaactttggggtatggatcgacaaaattgtgccgcgatggatgtttcatgttggtcagaatttgattctggattcagatttgcatctgctacatgttgaggtacttttaaatcttttatgtttagatacaattttccttctaaccaatatcttaatcctctattgtgcaatacttttcatccttcaaaatcttatgaaatactcttatcataaatgaagtaaacccaattgtccaattgtgaagattaagatgaaagttaagtaaatgagaaatggcattgcttagaattataatcatcttttccctctgtaatgtccaaagaagaaaaactacaagttaaattgacaagctctattgcttaaactagaacatgttttaggtggaaaacaatgtctttgtttttattattagatgagatggctaactgtgttagttataactgtttgattctcgatttctctgtttaggagcgtaagataatggacgttggctctgcccagtggcagaaggcatgttttgtgccaacaaagtcggatgctcttgtgattgctttcagaaagtggctgaacaagcatgccggtggccaagttgactggaaaggcaaattcagtggagctcttccaccaactcctccaagagaacagcttatggacaggtattcttattcagttcttcctatatgatgtatgaaaatggttaacattatgatacactacttggctagaactcactcccaaaagttaggctaagaaatgagggtgcctatatagtttatatgggattctaataatacaccccttttggatgctacatccacaggggcttgcggtgcccactatgggcctagtccacaagtcgcccctttagctatatcagtcccacttgagagtacatgacttcgatactacttgggtagaacttacttccaaaaactaacctaactattctcatacttggtcaatgtgggagcccaacagatcattgctagggatggcgaaatagggtggtgtggtgtggtgagacggggcatattaccacgatgccccagccttaagaaattcttttgtgtaaagcttactcacatactcacccaaccacttaaggtctattcaacattaattagcttctataagttcatttatgggagaactcttaacacactagtgttttctttcaactagttaaaataagtcttaattcttttatttgtattttcttttcaggtattggactcatgtggttaactgcagcagttgcaatgcagcatacaagggtctcaatgtcctagaagttgtgttgcaagtagtctccatagctctacttggagttgttgcagcaaccaaacaaagcctaaaatccatggttgcaaagtctgctatggtttcaatagcacttctttgctttgcagcttcaaaatggttgtctcacttcatccacaaagtctttcactaccatgactacgaccacgcttttcgttagtgtgcatattttgccatagttttactgtaaatactatataatgaatgagaagttcgctttgaaagcatcctccatgactgaccagttttatgtgtaaattgttcatggttgttcaatgaacagattcaaagtcattctatgatgacaacaaatatcattactgaatttggtggctatcatcatttgcttataagccaatcaaacattgacatgtgagaaaacatgtcaatatatcagccaaacaagccttgtgataggaaaccaaaatgagaagacaaacaatatgagaccacaggaaaattttattgtctccttgcacataatcaaatgttacacaagggacctaaaataatgacaaagttaaataatattgttctcatttcctaagataaggccaacaacaaaagcatagagctttttccatgaggatgggatgatgagacaagcccaaaatgcaacaaaccatttcatgttaaaaagggtctattcttgtcaatagtaaaagaaaattccaaaggtatagtgtggccttaaccacaaaaaaacttgagaaatgaatgctgtgaatcaaattcttttttatgaacttttctacttggctcaaaacaagaactaggacacattattattcgacttttggactcgaccctgacaaaaatctccatccctttcataacttctctataagccaatagatttttgtgccttctgaatttggttgaggaaaatccataccatctgtgcatcataaaaaaagattggaatatcagacaaatgcctaaccattaagatagtgacagtggctcattgaggagctcagaatacgaataagctgataaggttcaattcgaaagaaacattcaccacgcatcagccagtatatataagattataaattttaagagagagagagtgaatataccatgacatgtggagcaattctgacaaagtacactggaaacccggtgtaaaatttaagaggtcctccagccttaagggtcttcaaagcacaatccaaagaaccggtgtaggggtactttccttgagcatcaggttgcattttctggatctgggttttgatataatcaaaaggcaaactacaaactgaagcaaagaatccagagacggtacttgcagctgtagacaaaaaacaaagcaggtgttaattgagggggggaataaaaagaagaatagaatattttccaaaagtcaaaagatatttaaaacagtatgaacacaaacaagcataaagcaatatttaagcacacaagtgaaagggaaagttcagcaaacagtgatgtatctgccacatttgcggaatcctttatccgctaatgttcctaagttcataacctcaaaaatacagctttattaaaggtaacagtagaaaggagtgaacatagtggaatagaatatatatatacatgaacatgctttaaggagaatctactacatcaaccataaagcaatttaaaaaaaagctcaaaaacggtgatgcaaaaggacgaaacaacaacgtattttgaaaacataagctaagttaatggaagacagacagagaataaaagtgttcagtttagatatatcccccaaaactacatacagcatgaacttttagtgttgtttcaaaaaattaaccaaatttttaaaataatgagaaagtatagaatctgagccttcaaatagcaaaagccaatatcacatagaaagatatcagaaaatatctgatttgtttttagagagttatacctaacactgtagctgtttcaccgagacccaagttatccttgcaaaactccacactttgatcgtatgaggcaagcattcccatgttcaatcccatagctctcacaacagtggggccagcacccttccagagtgcaaaaaccccttcatctgcaacaattctaacaagggcgtggaacacatttttgtaatgtcgccgttgagcagcaggcaaagtggcatcagcctgcatacgaatgagtgccaaatctgctggattaccaatagttgctccaatagcaccagcagttagcccacacaaagctttctgatataaaggaaggggctttccatcgttggcctcaactgctttacttgtcaaaatcctgaaatttcaccaaacagggtaacaaatcaattcaaatgatcatcacttactttgatgaaattcactaccactacttatatttcacttgaatatggacactttaaatcacttacttgaaagatccaagacgagctgtggtgtaggtagcttgtctcagcagaccagcagagagtccctgctcaaaagcaagatctttttaagtaaagcacaaattcaattgaaaaagataaacattttaatattgaatctaaacccaaacaactaaaagagccaaaattaatccttcagcttgtaaattttcaagacacaatttacacaaagagtcgaaattgagcctaaatatccagaatagtattagcattatactgttctcacactgaagataaattttaaaacccaattgtaaaaatatttataccattgaggcccaattgtgaaataattcaacttatttttcatttcaatgttccagattccaaatctaaacaaagatccatactttaacaacaattcaccaaataaaaagatcaacaatttacaaccccccaaatctgtaactttgaatactcattaagatcaacaacatatacaaaacaattaacaaaattcaaagctacaaaccttgtagaaggtaccaataccatcttgcttaagcatgtttttggtgacactgagagctgatccctgacctaattgaattctcacctgcaaaccaaccaaaaacaagagaaacccatcaacaaaaaacatcacacaaacaaatcccagatccaaaaaaccaccaaaaaaacaaatttaacaaaacgaaaaaaaaaaatcaaaagtaaatcaaaatgagttcttttttttcacttctttttgaacttttaaaatcaacttacagaaaccctgtaaaagcaatacatatacaagagcttaccttgaccatatcaactggctggatgacacaagtagcgagcataccagaagcaccaccattaacaaagggcttaatggaaggccagacacctccagatttgggcttcttctcttctcccattgttgtctgaaactcaaaaatcagagattcaaagctcaaaagggagagagaaaggaagagatcagccctagaaaaggaagatgagagagagtgaaaacggaggaacccaagtgtgaagcaatataaacgaaagaagaactacacacacaaaaccctctcagcgtattaaaaaattaattatttaataattaataaaaaatatattttttaattaaaaaaaacaaaaaataaataaaatgtacgctggttggtttcggttacaagtatggcctcagattcctgtcaatttacaatattgcccctactacgtatctacaatgtatatttactattttaaccttcttcttcttaaaagaaaaaattcaactcaatcaaagggtggtatactgtggtcttgtttagttgggttttttcttctcattttagattctctaagaagcattttttgaaaaagctactatagctaaattatgctaagttatgaactcatcaagaagatttacattattgagtttaggggtgttcattgaatcacattcaatgtttttaggtctatccaaatatgatccaatcatatattggatggtagattttaccattcgatccgatc

SEQ ID NO: 17606 - DNA, 5643 bp, Cannabis sativa
gttaatattgagtatcacacaacaataaacatgtaacataagttcaccttatatggtattattggccacaaaatttcacctaaagtaaagaaaaagaaatcaacgttataacactggaattcaactttcaaagaactacgacttgtaaaagctatgctatgacttatatgatgcctctacttctatattcataaaatggggctttacaagtttcaaggtaaccatttttctgaaaaggaagatatatagcctcaaacgtgacaagggtccagtccactatgcctcagcttatattttcctctactacaaagtcaggtccagaatctatactcttgataagaaaattgtgttccaattacagaacttctagcttctggggtagtcgtacacaagtccttctgccacacttcttgcccttgcatgaccgaagagtttacttattatagctaatgcgaactctgttactgtcgctagtccccggcttgtaatcagtttaccatcaataaccactttggtaccggtgactacttcgttggtcagtgaacttaagatagatggatgggcagtggctttcttatcctgtattttgttggcatatgtagcatataagcaagtgaggtatcactataagaagagattaataagtttatttcatcacattaccttcagtaaaccctgtttatgcaagacttgcggtgaggaacatactgctccataaattcttccactcagtttctgttctttgagcaatttctttagaatcctagatttgttaagtcgctcggccccagcgattcctccctgaaatgttacaaagaaccagaaagttgaagaatatagtttatgacagttttaaggcaatttattaagatgtacatgcatcttgaaaacttgaacataaaatctctctgaaattcacaacttcattcccaagagtacaagcagcaatgggccttgtatatacattaaatgcttagactatactgtacacatttaatatagtacttggcaaaatattcatcaatataaatatcagaagtctattaacagaaattatgttcttgtttttcatcaatggggacatgcaattatagttagttccatcactgcaaaagtatttgtctgactcaccgggagaatgattaaatcgtatattgactcagaagtttctcgaatcaacttgtcggcaactatcctggttccttgagaggctttaatctttagggatttttcaactgaagcaactacaacatccaccttagctcttcttaatatatcggcaatagttaccacttcaatctcttcagaaccattagcaattggaataagaacctgtctaacattcaaataatgacaaacataacttattagaccacaaaataataaataaaaagtggctctcgtaccggacttggaacaactgtaaagctaggctactcgaagttacttgcagcattatagggcagtttgtaaaatttgtacaaaacttaacatattatgtcctgcatcattgactatacatctacttggaaatgcagtccacatcatgaattgccttgaatgtgtttaaaaagggtcaaggtgagcaatatgcagaaaaatgactttccctatattagtaagcaatgtaatggataaaacaacaaaagataacagcaaaacaaatatagattacgaataagagctacttacacgagggttgtggtcaacggaccaatccaccatgttgaattcttcctttcgtgattcattttctgaagcacagaccatctaaaacgaaagtggcaagagcattagtgtagggtgagtatgcacatatgacatacaatctgaccaaagggagagtttaattgaataacacagaagaaataattccagtgaaaggacaaaataattctgcccttctaagccaaaagcaatgcttagtggtcaaacctatgctactaatcacacaatctttgcagcttgttcttctaatgatacttaattgaactacaatgttatttttttctaacacaggaagcctcattttaagtaatctatccttaatttaacttcctctctcccactccaacataatgaaaattcgaagtagtatggcttaccaataattctccaacttctctggccacagactcgccaaataactgctccacgaggcaaatcgcaaattcaaaagaagttccaggtccccgacttgttgtaagccctccagaaacctggatattcgacttgacagcccagaaggtcggaagcttgtccatgaatgcagggtggcatgttgtcttgcaagataaactacattaacattagctatccacaaactttgaccagcaacaaattcatcaaaattaataacatgaacaaacaacaaaccaagttaatgcacctgctttctttttagaagaccccatggtagaagtgttacagctggagcagcacatattgctccataaagtccatttttcccagcatgtttgcttgtaatttctttcagaatttcacagtctcttaatctcgctgaccctggcattcctcccttaaaatgatatacataattctattctcagttcatatctaattttttaactaaagctgaacacacaacttcccaacaatttataacgttatagtgaggaaaatttaccaaactatcaatatgaaaatgttagatttgttagaatttttatttggattaacattaatttttattggttttattaaaataattgattagataattctttgttgtgctagcccatattgttagtgatcaatagttagggcttagcatctatgtgtgtaaaatctagttgaagtaaaagtgtgaatttttctagttaattgaagtctttgacgagcaaagtctcttccctaactctattaatacatattgtgtcatcacaattgaatattagataaataaaactgcttctaatttacagacctaaggagaaagacgataattactatgaatcaatcaagaacatatacttaaattgtgttctatattatatgcaaattagtatcttggattatttatttttctaacaaaattagcaaaataatcacattaaatttacactaagcgaccataagcacattgtaaatttatggtcggaaaaagacttgctctttttatggtagcatagtataatttttgatcatttctacgactaaacatgattatgttgctaataaaaagttttaaaaaattattttgctaataaaaaacttcataaatactatttttacaaagcactaagtctagattagtaaaaagataagaacaaaccggtaaagcaactaggtcgaaaacttgattggaacagttcttaatggaggtgtcagctaccaacttcgtaccacctgaaccttcaacctccagctgtggctccactgaggctaccgtcacatcagcaccagctcggcggagaacgtctacaatgataacagcttccatttcttcggtaccataaccaattggtaccagcacctgcccatgaaagcttatactaagtcccctgttatggattttagtgaacttaactatgcaataaggatttgaacccaagaggcagacttctgaaaattatagatatggagaaatgggtatttgggaaaaacctttttggtaggaacagaagcggtggtgatggtggttgagtccgtttgggaagttgaggtcggcggtggtattacagaaatggttttcgtggattgagcagagtgcttcgtagtggttgccattagatgtgaggaggccattgaagcgattgaggaagaaggaaacttcggtgtgaatattgccatatgagagagtttcggagaaggaaatttgagcgcggtagaggagagaatcgaagagaaagactccatggacgccatttccagaattcagttgagtctttagtgtactctcctccctcttatctcgttttaattggcactttataacattttggaaggaaaacatgttagctttgtgctatgtttttaataatgttaaataataggggaattagcggccaacttaggttcgcaaaacgagtctgaaacgataacatcactcgaaactcgcacgagagttagccgatttatgttaaatgggttcgggttgtgtttaggttaattcgtccaacccatttaataaataggtcgtgttcaagttaatacgactaatacgatattgacccgttaataactcatttaaagttattttaggactttaaaatgtcataaaagaattataaacgtgtttaatacatcataaacgtgttattggttgacatgtttaaacaggttatacggatcgtgtcgtgtcaactcgtttataaacgggtcgtgtttgggtttcattggttgacacgattattaaacgggttgtgttcgggtcaaacatgtacttgttatacatggatctcgatacgaacacgacctacgaacacgaattgccacccgtaggccaactcttgtgatttaatttttatatttcaataatttacagtataaatatttaagtatttatatatttatttacaatttaaagttaaagttatgtatttatgccataaattattttttatacattcttttatcttttttaatggtaaaatccttttaaatttattttaagatgttatgtaaatattatcattaaatattaaatgaatgaccattatatatacttaagacggatattcatcaattgtctacactacacaaattgcctgcatcacataaaaaaattcgaattgaaatcttttgcaatgcatttgtagtttatatttttacggtacaatttgtgattttaaatttaataattataatttaaatctcactgtaatatatacattataaaattactaatttttacgatacgatttgttttacataaaaacaaatatatgtgtacattattattttttaaagaattgaatattatgacttcatcattaatatatatgttattatattaaaattttaataattttttttattattaaaattttattagattgtgtttttaaatttttattataatatttaataataatgatagtgtaaattgtttaaattgcactggcaatgtgatttttgcaatttttagatctcgctgtgcagttacaatttgagaaattacaaaaactgcatatgtaatttagtttgaaaaaaaatattacaacttgtactatctgcaccgcgaatactcctacctgtatatacttaacactacaacctcaaacctaaagaattaccgaattagtaaaattgaaagaaattagataaaagtctttaaatccaataatctcattacataaatattcacttattgtccatcgactacgcttttttgcctaatcttagaacctgacactctctgtagacgaccttgcagaggaacccttaagttttcagggcattagcttatcactaatgtttgcgttactcaagtcgatattctcactttcgtttcgtctaccactgctcgcgcaagtgcttccctctaggcaaaacgctcttttaccgatgcatttttacatcctaccgctttgacagatcgtttagtcccattcatcttcgagcgttcaatttaggaaaaaaatttaatggctaaaaaaaatcaaaaaaaaaaaaaaaaaa

SEQ ID NO: 17607 - DNA, 5549 bp, Cannabis sativa
  modified_base (5116)..(5119): a, c, t, g, unknown or other
ctgaaaacatagaaaacaagcgtaattccgtcccaatacagcgaaaaacgcacatagaatagatccgaaacctaggctaaaaatagcctaacagccatcacatctgaagtccatgaaagaatttatgaagaccacactatgggtgcgagcttgtccaaaaagattctaagcttgcaaatgtacacagggctccgcctaacgaaatcactttgatgaccaacacatgtcctttcgttgtgtggagaattgatctaataggatccctttttactgaaataggaaggttgaagtacgcagtaatcgcgatggaatacatcaccaaacaggtggaggcagaacccatgaattcaattaccttcaaaaaggtcttagactttgtcattaaaagtttcatcttccaatatagtctcccacacgagatagtattcgacaatgggaagcaattcaacaatgatcatttcatagacttttggtgaaagatacgagataatgaaaagtttctctgcagtagtacaaactccgttttaaatttattcaaagaacatttgaaagtaactgatactacatgtttctgtctacacctaatgatcaagaatctagaccttatatgtggcctgtttaagaaaataacagggtttgtacaaacaaaattaaagaaaaattacagttttacaaacattgggtacttatgtcgctaaatataaacattgagattatgccacttacaaacttaaaactttaagcacttataccgctatttacccttatttatataaaaactcaattaaatgttctttaccaattttcatgttagtaaatagtaataatcaagcatgtctggacagagaaaaaagactacaactttgtaacaggagcttattgattagattaacaattttcataatttgtttactttcagtaaaccgtaattaaatagaattatgattgtttaaccttttatatgtataaacaagatagccaagaagaacaaggtttcaatcaagttttttactataaagggtctccatcatgagctagattgctcaggcaataaatctcacctgaactggaagtttatttttcctcttaacaccataaaatacagttgaattataaattgctagaacaagaaagagtacacaacagcacagggacttattacaatgggatatactaatcaatcttgtattgtatatgcctcagttctcacaacatttcctattgactaagctgaaccaatcaaatcacacaagacaaatttcacaaactaattaacaaaccaactcatttaattacaatacacaacttgaatctagggaccaaaaatttatatatagataaagtatgcgtattgtggcctctaatatgtgactttgaatttgtttgatatattcctttcactttgagttctcacttcattgaaaaacagagattcaggtatatactaatatcgagagatttgagaagcatcaacctacacagtaaaatatcaatctgaagtttttagacaatatgaaaatgcataaataaaatcagtacagtaatctaagaagccatagaatgtttcaagcgcaattcttaagttgatcatgaactttaaagttaccatttaccacaattcagcaaattagctaaactacaagatagcatcaatatagcatccaaattcattagtcctaaactacataaaaggtaaatacagtctcaaaaacacttatctagcaatgagcaaatttaacaacatccataagatacttgataacgacgtaagcgtgccttttttgctatagatagtgtctttaaagaaggagaaatccaccgcaaagcatctctcaagtcggattccctctcaagttcacattcagtaagaactctaagatcctcccaattaaccaaaggagaacgacataccctcttcacttcttcgggcaagataagagccttcatgtgtaaatgcacaaacttattaatataaagtacacatatatggactaataatataaacttgaaacaacacataatcaaataagataagtaataaacatacctcagctgatctaacatgcaggtgcaccctattccacgaacaattcagattcaaaaaaaaattcatcaaattaataaaccatatgatgtcatagtccctatgctgtatcggaattatgaatgttccagtcaacgaattcgatgactccgccattgatatactaaatttgatattacctttatagcaaattgatgctaattttggagctgattcaattctaacagtcatttcatagtccaaaaagttattcaaatttaaactttccaagctctcacttgagatttcaatgtgcttcaacatccctttacaacagttgttcaaagtcaaatgctgaaggagactaaggtttgagatgagatattccaataatgacaactcttcctcaccccattcgcaagtcaatgtaagatttctaattgccttgcatgcacagggatttattttgtcaaaggaaacatatattagtattaaagattcaagatttatgagttcaattttctccactagatcccatctttggttaatttccaagaccttgagagttgaattacgtacgtgaatgagcagcttatgatcagcagtagaagtagaaccacatccacttaaacttaatttctcaagggaaggagaacccaacaacagattatctagcatatcactatcagcaaaacgaacagcagacaaagacaatgatttcaaggatggaaaactaaatgactgacaagaagaatcaaactctacccgacacaaattcaaatcagtcaaataacttccatcggctattagagttttaggtaagcaatagaatttattatggccacgcttccttgtgtactggcatctcatatcaagttctatgctcttgattttattcttaactgcaaaagctaaccatctatctaggcggcaagccattttcctttcataaaaatgcatccgaagcttaaaataagttatgactgaatcggggatagatttcatacctttcttgcgtaatctcaaacaattgtccacaaatttacagctaccatttttgtgactgaaatcgcagaataagagtttggggactgaataccacaagagtttccaacgctttgaaaggacgcatgtctgaaccacatccttagtaggaagaaatgacaagatgtgtaagattattgcatcaggaagtttcgaaattctatcctccgatgtcgttttaactcttttcttagctctttttccagccataaatgacctgcaacagccataaattgggtaactcattcatagaatttatttgatggattcaattcaagaaaaataaaaatacatagaatcgtttgctgtccctaacctgtagttgcatatactcttgtagttgtcttcgaatcagaaaagtggttttcgaatcagagagattttagggtctgtgactgactctgaagttaatttaaagaatggagttgaagaaagaggaagaaaacgatcagagacatatatatacatttaccgatggcacgtgactttcacgtgctgattaagataatgttctaaactaatataaatgagtattttgctgatttttgaaggtaataaaattattggaatttaagaattaaatcttaacttattatccgagcttcatttggcgaagcattttaaaagctaaagatcttatcaagatgggtgctgttagaacgatttgtgatggtaaaacgacttctgtgttagaagatccgtggcttcctactgtggatagcaattttgttacaacataccatcctagtcttgttggacgtactgttgattacttatttcagataggatcaagagggtgggatgttgatttgattagagatgtttttaatcaacatgacaatgatcttattctctcaattcagctagccaactccacaagtggtgactgctggtcctggtctcaagaaacaggtggaggctactctgttagcagtgcatacaaacttcttcaagttgtcaatggggactggtcgattaatgatggggcatcttattggaagaaagtgtggcaactcaatgtacctgctaaagttcagcatctggtttggcgtatccttgcagactgccttccaacgaaattacaacttaccaccaagcatgtacatgtggatcttacttgcccaatgtgtaacattgaacctgaatctatcacacatgttctgttcaggtgtaactttgtaaggtcttgttggagtctttcttcggctgatgcttctggtgttgatgacactgatgtatgcagctggttttgcaatattctggtgcaaaaacagaagacagttgctgaggaagtagcaatgattttatggcgtatttggatggctcgtaacgatctcttatggagcaataaaacaactaaagtttatgaggtgattcgatcgacaaaaactaatcttgacaattggaaaaatgctcaatcaaatggatccttaccgttactaaatgttaattttagtaatggtaaagagcattggactaaacctgtttcaactaagttcaagatcaatgtcgatggggcccttttgaaattgagaatcggtttggttttggcttctttcttcgagataaaaatggaaaatttcttgaagctttctcaaatagcaaactcggtatggtttcccctgagatagcagaagtggtgggcgttaaggaagtcttaagttggattaagacgaaacagttaactgatgtggaagttgaaactgattctttggtagttgttcaggctattaacggttcagttcaaatgccatcttaatttgattttcttgttcaagattgtcgtttgctactctctgagttacataatgtttttatttcatttgttaaacgatctgcaaatagggttgctcattgcattgcaaggaagtcctgttttatgtcaggttgtattttggatgagctttctgctccatctgatttgctttcgattgtaagaaaggataattaattcttcatgttgaataaaattcttaccctcttttctcgaaaaaaaaaaaacttataatctacgtgttatattattattaatatatttaaattaatttnnnnataaaaataaaaatttaataatattaattaattttaaaaaattttaaaaatataacttaaggaatattatttacgtattatattattattatcatgttaaaaattatgtaatcaaaaaatattatccaattaaaattaaaaattaataatttaacaagagttaaactaatattaaaattggtgccttgttccttgatttgcaacaacaaagacttattttttaacttgatatttgttagggattatttcataaatactaaaaaaaaaaattgtaaataaaaaaaaagttcataaaatgtaaaaagaattctatttttaaatatattatgtagaataattagcttttttagtccctgtacttatgacactatactatgatgccccttaatttataagtgtagttaaaaataccccctaaaatatatcagtt

SEQ ID NO: 17608 - DNA, 1514 bp, Cannabis sativa
ataataataataatgtaatatttaaatgatataatatttatatgaaaaaaatgtcaaataaaatattaagtcatccttttttaaaaaaaagaaaagtcctagttccaacgaattaaataaatggatagaaaaatttccttgagcattgttatagggtactttaaaataccaaacactatatactattgtgttgagcacttaaagaagagacaaataataaaaactatccaacgaattagtttgtttttcccttttttgagagactgaaggaattaattactgatgaattgttttgttttttctagcatggtatttgataaagtctcttctttaagtttagtggtttaataaatttgacaaatattcatataaatatatatatacataatttgtttaaaaaagaattatatgtttcgatataaatgcattaataaaattaatgcatattgatctgatgtgaagcagagccagaaatctgtcatgaaagaattaaaaaagcaaagaggagatttgaaggaacttagagatgctgatgaagttgagtttgacaaatgaaatgaattttgagagggaagtttaatcagaaagtttggtgcatgcaaaatttgtaagcacatgttggtgaaaccatggccattcaagacagttaccaatctcctacccacacattacaattaacttcatcactatatataaccataagactcatcatcttgatcactccattaatacttgagtagcccatatacagcctaaacccttattgtaattacttctgatggagaagtcacgctcaaaatctgctcttaaggttgtgacaaatgtccactatacggtctagctagcttcataattatttttttcttttttataatttatgtatttatttatttattttttttttgaaaatgctagcttcattcttttaaatagaaatttattatattatcgtaataatttttttaatttgccttcatacatttactgagttttccattttctttttcttactatttgaatggaaaatgtaaagtttgtgaagagtgcttcacagtctgcagcttcatggacatcatcgagctccacttctagtggcagaggaatggtgagaaattaacatagcatttaatttcattgatcgagctctactagatctgctaaaccactctaataagtattatggaaacagccacatacaagtatataactatactatagaactagttaaggactacctagaatcatatacagtaaatattataagtccatgcgtgccaacttttgagataagccatgatttggtaactttaatctttttaacgtattaaatttaaatatttatgttggaagttaagttttatttatttggttatacgtgtgttgatgagtgtgatatttgatattttactgtaatgttgttagagagttccacattgccaatgtgtagaaagataatcgaatatataagaggaatgggctactcctcccattgccaattggttttgggatagaac

SEQ ID NO: 17609 - DNA, 12729 bp, Cannabis sativa
  modified_base (11045)..(11051): a, c, t, g, unknown or other
aaaaaaaaaaaaaaaaataagattccctttctgagttttgttattatgacttatgattgcagatgtaagagaatttagtacaataaatacaggaatgttaaaagagaagtgttcaatgtcacaagtgtcatataactattaagataattaaggtaatttaatattaaatatcacataacttcatttgatgaataataaaagatttcttaataacaatacagtaggtttgattagtgtagcaaaagtatataccaagggaaaggaaacatagagggtaaaagaaagggtcaaagtggaaaaggttgtcaaagattagagcattaagaaaatatataaacaaattatgagtgccagttgctcgctggcctgtgttgaagacttaactgctaaggactctattatttaaattttaaggcaacaaaacctcaatttgttaacaaaagaaaatactacaaaacatcaatagtacatacaacacaataatctttttgaagtattcaaaggcggcagcatgaacatgaaatcaggactcaagatttggtccgaaaaattcagcccgtccagggaaagcccaaacaggatcaaattcgggtatgtgcctaacagcttatatttccttatgaacactatcagtaattaaaaattatttttaaaaatacatataagtaataataaaaaaaaatcaaaaaatgtaatagcacgacagtaataatagtaatattattattgtaaattaaatataaaaaaaaatttattatatattattataaactttccaaaaaaattaataatgtggtctttatataacatcaatgctcattattttaataattaaatactcactcactgaaactttaagagccagtcaggtaagcctaattgagcaataaaaaatattaaccacattggaaatgacctaagaatgtaaaacaagaatgtcgtatagaatagttttcaagacgctgcaaataaataaataaaataataggattttttgttcctaaatttatagctacataaggtttttttctcttcagtcaagcccgtcgtccatccctgtgcataggttcgtcttggtcaagattgtatttttctattacaattcaatttttactactgtgacatgattttgagtgttttagtctcgtctctgtgacatggttttgagtgttttaatcttatttgtgtgacatgattttgttttgttttgtttcattattagttcttctttgttgccatcaaatggttgttagtagtacagttacataccttacacaataattgagtgctcaagctacgagcttgaataaacatactgaaataatttttactgttgtgtcttctgaacagtgtagatgaaacttaatataggtgttcttaaagttaacaactgtgatgttgcaatctttttcatctaattttatttttaatttttttatcaaacgatctaaaaataaaacggctaaatatttgactcgttttttaattctaatcctgaccgtgtctccaacaagagaaatatcccaaccattattttagttgattgtcattaataaaattacataatttattaaaaaacgtaaaattaaatttatgtttggtataatttttgatggagaacttattattaagtagatctcactttaaactctttaaatacttgagtttgagatttttttagtctctacctttctcatcacaaacctatcaagtgaagctcttacactgaacactcaacaatctcaatagctgctctaagagtctaaattaaaaagcacaaagtgattacaataataatctaacacaccatctccatttatctcacttaaaaatttacaacattagcattgatgttgcggtaagacttgaggaaaaagaacaaaaaaatttaaatagcattattgtttagtctgtatacgagcacaaaatgaaacaatgtttgtaatttcaaaacatgtataaaatacattattatcagcaacaagaaacacaatcccataggcaaacattgggatatttgaaacgaaacaaaaaacaatcctaaattaattcgtaaggtcacaaatgtcacactcacaatccaaccatgtaaagaagtgcgtaatcttcaaattaaaaattctgacaagtgaacagagtgagagatgtccggagagatttgcaactaaactagagatctgtaattttgtctttcaaatatgttaagacagccttggtccctctgtctaagattgtcctccggatgctacaaaatagatcaatataataatgaaaattgaatcatgggagtctcagcccacacgcaagaagtacaagtacaattctatcttctatcaaatctttattttgcaattgtttagtagtcatgctaagtactatagtctatagttaaattcataatctaaaccatatatacattaatagcaattttctgttaatggttgtgtggtttgtgtctaaatttcctaaccgaaaggctgctactcaactattgctgcctatatattgaagtccagcttcttctctataggaggtagcagaagcaagaaacatcttcacacaaagagtgagaaagtttctgttctatgatcagattgagaacttcagagaaaaagttagggcttccgggatttctattgagctacacaagtgagatgaatgtgtacagcttgggtaagataggaaaacacttttgagtttgtgagcttttctcaactgtgattgttgtactcctttgttgctgaccaataaagctaccaagatagttcttgatgtaggttcaagatcttcattgaatttgtactgagccaggataatcctgtgttccaatattacttttttgattctcagtttatgtcatcgacatatttggtgtttaccattgtctgatcaaatattagattaatgtcaggcttggcttctagttctctatcaccacagttattattcttattttcttggacattcctatcaatatataaggacttgtttttcaatatgcagacctcaagactaaataaatcatacagatacatgcacaaatgaataaataaataataaagtcacttaaagacatgctaagaaatttttccactaacatcaacagcattaagaacatgcttctcacaaccctctacccattttgatggtagggtacttagcactttgcctcaagctaaaaggctcgaggagcaaaaataaaaaacagaacatgcttctcacagaagctggaactggaaggaaaaagaaaaatgtagtgtaccttctcaacggatttccatcaagtcttaagacctgcaaactgggttcaagcaaaccctgaaaagaaatctactagcttagaataatgtaacaaagcatacctagataaaattaacttcacaaaatttcatattaactacgaaaaacaagataccaaatgttaatttcatatttcttgcaattactcttcatcacgtgtaagtaacatttgcaaaattgtatatttaaataggcctcttatagtgatttgcatcaagagcaaatatttggtttttcttatagcattgtgcaagatgcacacaataacttcacaacgaaatatacaagacacgtaattgcaagcaatattattacaaacttgttgaagttactgtactatgcttccaatacacaaaccatgaaaggcatcttatacttaccaactctgcgggaagtgctgatatgttattgtcagatagatcaagctcaacaagagaagtaagatttttgaatccctgtcattgatgcatttcaaagattagaaaactttctacagagaagatctatcaactccgaataagcccaattaacagcagatttcagattgtggaactttgctattctaaccacctaagtcaaggttaaaggtttatacagataaattttattcacttcccaagaaaattcccaacaacataaatagaaaaaatgagctacaagacactattaattgtgatccctttctttcctatttcattacaattcactttccctactcatatctccgggaaagtatcgctgcaatacagttacaccaacaataaactgttccgttatttactttctaataaatacaaatgatacagctactaattaacctggaatatcaggtctcacatagtgacatgattccaaacttgatgtcaacaaaataaacatgacgtgcaatgtatttgattcttagtggcaaatgtgttaccagtggaattgattgaagggaatttctgctaaggtcaagtatcctcaaattctgtaaactcaaaatctcagatggaacttcgtatatctgcatttgtctgtgaaattaaaatagatataagattacgatcatggatattttaaatacgtagatatgtgtgtatagttaatgatactataatttataggaaatgagtgggtgctgaaaatatatggtcgattatacataattttcctttgtaattttgttatctctactttctttagctttaacattttcttaattttccttttccggtcaaaattcattacaattttttatgaatactgctatgggatacctcagagaggccaacatcatctgacatgacatactgtcattgcatttttaatattggtcacacacacattctaatttaaagtgggaatattggccaacatcatctgacatgtgggactcaatattatgttccaccaagtgttgttggacatcatagggccttatagattatagcaatactcattttgttttgggttattttaaaaattaaaagatttctatgtttttttttctttacctttcctcttttctcctaataacaagcatatgtctatacacacatggacgtatatattttcagaaccattcattttcctataatatcattaactatacacacatatcattttcctataagctcaaataaacatgcccttcaatgtccccatatggacgtatgactggttttctgttgactgacctgaggtatagctcctgtaaatgtggcaagctagaaaatggtggatgctctggcaatgacgctgcattgccacttagatccagaacctgaagcatagggattgcttggaacccatctgatggaatctacagccatgtagagaaaaaagatgatcagaatgtacagctgtttgaaagcgtcacacatagcatagaaaaacatgcacggcaaggaccgggaagagaatccttcccttagaaaaaattgggcatcactgagtcagtttgggcttaatgttcttattcatcactaagtttgtactgtctagaaaaagaacccttgtgaaatctagcatgcagtcctgtttcctgttatacaattttctccagcatttaaaaaaaaacttgatcatcacgtaacaaataacctgtgcgtctgtaagatacaacaatgctgccttaaaatttcatttagttgtcctactgtggttgaatgaattcacattaagagcacgtgaataatcatattatcgtgtgaaaaatacttaaaccaggcaacagctaggctacttaaatgttcagaagttagattctgttcagtctgaaaaatagactgatcgaatgagccactaatgagaccagagaaacttttagttcattaacataaattctaatgctatttatattggtataatatgttaatttcacacttccattacgacgcataatatgtagtaacacacacacacatatgcatcaccttacctgtccaagtgaattactttccaatttcaaagacagtagattgggaagtgtcttgaaaatagcaccaggccattccttaatcttgtttctggacagaatcaaagtctgcaacattgggacaaaatttagaaaattattagttcacagcagcaagtttccaaataacctgcccatcctatcagcagcagcagcaactttctaacaaaccccttgccaaaacactcataaacaacttgaactttaagactatgaaaatagatcaaattaagaaagtatcatgttgtaagacttgtatgagagatatcaaatgtgcatctgttattttccatgtgtattaatatatatcataagtgtattacattccaaggtgttggtgcctatatccttgctatgttctttgtctctaacaatagatagtagaaaaccatgataaacttattaaccgtctccagccaaaacctaacctagttccggtttaaatagcacctaggtacccctaaacagccaattttctggtgtttcccagatatgagcagctgtggaagcagccccaattcattattgaataaattataaatttgataatgaaattagtagatttttaatgaaaagagacaaaagaaagcacaagttcatttactctggttacaacttttatttccaactactaagcgaacaagatatgctgtttaattaacttacattgagggatgtacatgaggaaagttcaactggcagttcttgaatagaattcttagaaagatcaactttaatgacctcacccgattcccatacttgtgagggcacagcactcaaacccaacccttccaatgaaagttcctgagagtaaaaccatttatactggtgtaaatgtcaaagtcaagtacaaaaaactatgcataggaaccaatagtgaattatgtgctctcctctagcatgacaacttaactataaaggagaaagaaaacaataagaaacactattcatcagtcacatgccaatataaaccaaaacatatgtgctaggaataaactgcggaagagcctttccggttcaaagaggtatctataatgatcagtacctttgaagttatagacaaccgagttgcctgcgtaatgacatctacttttgatgtagttgtgacttcagcttctgcatgaaaatgttgaactccattacttcacatagaagttagattcaagtttatggatcataaagctttgttattgcttcgagagatacatccaaatgcctacaacgttagctggtaaactcttatttgaattacccatgctaggaagaataaaatgataaactgagtgcataggctacttttgtcttttggtttggttactgtagctggatgagtgatctattaggagagcaagagacacaattggattagggattttctggaatgaacaaatactggagctgagctccagtgagaggccaagcctcttgaattgtttaacacctgtgtacttctcgttttccagatttctacattacagaaataacattcagcttactctttctctgtgtttctcctagaatctatcaacttcattagcattaagaaaatgtaatcaatgctcatgcatgacaaatacaaaccttcactttgaggcagtctactccgaaggtacctcaacaaagcttgtgtgggtccagaaaccaatgaactggaaagaaaacaagggcttaaattacagaagcattaaatgcaaatgagcaaggaaatgtctcatgatcacaccttcgaagtgttcgtaaagggttcccagtaagcaaaagttttcgcagggtggtcatctcacctagagaaagaagagccaataccaaaaattgtttgttaatccccaaacttcataatgttaagagaaacctggtctttgtgtgtgtgtataagctaattgtggttctctcaaaaagtagggagtatctatgctaacttttttttaattactgtacagaatcaaatttaatttgcttcattttaataatctaattggaaataagacatagaaggactgtagaacaaattgagccaatctttatgtcatagaaaactatatgaaacatgtggaataagctcttccccaaaatgatttttatgccttctaattgagccataatctaatccttattaagcaaaaaagctttctgtggctcatgtggaatgtggctcaataatctaattccaaataaaacatacatgtgttaatctgaaccatgtggaattaccaagctcaggagccaatccagtcaatgaattgtttgagagatccaggactgagagacgcaacttgcatgcctccactgggtactccttcagctaaaaagtaacaaacgattgtttagtaagccagtgttagactgcacaatgccttaatgaagtcagtttgcattatttaattgtttgtcaccactgagaggttactgagttttaattgacctgtttatcattgatacttatatatcctgattttaaattgctgctagtagagaatgaatgagtggcttaacatagaaaattcaatttcacaattaacagctacctgatttgaatgaagatcaaacgtccctaaatgagagagtgtcccgatttctgctggtaatgttgacagtgcattatttctgaaaattgatattgatagattcgataaatgccatagatgtgaaatgatagaagttttaaaaaataaatgaaatatgatcgtcacagcatataccccatgtagaactccacaagggaacaacaaccagttattgatgaagggacagatgaaattcctgcgtaagttgtagtattatgcaactaggaatgtgtttatttgagtttaaggaatcaatgaaaaattactgaagaaggtaactaataattactcactgttctgatggaggtcaagacgaatgatacgtgaaaggcatccaatgctctctggtatgctactcagaaaattttttgctgcacagattacaactcactgttatatgcacaaaaatattgagttaaactcaaatcacaaggagttgacaattacatgcattgagttccgtaagctgggtccatgatgcgatcaaattatcagatagcatagttagcttgtttgcctggcattgacaaataatacaattcacatttttgagccccaaataagtcattcacaattgcttctctagtatataaacaatcctataagcagtgattaagtgctaaagctacagaaattactaacctccacatctagtttactcaattttgaacaattcaccatatcttctggcaaactggtgatgctgttgtttgatgcctgaaaaagagttaaaaagggcagcttttgttgtagacagtaaaaaacagaaagcaaagtaaaaaaaatttccttttctaaagctagccagaagtaaatttaagaactctggtgtataaagcaatacaattattgcaaaggctgatgacaacaggccaatatcaattctatcttccaaatcttgcatttatactaagatccaaaatgagaagaactcgtgtgttaaagtgggatggccatgccataattagaattctacatttatcatcctagcagaaaaaagctcaccttcaagtctgataagcccacacatcttccaagtgaggtcgggagttccgtgagctgattgtgtgaacaatcaattctagaatcaacacatattaaaattgtataaataacaatttaaattaagtttactcctaaatttaatagcagagacaagaacaccaagaacattatattgaagaagaaacaaaatcaacttcaaacagctgtatcctatctatatgttgccatttaccatcacataatgcaagcacaacgcttaacaagggtggtaactactcaacaaaacacatgagtttcatgtaatctcgaaaattacatcgataaatcagtaaaaagattaagcatacttgtttttctacagcacaaagccacagagataagtgaagcaataacgccactcataaaaactaactaacgccacttgcgcaagtggttagttgcctgtgcgagatcaggtgcgtatatcttcatgttttgttggattgtgttaagaagagagagcacttacttgacaagtgatattgcagacccgatttcgtcgggtaattgttgtatcgagttaaaggacacatccaatgattttagcgcgggaagcctttaacaattttaaaaatgttataaagatttatgtaccaataggtgttctgtgttaattagagaaaatgcatgcttaaggcaaacaaaacgtcaagaaatagaaaactcactctccaatggcagctggaagctccgtaagtttgttgtggctgacatttaagactgtgagttgaggcaaatttctcaaatcttccttcaaaactttaatattgttgtgagctacaatgagtttttgaagctccacagcctgaagaataggaagaaacaaagccattaattccatgatattatgagatgaccgtgaaacacttcaaacatctgccatcaacatttataaaatgtatattttaagaaaattttggagatctacctcccaccacttctcgccgtcctcaactgaatccaagctccggtagacctcgttcggaatttctctgcaaatcgaattgaaatacagttaggtcaattaaatcgaaatctgacggtttaaaatggaggagagaaataacatacctgagagagcgatttgagaggttgagggaaccggaagctctggcagctttgaggaggcgatccatggcagtaactggtaaggtaatggatgaataagcttctgatttcagatctgtactcccaaggacaaggagtgtggattaagcgccaaaggccccattcttactcttctgttctcccgctacaactttttcacagcggttggaccatattaaggagacaccaaatttagtgttacacaacactgtcaaaaattaatttttactccgcaacaccaaaaattttactataacatatttcttattattatattaatttttttaattaacaaaaattaatataattattatatttaactaataatttattagggtacgtttaacatttttttttaatcatattaatataacacattatttacacatggataacaagcgacaaatacacaaggtttttttttttaaataaaatcatactaaatataatatttatttaattattaaatactattattataggctaatttgtttgtataatatttttttaggctaattaagatttttttcatgtaccaaatcatgtccgattgttaaatttaaggatttttnnnnnnnttcattcaattttactattttatgcttctaaaattttaatatctaccaaatcatgtcctattactaaatcgtgtctcctaaactttcatctatgttatgattttttttattaaaattagataaaagtctttaaatctaaccatctgaatagttcaaggtgaatttttaactaccttaaaagttcatgtgtcataatttagtatatgtcaaagaaaaaattctattatagctttttttttttaatattattatttttttttgaataatttttgaatattatttttgttatggttgttctagtaactatagtccctttatgttagtagtttattcttcacacaagatacgaattacatgtgattcaaataacataagtgatttgagaaactaaaagcgtcacaactcaactcatattaattttgccaaaaatcaaaaagatgaacaacgtacatatttttttactatatttatttttcataatcatatatactttatttaaaaacatttttaaatttgtaaattttttaaaataatttttaacacaaaaatataaaattcaaaatattttaatgcaaacgtgattattttttttatacgagtaacaaacgactatatgaatcttaatttcaactctataaattatttaatttttttttaaaaaaaaattacaaatggtcttaaataaaatacacgattattaaaatacttttattttaagaatcctgatagataaaaagtgtatgataacaatatacatttacctaaatatatttagaaaaataagtatttaaaagtttgtaacaataatgtgataaattgttaagaaaaaactataatgtgataagttaatttgaaataaaatagataaaaattctagaaaataatttgttgttgttatcaaaatttgtatttttaacttaattttgaaaaattgttttcttatttcttaaatttatttttaaaaataattttctttgaataatgacaaaatttatatttgtgttcaaaattatgtttttagaagtatggtgtaccttctagatatttactgttttattaatttatgtctatattatattaaatgtggttatataacagaaaatatatatatttttaaatatcacaatttaaattgcttattaattttatatttcatcttatattaaatataactatataatatacttttttaaattaaagtttaaatttgaacacatggtatatatttaaaaaataaatttctattatcatttttttaccgattcacatatttttaaaaaaatatttatattattactttagttttaaacaataaaatagaaaaaaatgagaaataactttctataattttttaaaaaataataaaaaagtgcatgatatttctataaattaaaagtaaatatattgacggcaaaatcacacgaactttgtatttttttgacatttaaacacgaaaattaattttttgaaggcaaaacctactaaactcacattttgtttttttttttttttttgtcaaaaatcctcacttaagtaccatagtagactgcctacatatacacaagaatatacatggcaaaattttagtggtccaaataattttaattttaaatataataaaaataagaaaaattacctcatatactattttttttttatttttttttagatttacggt

SEQ ID NO: 17610 - DNA, 5020 bp, Cannabis sativa
tacatagtgatttagaagaaaaaactatgtgtctcaacttgagagatttgaagttactaataaagaaaattaggtgtgcaagctggccaaatcattttaaggattgaagcatccttcaagatagtggataagcattttgatcaatttatgttgcaacaagagtagattagaagatgtacattcaggtaacagctttaaaattcttcaggaggtggaaataagtagtgtcaagccttgagaaataccaggtgtttctagcaattaatatggattgttttaacatagctagttggaatgttaggggaataaacaagaaagaaaaacaagatgaagtggtggagttttgtaaaaagaataaaataggtgttgttgctttaatagaaaccaagttgaaggataataaaatcaaggagatgttggattccaagttagttgagtgggattatttctctagcccgcccatagaagggagattgctgatcatatggaggagaggcttcttcagagtgattgtaacagctgaaactcctcagttggtccattcttttgtcaagagttccggtcaagaaaaagctttttgtattactttcatttatggattcaacaccatagatgaaaggaaaagtctctggtctgatctcttaaacttaaaactggcagcgaagccatgggctcttcttagtgattttaacgctgttttcaacttggaagataggtctggagggaaccccattcattacaatgacttggctgattctaccaactggctggcacaagctcatttggaaaaaatttagtgttttggttctaattttacttggaccaacaatcaagaaggcagcctaaggatttattcaaaaatcgatcatgcttttattaatgaagagtggggggacactttttctaattccatagcccatttcaattaggaggtaatttccaatcattgctcttgtattattaaaatgaaggctgttgtgaatataggaataaaactgtttcgattctttaatttttggactgatcatcctgattataagcagttggttaatgataattggaagtcgtttggagcagcttctaatttggagagagtttatttgaatttgttgagactcaagcataaactcaagcagtttagtaacaatacttttggggacatgggcagaaattttcaaaaggataaggaggattatttggaggctaagaatttggctcaattgcatcctagagatgaaagttaccaggtgaaggagaagttggctgctggtgtttatagtaatcaagttaaaatgtacaacaactttttgaggcaaaggtgtaagatcaagtggattaataatggagatgataatacctttttttttcatgcttgcctaaaaaagaggaagctggataaccgtattattgactttacaaatgatcagggtgaatccattgattatttccctgatgttgttgatcatttcatcactcatttgaggaacataatgggttctccaggtagcagttcaggcagtataaacagtgagtgtttcaacgagggtaggctagacttgaatcaacaactcatgcttcttaagcctttttcctcaaaggaaattaagaaatcaatgtttagtattcatgaaagtaaagccccgggtttggatggatttgggtctggtttttttaaggcaagctggtctgaaattggagttgaattgtgtgctgcaattactgatttttttgaaacagggagaatgccatatgatcttcatgccacagccatatcgctcattcctaagaaggataatccatcaaggtcgtggactacaggccaatcgcttgttgctctacaatctataaatgtatctccaaactgctttgctcaagacttgccttagtgctgcctcaaataatcaatcagaatcagggtgcgtttgtccaagggaggagtatagctcataatgtaatgattcttcaagatcttttgaagaattataatagaaagaatacttcccctcgttgtgccataaagatagacataagtaaagcttatgatactgtgaattgggattttcttgaaaacctgctaaatgccttccacttccctcaaaagtttgttaagtgggtgatgatttgtgtcagatcaactcattactcaatcatgatgaatggtagggttcaagggagcttcaaaggagaaaaaggccttaggcaagggggtctgatctcccctctgttatttgtcttaatcatggagtacttgactaagaacctgctccaagctgcttagaattccaggttcagatttcaccctttgtgtaaaagtttaaaaataattaacctttgctttgctaacgatctaatgatttttagcaaagggacaagccactcaattcaggtgctaaaaacagttttggatgattttagtagctcctctgggttacacataaatttggagaaatctcagatatattttggtggcgttgattcaaaggtaaaagcctgcattatccaagagctcaagttgtctgaagggagctttcctctaaagtatttaggagtccctttaagaccaactaagtggaaagctgaagattgtgaagttataattaggaagatcagacaaagattgtttacttggtcaaccaggcatctctcttttgctggccgagttcaattgatccattcagtgctagggcttcgtaactattggatgagcatatttgtgcttcctcaaagtgtgactaaagaggttgagaaactgtgtagaggatttctttggggtttgtccggtaacaaaagcaaaatccatgtggcctcttgggagaaagtttgtctcccgaaagcctatggtggtctcgggttcaaagagggagctaaatggaactatgctagtttagcaaagtatgtttaggctctttcatctaaaagagatattctttgggttaaatggattaataacatatacttaaagaattcctctttctggacttatgagctgaaacaggatacaagttggtattggcgcaaactttgcaggttgaggcttaaattttctgaggtggacatccttgctgccgtgagagctgggaagttcaaagcaagtagactgtataacagtttactcaatcagcagcaggtgatgtatcatagagcagtttggaattccttaacgctgcctaagcatcggtttctcctttggcaggtagtgaaccaacatcttctagctagagacaatttgctaaagtttcatgtagtgttaacttcagcaaattgcccagtgtgtgatcaagttgaggaagggcataagcatcttttctttgaatgttctttctatagtcaagtgcttcagcaggttgtcctttggctggggaagagagcttgggctgtggattatactggctggactatatggttggctgctggtagtttgaattttgtgaaggagattgatgttgctgtcttggcagcaacttgttaccacctttggattaataggaacaagtgtatatttgagggatactctaatactgttgttgttgtggttaaagagataaaaaatgttatgttgtacgtatagatttcaatcaagcattcatagatagatgactagaggggaaagggtatacttgaatagagtgatattgtaagtggggggcttgcgtctgggagctttttttgttgtgctcatgtgtttgtatgtgcttgttgattaatgaagccaattccttcttgatcaaaaaaaaaagagtagattagaagtacacatgaccattgtgtgatatttttgcaagctacaagataactctttattttgttttgtatgtcgatgatatgctaataacatcgaagagtaaagaaatttattgagaagttaagaactaaattgaattaggagtctgagatgaaagattttagagaaatcaaaaagattccattgccatggagataagtatagaaaaaatgcaagttttattttacaaaaaatcaatatttgaaaagtactgcaatgttttggtataaatgaacaaacaaaacctgtaagtactcctcttgctccttatttcaagctcagtgcaaaattctccaaaagtctgatgaagaacaagaatacatatcgaaagttttgtatgctaatacaattggtagcttgatatatgcgatagtgtgtacatgacataatatctctcaggttgttggatctactcagagtgtaattcatttatctcataaccaagtctttcatgcaagaatgaagcatatagatgtcagctatcatttagtgaggagattattgaagaaggtaaaattctcattttgaagatcaaatagctgataatcctacctacgaatatgatgattatagttttgacaaaattaaagttcaaaattatcaatgttccacattaattgtaaatgaaaatttagctcatacttaggcctacatatatgacccctacaccatttttaatcatcccaaaagttgtatacctactctttttgtaaatggtggttgtttactcaattttgtctaagttgtagttatgaagttatagtgcaatgatcagcgacactcgaaaatataagtaatttttgtgtactaaatttcataaatttctcgtatttttattttttctatttatttgtaagttttgtttggttttattttctcttttagcatattctttcaatagtattgttttttcagactagtataattttctatccatattgtgaataagaacattttaaggaggaaaagtatatgaaaattttccaacaattacatatactttaccttttgcatcccataagtaatagatattttatgatttttaacattttatatatagcatgatataatactattaatttgtacaattaagcataagatcgataaattgaatatttgtgagaccaaagtagagactagggtctacttcccttttttttttttcctaaaaagaaaaaacatatatatgttataaatattaataattttgtggatgtccaaatcttttatttattacca

SEQ ID NO: 17611 - DNA, 1873 bp, Cannabis sativa
gctttttgttcggttcaaaattcttgtctaatctttccttttctcttattcctctatagtttcttgctgggacaacaacggttaatctcgatgattttcaaaagacatatgatgtttacattagttttagaggaacagatgatcgatgtaatttcactggtcatctctatgctgcattgatgaagagtggaattgaaacctaccttcataatagggttgatacaacagaggagttctccaaggctgttatggatatcatcggccagtctaagttctgtatagttttgttctctgaaaattatgcatcttcgtggtggtgcttgaatgagctggtgcatattcaggaatgcatggaaaagaggaatcttatcgttttacctgttttttactatgtcaatccaagtgatgtgcgaggtcagaagagaagttatgaagatgcatttgtgaagaatgcagaacgttttgataaagatcagatcaagaaatggagggttgctttaaccacagcagctacccaatttggatgggatgcaaccaataccaagtttgttctcttctttaactttgttgttttgtttgtacattagttgttatcactcatcatatcattttagtttagccttttattatttttactaagttcagtttggagatttaactatatagatgtatctaatttaggaatgaagctgagttagttgatgaaattgtcaatttcataagaaggaaaatggacgaagctattatagatctcaacaagcgaaagagtggccctcctgtctctgtttcagttgattttttgctcaagaagatctcttctggtgtagtgagatttttgaggggaaagaatgactccgattttagtaggcttcttcacaaaatagagactaccttcctctctcttaatcaggtgcttggagacgctgagctgaagcagattagaaacactagtgttgagaagtggttggacaagcttcaagatgttgttgaagatgcagaggttttctttgaggaaattgagtatgatgcactaaaacttaaggtggaattggagtcggatgccgatgattccaaggtagctaaatttttatccagatttaacttgactaggcaaaaaagaaagtcagatttggagaagattctagagcagttggatgtttttgagaaccaaaagtacatccttaatttgcgaggagatgttgagaatatccaatcagagagactaccttcaaaatcgttcataaatagttatgagatttatggccgagatgatgagatgaacattttgaaagggatgttgctgttagataaggtgggtagtgaaaaaataagtgtgattccgattgtaggcatgagtggaatcggcaaaactactctcactgaagttgtttttaataatgatgaagttaacaagcattttgaactcaaggcatgggtttgtgtctcagaagaacttgatgtttgtaaggtaacacaaaatattcttgtagcattgactagaaatgcttgtgctgttgaggacttaattgtgttgcaagaagaggtacaagaattattgaataaaaaaaagtttttattagttttggatgatgtctggaatacagagttttgggataaaataaggttgctttttgaagttggtgcacaaggtagcaagataataatcacaacaagtaacatggaagttgcgtcaatcgttggaacgactggacctcaccaccttgagcttctaaaggaaaaagcttgtttcgagttgtttgtcaagcttgtatccgacaatgaagggtttaccacaacagattcatacttgggaagtattgctaaagaacttcttaagaaatgtagaggcttgccattggccgtgagggctatt

SEQ ID NO: 17612 - DNA, 4223 bp, Cannabis sativa
actaattataaataataatttttatgttgtgattaaaaagttcgtaactaaaatattagtcacgaaaatcacaatttattgtgactaaaaatgtttttagtgatcacaatattgttgtgactataactaaaactaaattagtgataacttatatcaaaatattatgttttagttataagtaactttttattgtgactaaactatatgacactgtgtaggtaataaatatcttcattttaaaatttacaaaaaaaaaagatatttttacactatttattacttattttttttttctaaattagttgtgttagaatttatacggagattttaaaataatgatgttttgaaattttgtatttttaacatattttgaagtgattatatttgtgtgttacatatatataacctttgttttgtaagatttagaatacaattatttatattatatttttctcgggtcatacccttagaaaagaagtttcattttgtaattatgagtaaaattttaatttcagttgttttttttactttaaatcatcatatagattataaaggtgtgaattagtttgaggagttttactttttattattactactattattataatatttattggctatcattatgtatgataattaattctctttcatggcatctaagagtttttgggtttacacaaattttgttttatgtggtaattaaccaaacaaatatttaaaaaataaaataatttcgacacaaatcaaactcactaaaaaaaatgtaattttataaaatgcaaatggtaaaagaaaaactaattaattttgtgattatttgttatcatgtttttcgtgattatgcttttgttaatttgtgtcaatcatttctaattgatctattctaatatagtaatatttttaaattctatatattattcatctaaaatcaaatttaatttgtaatttttttaaatttggaatattatatttttagaatatttatatacggtaagatattatatttaatttgatttataaaatatataattataattatataaatattctaattatagtttgattttaatttatcaaatattttaattaccaaatttaattttcttaactaattaacaaaatatttgataattaatatttgacagatggaaacaatttttctttcaacacattatatataataccaagcagataatatattcttttaggtctaattctctatatataaatatatatatatatatatatatttctattagagactactatactatatagctatactcttctatctcatcctcttcatcatcttcttggcaaaatataggtaatatattacattactatacatacaaatcatatttcttttttatttagtgagtatatatatatatatatatatatatgtatttattataattagctagggttttctcatctggttttttcgtgggttaagtatttgtaaatcttctctactttaattttcatgttctaaatttccaaaccctaattgcatactccctctctacatgtttctatataattagaataataagaatttgattgcttcctttttgttttattacattaattctttgtttcagatcaacttaattgatttgattagctatgatgtaattttgtgtccatgaataatatttgtgtgcataattttgaaaaataataaatatataatctctttttaattatttattattatttttttttcttcttaaatcttgtagcatattttatattatatggcgccatcagcattatcatcttcgcgtccatggaagaagtcttccatgaagaccccttgcgcggcttgtaagatactaagacgaaaatgcaaacgggctgagtgcccgtttgcaccttactttccgtcacaccaactacaaaaattctttgacgtccacaaagtgtttggcgcaagcaatgtctctaagattctcaacagtgtcctcccctcccagagggaggacaccgccaattcacttgcctatgaagccgccatgaggctccaataccccgtctacggttgtctcggaatcattaccctactccaacaccaggtcaactgcctcacagctgagctctctgactaccaaaaccgacaccaccttatcatggcaaggctagctgcattcaatgcacctacccgggcccacaaccaccgctacgagaatctaggcatcaatgccatctctggggctgcatcgagtgttgccgccccagagcaaatgatcaactatggtaacactagcagtcttgtagccgccatgaatggcggaattggccaactgagtcactttgagcaaccttgggctgtcgccaaggatgaccaccgcaccattaattgatgtaataaatcatcatattattattattattaggtacgtacgcttaattagtctctcattatttattgattattgctttaattaatggattattactattcaatttatttgttatatatagttaattagttaccaaaagtataataatcacaaccaaattaataaataaatagataaattataagatacagcatttatttatttattttttattttatatcattttaatttggaaacaaaagtacttatatatgtataagaaattcttaccaaaaaaataaaattacgagtcatatgttgagcatatgcatgtatattaattcattgatatgtttttatttattttttaaatacttttaatttggtgataaacttgaatattgtaattaaattaatgcatgtgcatggctaccttgcccatatattttatataggatatattattgacctttgtttcaacttgtgtatactgcagagttattttatgcacaaaataaagggattggaggtacattgagtttcaacattgctattagacatcttaaagtgtaatattatactgatgtgacgtgttgcgagtggttagtgatatcctaatatgtgaaacttgatacctgtagcgatatgctaccttttgtggtatttattaccttaagatgtcttttaacttttctttttatttaaatgttgaatttttaaacaatgttttattatttttgttgaaggatttgtgaataagttgatcaattgtgattgactcgtgttgtttgttctttcttaggtcgtcgtttataatttggagtttgtcccggttgattttcatattattttgttaactgatttacacttttaattattattattattatttggtgggattagtgggagtgatcaatttttcatacagaggaaacataattacctaatacaaaatgcaatgataactaatattgcatttaaaatatgcagtaaaatattacactgattaacaatatttttttaattagttagtcttagataaatacaattgataaaaaagaacctaacatatgtcactatgtgtaaatgttttatgcatttttttttaatctggtgcacatcattcctcaatttaaaataagtgttaaaatgtaatataacaataaatacaattagtcacatttgtcataaatgttactataatagactatatagtatataagtcacatttggtcaaaaaatttactttagtgagaatagatgacaatttaatttgtgatatttttttaaagaaaatgtaattataaatatatttagtgatatttaagaaatgtcactaatttctaaatacttagttttaatatcattttaaaaatattgctagaatatatcaataatgatatttgtaaaaaggacaccaaatattaaattaagtaacattttaaaagtattacaatataacaaaagaatagtgacgtttttaacttataataatttctaaaacttagcataaaaatgtatatatttcaaatatttataataaaattctaaatgttatacataatagcaagctaattcctttcatttatggaaaaatatttcgataaaataatttttttttttttttcagaaaaaacatattttacaaacttatgccttaaaaattgtaaaaaatgaaaattgcaatgataggtattaagctaaaatggttctgagaaggtcatttagcttaaaacttgtcttttcaatattgtgctagaaactgattaatttggaaataagttgaagaatatcttttttttttttttgtatccattaattaaaataccattttgggttttgcaaaagttacagattggaccttgtgttttgtta

SEQ ID NO: 17613 - DNA, 4109 bp, Cannabis sativa
ttcagatctgatgacgaagttgacactgaactcccttcagttagaactcagcaactccaggctctgatctttccgccattgatgactatcttcaagctatacaatcaaacctgtagatacaacaacaagaatagcaataactcccacgatgacaacataattaacaaactttacgatttaatggataaactgtttactgaatgagaccaactatatatacacacaaaacagttcacctggcactaactaacacttaacaattaaccgactcaacaaaacgctagtgcagatataacagacaaaaacttcagacacgactagacattgtacataactaaactgtcacaaaataatgacacttacagtttataacataaaaaaaatatcattatacaactaatatatatatataatcaagcatcaaaaaatatatatataatcaaaataaaaattaaaaatataacttaaatatacgtgcattgcatataatattaacttattgttgttaaaagagtaacaaacgaaaaaaataagtatattccatattattatataggagattttttttatatagataataatatctttgtaggtggaattaactatgttttatattatatgtggaagaatctcttatctttctccattatcttttttttttttttgaagaaaatcgtacttatgataaatagcaaatcagttagatctcttgatcattacataatagttctgcagagatagttgaaagcgaaatacaaccaaacctcttgtgagagaacgcccacttagttacattatgggcaacaaaattattaattctactaatattagcaaaaatacagctaataaacgaaggagaagacttagtacaaaaagaggtatagttttcaagtgcccaatgagactccttcccattaagagcgttgataactaccctcgaatcattctcaacaataataaatttggagccgagatcaagagcaaccgttacagccaaacagcaaaccgctgcttctccacataaagcattagaaaagtctaaccatgaagtatgaatccgaaccacctcgcagaggtgattccttgcaactactgcaatgcacataatgtggaaacacttcaaatttatctctctttccaatcactctcacataagtctttaactctacgatagagtttttagtagttacataaatattatatttaatgtgattaagaaaaaaaatattcgtcccacagtaagtgtaagtaatttgtggtaattatattacattttgtagttaccaaatcttaacaaaatgataaaattttagtaattaaataaatgctatattcttttattttaacaactcacactatagtggtatttgctaggaggaatgaaaacataagaatcgaaataagaatgagaatatgaatgaaataaaatttaaaatgcacaaaaaaaattgataaaaaaatcattaaatattttctcgtgttacattaaaatggtcttttctttcattttaaaatggaataatcattccactaaaatgatagaaagaacattcaaatactttaaaatgcaactaaacaaaagaatgaaatgaaaataatatcatttccattctattacctacaaccaaaagcaaccttaattctttgattctcttaactttatttttttctttattatctcttttgtgctttgtgcacaacaaatgttatgtgagttgtgtttttaggttaggtcttaattctttgattctcttaactttatttttttctttatcatctcttttgtgctttgtgcacaacaaatgttatgtgagttgtgtttttaggttaggtctttcattgaagaccccagctatctccaaaaaaaaaatcatactacactcccataattttatcattcttcctttggttttttatttttttattttttttgaattgacttgaataaatacataatcgaaagagtgtccataatcgaatggtccttgtagattttgaatgttttaaatttgaaaggatatgtgatagtcatttttaattataggctaatgaaaaaattgatatgcatttatattggttaatactatttgatatgacaaatataatttcattattccatgactcttatcaaaacattcgatagtagtatctatcaattaagcaagaacaaaagatgaaaatgaactaataatgttaatacttgagtcttgaaatataattaagattctaatgacaaagtagtacactaatactttataaaccaaaacaaaaagatcataattttcaataacaagctcaaaattcaaaatctgctaaaaggactcaaaatgcagaaagccccaataagcattttaatctctatttgatcaaaacttttctatgtttaatttactcaactaacttactttcttttattagctttgagctttgtttctcctccactcttcttcaacttcttctcctttctttctccatcttcaaccgctttgatagacgaatcatctgccttcttcttcatcttcttcacaattccatcttttgcctttgtcgatttcttcaaaggcttctctgcaacaacctcatcctccttaacttcatctcccttcttcctcttcttcttccccgaatcaccactgcccattacatcattctcaacacctaattccacatcactatcaactacatcatcaccctcatcaatgccttcctcttcagcattaacatccatataccgaacttcatgaattcgacccttctttttcccaactttatcctccttaccaaccttcttatcgccttcttcttccttctcaaccttctcagccttaactccctcaatcttcaacctcatatcgggcaatgcctgatacacaggcaatgcaaccgattccaacagcttcaaatgaaaggaccttacattcccccatttcctaggcacaaactctacaatcccattaatggcagcaaccacattctccacaatatcatcagaactcatggaagatttcgcaacccttacaacacaacaagtcccggtccttaagaacaacaaagcagagctacacgccttctcaatctgttctttccaattcttgtgcttcaaatccacaggcacaggaatcttcttcttcttgaagaattgcttccctaaaagtctaggcaacaaagtaacaacacgtttatcggccaaaaacatgtcatacgaatcacaaagcttgcgctttgattcaaaggctttgtaatctgttttgagcttcgaaagctttataactttcgacacaggaatcccttcggccttaatctttttcatggtgtcgtctttggtaagaccagatttggagctgtcatcgataatgaggcagagctcagctgattcggaatataaggagtgagctagagggaccttgtaagcattgacacgctccttggctgggattttcttcaatgtcaatacaaggtagacgaattcgtcttcgtctaaaagctgaggcttttgagtatccgatttcgaaatcttccatttcagaagagcttttacagccttctctaccgttttgggactcactcttaggtttgtgtttgttgaagaaggaggaggaggagctgaatccaccatagccattgctgcagacaagagaataattagggtttagttatagtcttatgaatcaaagtcccaacctatcaaaatcaacttcaaactcaaagttgtttcccaaaacaataaatttctccataataacaacactatcgatgatcaatagacaatcctagatataccaaaacacaaagactggtttttgaaatcaatataaatataaagacaccatttttgagggagcttaaacacacaaagcaaagagtggtttttgtgtatagactataaaaagtgaaatacctttaagctatgccaccggagtgaagagaagacgccgagagggagagaggtaagaagaagaagaagaaggacggctgggtagagtagagagagagaaaggtagactaaattttagggtttttgtaaatttagggtttttcttttctttattagtttattgtattatttaggttaaagaggaaggcttgtgtattgtctatgctaaattagt

SEQ ID NO: 17614 - DNA, 9595 bp, Cannabis sativa
ctgttgagtggtgtggatggaaacgctatttcagcattcaactgcattaaaaggaaggagaaaataaattgattgcttcttgctctcacttttttaatcatgagaaaagttgttctttttaccatgctttcataaaaggagatgcctattatgagttatgtatttttgggctttttcattgtatttcatttgttaatgtcaaaagaaggatagtaatgtttggcttatgaaatacaacattcagggcttatggatgaaccttgcaaggaatcagttgttttgtctgattggaaccagtggggcagggaagacctcagtaatcaactgtttgactggaataactccatgtacgagtggtgatggtaatatatgcatataatgtttgtgtcaatcagtcaaaactagtattggtaaaaaaaaaaatgtatctaactcttttacatctgtgaactgcctcaacagcattaatatatggaaattccatacaaagctcttctggtatgtccagaatccgaaaaatagttggagtctgtccccaggttatagccttcttctatccctggaaattttctttgtcatatgcatagttcaaagtttaagtttcacataaattatctgaaatctgagtctaacccttctttttgtttatttccatttgtagtttgacattctttgggatgaactatctgcagaagagcacctccatattttttctagtattaagggcatgcccccagcttcaatacaatctgtatgtacttaatgcacaaatatgttttgtccaaaagaaagaaaaaaaacacaaaaagaaagttctttcacatgaacctttttaagtccaagagtataatgcctagttcaagtgcctgctactgatatgaaaaacaacaggttatacaaaattctttagaggatgtaagacttaccgaggcagccaaagtgagagctggcagttacagtggaggaatgagacgtcgcctcagcattgcaatatcctttatcggtgatccaaaattggtcatcttagacgaacctgtactacctacacacattaaacaagctctttaaatcttcctttaataaaatgttttcacagttacttgacctgtacgttatctgatttcctaattgatctgcagacaactggtattgatccgataacaagacgacatgtatggaacatcatacagaaagcaaagagaaagcgtgcaattttattaacaacacactcaatggaagaagctgacattttaagtgacaggataggaataatggctaatggcaggttaagatgtataggaagctcagctgtattgaagtcaagatttggaaacggttccattgttcatgtgagtttcaaacaaagctctagtagaaaaactccacctcatactagagatgtagttgatacaactcgacaacaccgtgaggctgtgaagctgttcttcaaaagggtaatttgaataagttaatggtttgatttgaactttgatcttaattttaccgtaatgaaaggtcggcttctgaatgggatttttcttttgtgacagcatttagatgttcaaccaaaagaagagaacaactcctctttgacttttgccattcctcgtaatagagagatgctttttccggtaagcatacactcttctaatatgtttcttctagctagaaaataaaaagtgaaaaaaaattgaagattgtctaaatttgactcaataatgtgggcataaatttgaaacacattgtgcacgtggatgattgaagaggccactttattaattctgcgtattggtattgtgttccaatccaacacaggattgttttactcagctccaagatagacaaaataaattcagaatagcagactttggtatcagttttacaagcctagaagaagttttcttaagtattgctcggcaggcagagttagagaccgccatagctgaaggaagattagttactatcactttaacatccggactatcacttgaggtaaccaacctctctctttcaccaaagaaaacatattaccttaattaatcctacagctacaatcaaagaacactttcataatttgattattctaactcagatacctgtgggagctaaatttgtgggaattcccggaactgaatcggccgacaatggcagaggcctaatggtggaagtgcactggaagcaagaccaactgggagctctttgcgtctcaaaaatctccgacgaaattccaataccattgaacgtagaatcaatggctcctttggttgcgactccaagcagaaatccctcagacccaacaggacctattcgtggagttgtaattgatcccaatcagattactacatagtaactaatatgtcttaattagttagcatacttcagtgattttgagaaaaattataaacgttccaaactaaactatgactcttgtaaattaatttccggaatagtattttttgagtggcgaaaatttcaaagaaataagtaacaattgaaaatgcatccttttccattagaaaatagacaggtgccatataagggaacatttttaatgattgttgatgttgtagttctgaaaagtttctgccacgcaaaaaagttctcaaggaaatattagtatttttggttcatcaaccttaaagatgcttcttaaatcttaaaactatttattacttgttttgagagaatgattgttccactcataattaacaactgtataaaataatggattatgcaagttaacgatttcaagacatgtagggcaaggccagagctaagaaaacgtgcacagatatgctgttagtcacaagatcatgacaaacatcgaattaagatgcattgtagaatgataaccactatacaggatgtaccatgaacggccagaaataacgtcaaaaccaaacaaagggttttagaattgatgcagattgtttcataataaaactagaaacctatgatgtacattcactcgcaaacacccacagtgcaataaaattagaaaggaaaaaaatatctctttggctccacacaccaccctcttaactatagacacagtcacacaagtcacaacacttgaaatcacaaatacataaaatcaaaaactcccaacgaacataatttggcatttgtgttgaaactccaagaaacgagtgccattcagaatcaccttttccactcagtttgggatacctttcctgcaaaaacaatcagaggtacaatattagtacacaaaatcaatttaaattagctttcagatacatctatgcatcaagaagggagacaagttcctctagaacatcaatagcaaggcaaaaatagcaattaatctggatgaacacgcaacattataatgatcctttctcatcacgaaagctctataagcaacattatcgcaagttcatgctaacaagtgcaaggaaaaaggaaatcataccatttccctctctggagggcagagatctatcacttttatttgctcccttgcctccagtttggatcaatctctgtgttctcggtgattgtgagctgattttgttattagtggaagatggcagagagtgacggcgattcacactagttttctcagttgtctcttgtccaatcctaggggagccttgtgctctcagctttgcctttgcagattcagtggcagccatatagcttggcaatgtaggactgttctgtaccccattctctacacgttcttgcttggctggagttgaactttttctgccagacttctgattctccccacctgagtcctccttcaagctcaatcccccattttctgtaatagaattctcctcttttctggtgctctctgttaaaacatttgatttatctatcgcttgatcgccatgtaaattttcctctttaccagtcctctccatttgaggttttatgtcaaccatgggttgatcaccagatgataaatcagagactgcttcaacatcaggcaaattggatgtctctttcttttccttctcaatgaatatctctttcttttccttctcattgaatgttgtctctttctttgccttctcactagatactatctctttctttgccttctcgctcaatgcagtttctttctttgccttctcaccagatgcagtttctttctttgccttctcactggatgcaatttctttctttgccttctcagatgctgtctctttttttaatttctcactggatgccgtttctttctttaccttctcattactattactgatgtactgttccaaaccatcatgacttgaactggtaatttctttttcaataactggttttgcatgttcagtttcagcttctgatgggacagagttctctactatagggttatgaacctttctcaagtttcgtttgatcttttcaagctcaatttgtggattttcctgcactggctctgctgaatggcttgaaaccttcctaaagttacgtttgggtttctcaacttcagaaggtgcttgtgctgatatactttctacatttgcaggactaggtctacgggttctctttgacctgcttgcttggggttctgccatctgaccattacccagctttttgtgagactttgaatccagaattttctttggttgaggaaccggtttccaaaagtaggttgatgaccagcattccaaccagctggagacggaatttggttcaccagattcatagtgtacatacaaaggcatcacattgggtgatgtagcaagaagctaagcaacaaattggaccatcagatggagattatgaaagaatagcaaatataatagatggaagatctcgttagattttgagtaaaactgcatatatatttcttaaacagcagtaataaaactaaaagaaagctggcttagacccaaggattttatcatgtcagcaacaaaactacaattcgtttttccaactacatattactacatgatcagtaaatgatatttttattttaaaacatcgatgtgcatgtggaaatcaaattcataaaatctgagaagtttaaactttaaatgccattatttcatctaagaaagtagtgacttaaatgctctaagtctccaaagttccaacatggattcatggagaacctacatgcaatatattatattcataagaactatgcagtgtgaataataatgctgtaacatgaacctcaattagagagctgggctgatagctcattgccaatcaatgcatgcaggtaagaatatacaagtagttactcatcaaaatgggtacaaaacagtatcaataagcattgacggttcttggccataccttacgaatgaaagcgtttgttgacaacttttctatttgcacagaaaaatgaactccaaaaggatcgacaggctttcctccctaattcacattggaaagaaaattatgttaagttaaatcgacctggcttaaatgtgtttttaagatacagttcaataagttactccagaagtttaactgaatagtccaagtaattcaacactcgttacttatcataaaaaagagaatgccaccaaagacttccatataactgtgtatgcatctttcatttttttttttttttttttgtgacattaaaccaatcatcgattaaatgatctaagaactgaaatcatgatctcatattttttttctgtgatactaagcaaattatccaacaaatgagcttagaactgaaagcatgatccgcctatactaaagcctcctcttaaggtcttaaatctcaatacataaatgaagttgagatttaagacctaaatctcaatatataaatctcaattcatttctttgaagattatacttctggaaatctgaaagcatgacccatagccacctcttataaccacaatacattacatacgaaaaggatggccaaatcgcaaaatgactgatttatataacataggaatagtgacttttccatataagaaatttgatatttgtaagttgcattatgttaaagtgtgtgaactgtagtggttcattttcttttgaaaagatttgtcacgtcattgtattaatgtgatgagtgatcatatttgtggaaaatctccattcccataaaacccaattctttttttaccatataataatagtaagcccataaaagtgacttgcactaagaatgcatataaaatgctcttgtacaataatagtgtaacacaatccataaattcaccctcaatgtcacattttctgactcttttttggtaaaattgggtgacaccttgactaaccagacaatatatggaaaacaagaaataataacaatttccatatacgtacctaggagagactcaaattttagacattgtggaagaaacacaagcactattgtttgtgctatccctcttggctacatttattaacatatttcaaaaataagcaaggacaattaagaggagatacttacttgaggcatcactacattgcatttcctttccacttcaagcccaatatcagaacttctgacccttcttccacggacaagtgcttgaaacttgacaattcccagcatactggacagggtagcaacagcttgtctcctaaccaagtgccctcggataagtgcctgcaaccttatgatgcctttgagggcccaaaaggctcgccgagcctgcacatgatatgcaagaatcagtgcttcgtataatcgtaatttcaacatgagcagcattttataatcaagatatcatattgcaaataattcaaaacaaaccatttcacaaatgttgctagtaaaatcttcaactaattatatccatcaaacacaagagaaaattttagtaacaaagacagcatcttggtgcaatagcccactggatatgattgagcgttataagaattgttggttctataaagctaaagcacacagtcaaacctctcaaagtggggctcaatccctagtttaataatcatttaagcaagcaagaaagatgcagcttaataataaacaaatgtatcattaaatagacaataataataggaataaactacacattgaacaaattgaaataaaaatggaggacaaaggtgcactggctttaaacacaatgatggaataaatccatcccaaaacttgagtacatcaatgaagcaaaagaaacaaaaagtgttgcatatgaatatgataaaggcctcaactattaaacttttgtattagtgctagtacttacttaaaaatctagatcccgaccctcagtctactggaattctaagtttctggaatccaacagtttacaccaaataccagcataacaaaaacaaaaaataaataaaataaaataaaaggggcatgtgattaccaaataacctctgaaagtagcttgcacaagtgatgcagcttgctctttcttaatttgctcaggatcagttgatacttcttggggcatggattcttgagtttctgcattttcattgcttaacaatactacccccccatcaccagatgaaatatcagcttccctgttctccaagtccaacttcacttctgctctttcagtggtagtggtactagcgaatggatgagaaactacaggaggaactgaagtaaactcatctccagatgccttggctgcaaccaccacctctctctcatttgtagttttctacacatgatgatcgagagcatataaaaccagttacaatttacaaatgttctagtacaaaagaagaatatggcactcaagttgtctaaacatcatttttaaaagaaatatcagaatgaagtagttccactgaattaactttacatctagaattatatttaacaaaaaataaaaagaaaatatagtattacctctcttcctttagaaatttgactttttgatgacttcttcccaaagagtacagtcttgatccatttccctggtgattttcccattgcaattccaggatatgtatctaaaatgaaaaaaatatgaaaaaataagcccatacacacaacaaaatcataacagttaaatgacaccgtaatattaaattcaacaacaaatatagagcaaagagaaagtctcgttgcaaacgtgtgataacaaaatctcatcagacaagaaacaaataaaagggtctgtatatagcttcttttccacaaaatatttcttatatccaggtattaatttttaagtgactaaattcgaagaagagaagaaaaacaaattctgtgcaaaagtaaagacattaaaatccaggtcacatttttactgtttaatagcttgagtacttaacattaaaaaactgtaattattacttatgcatgccatcatctaaaatatgatacattaagatatcactttaatagatccaaatcaaatgattatgaatttgaagtccatttaacacacactcctctcggttcgggagctataaaagattagcctaatagtaaaccaataaaacagaaacttttcgcaattaattaaattcaaacaaaaaaacaaaatgcgacaaaaactcacagctgcataaattgcatcaattatcagcctaattccatcagcaacacaaccaaagtggaaagaaagaaagaaagaaaaaataaaatcagaaagagaaaaactaaactcaaccaaaatgcagctctaagaaaccctagaacgcacaagatctaagaatgcaaaacaaaaacaaagaataacaatttataacacaatccaagctaaaccttaccagatctgaagctcacctaactaatgcggcagttccaaactccaaatctaccattcctgaaaacgaaactcaaattatcagaacatcttctcgagaaaaaaaccatctgtgcataaatagatacacatctataaacaagtctaaaatgcttagatttctacaactaagagcaacacataaaggtatagatatagaaagatgaaaagaatcgtaccatgagtagggatggtttagagagagaataagagagcttcgaaatcaaggaaaaatgttctgatctaaagctacttcagttttcttaagctctcttctctgctcgctttactctactactctgtacctcttcgactgatgagcccaaaaaaaaaaattaactcagaaatttgaaaaataaatataaattggataaaatagaaagaaagattctgtgttgtaaagcctacgataaaacatttcaattctcacagttatcaccactggtttgaagtactttttgggatgtgaagtccaaaaatggagcttacgatggagttggatgtattggataatagaaccacttttgaataaaggaaggtggtggcgttggttgtcccgagtgcagttacttcagaaacaagtgtctagcttctttattccgaagcattaggcgaaatgacctttttcaccatggtacttgaaatacttaacccacgcgcgcgagtgtggatttgagagtcaactagtttttcttaaaacttaattgtgtaataataatctctttttttcgtgtattagtgcaataatctcgtgactacaaaactcatattattattaatagaaaaattagtaaatcttaccctaaactttcgataatactaattttatctcctaaaatatagggcttattaagaatttcctaaatttttacatctacagatttttaattctt

SEQ ID NO: 17615 - DNA, 5334 bp, Cannabis sativa
  modified_base (2052)..(2053): a, c, t, g, unknown or other
ggatatcaatttcttcatcagtttgacaattttcataatcaccacattcagttctagaacttctttatccatccagtgaagcaattttgttctcaaatgttctaaagtttgaatatctttttctagatatatccttacttgtaatgtttacttgctataacttaaggtcacgtatggatggtagaattgaattaaacatcataagaaaaagaacatagaagaatgagttatcaatgctaacaatatattagagattgtataaacaaaaattattccaagttttcgcaattaaaggaggattatactgttttataaatttttttcgatattttttttagtttcataacaaaatttatgtaacacaattctattctgcaaacaatatcacaagcatctgaaatatcggagtggaatcatcaaaaagtttgaaacatgatcacaaatgttttggctaaaattcttgccaacaatactctttacccatctcaacatataggtattaaactgtattagtgttggtaaacctgcactacaccagtgccattacattattaccaagattcttttctaggacaggaacttctcaaacatgcattttgacaatcttggcaatgttgacatgtgcattcaagaaaaatgaaagcaagtttgatcaacaataatgcaacagtacccttagaatgaaaacaaacacgattacagaactcaggtagaacaagaaagaaaagtaagttggttgtgtggaaaaggaagtaggcaaggagtgcaatgtaaatattgtctagaaatttttgggaaattataaaagtaccaataccaactacaatggttgttgatattttcttttataatcttgaataggtagtagttatgccaacttcttagaaggaaagcaagggaaatggtacattattagtagtttcaaactcttgtaatgacatttactttgttttttcagatacaaacatcaatcttttataactgtaggtactcaactgaagggttatgttatattaacaattaagattgtttttgagataaaacttggtgagttcatcaaggtagatatgctgttccaacaacagcaaaatgctaattttccaagtacttaacttggtaacttcagattaacattaacgtcctgctcgttagggaagtcataattaaccattattgaacaaggaattttgagaaataaagttacctttaactcttaattcataagcagctcggtctctcatcatcaaagcagcagcttctccattcagagggtcagatggattgggatagagaagcaattgtggtaggaatacttcaaacacatttaccagatcttcaaacaaaattatatacacatataagacccacaaatccaactgtaaaagcaatataagctaaaaaaaaacaacttgatgtaggacaagaaaaaagatttgtaaagactactgatttaccaaacatggggctccatgtctgattaattacatctaaacaaacagagcctgacctgaaattagaaaacgccaaaagaagggtgagatttaatttacttacagtattccattgtccaaaaaaaaaaagcacaagatattgacattattgaagactgatatctaattccaaaaaacaaaaacctcacatctcatcaacatttgggtggtagatcttatttataaatccaattgagggagatttataaggataagcatctggtaattctactcttatcctccatacacctccatggtaaggacctggaagaagccatcacaggttgaagaaatcaaattaatgataaattaaaataaagatttatgaaacaatgtttttgataaacaaacatatccaataaacaagagttgttaaatacaatatccaattccaaaaccagctaaaagatttgttattctggccaaataactttccacaataatctattaataggcacttttgaaaacttcacacgaaacaaagaatatatactttggacagataattagtaaccaaaacttagctgaaaaaagctgatttttttctttttctttctttctnntttttttttttttttttggcataagctgtgaaaagagaaaataaagatatgggtattggagattggagatttactctcactgggtccatgaaaatccacatagaattcttgcatgccatcattgatcatctctaccttgtaatcactcatcatcctataacaaaacccagaaaagatagaaaaagaaaatcaacacaaagaactaaaaacagaaaatccaaaaaagctaataaacaagacgattaatttagagggccaacagtttcatgaggtccatctctcggcgtttgcttggagaagacatgattttttttctttttttctttgtttggagagagaaaataaaaaaagcaaagtagtctgtttttgttggacaactgagagagataagcaaaaactattcagacataaatgagggaaggaaaccaaggagatagtaataataaggtgccaaatttcacgtaggccccaagttttttttttttattgacaatttaatattttttaacgaattttgtttaattagtaaggtaagaatatctaaatttaagtcttattataaataaatatataagttttaatttttcaagtaataatacttaagttataatatctaataatacttaagttataatataaaaatgtgtatcttgactattaagtgttaacgtaataatttttgattagtgtagattatttaatttttatttttttaaaaaaaataatttaaatatatcaataaaaaaatgacacgtaaataataatttattatttaacggacaaatatatcaaaaaatttaaaaatataatttaaataattatttgtagctgagttaaatttaaatattttttctcaaagttactcttttttttttcttctacagatttctctctcttaacccttttggcagtccccacttattcaaaattccatatttaaataataataaaaaaccatattatttttaggaaatgtgtcacatcaatttgttgcattttctatatggggagagcatcacaataagtttagtagatgaagattaatttcataagaaaataatgacatatatatttttttcttttgaagaaaattattaatgattctgtgcgaaggttaattaggatatgtcagcaagtgtgtccttagtccttgcttaccaataaaatgaccactaattattggtacttaattataaaattttatggttcgggtaatacaaatatattaataaatgctatattgttatttatattggagttagtgcaacttcacatcttattatatatgtttctaatgtcatttcaatattattgtcatttgtaaacgttatcttctataaaagaaaatatcagaatatattattgtatattgaatggtgaatatgtaatacataataatgttttaatccttctttgtattgttgtggctaactgtgatacttgtaagaatataggctacgatacattttaaaatacaaataatataatattgtccaacttcatttcgatacgtaattaacttaaaaattataatttatgttatagcactttatgtgaagacagtgtcatctatcctaaagattcctttacatattatgtatatagctaaatggataaaggcgcaactaaaataaaaaattggtaatatatttgtttttaattattatatgtactagtattttaggtacatagataaaaagttagatatgtttttctgggaaaatgatgtagcacaaatttttcaaactaaaaaaaatgtttaacacaaattttaagaatttttttaaaaaatttgtaatgctaaatataatttgtttcgatatttatttgtctatgcaaaaatgctagatggaatgttgatactttcaaattaaacgtaccaaaaatgctatctgttcgaagaaaaaagagttggtgtttgataaagacgaaaagtactctttttttttatatatataatttaaagacgaaaagtactcaatatctcgttctaaatctagtgcttctagtaggaaaaaaatgaacgtcattaagggagttcttaagggtgaatgagtgggtattttggataagggtgtggagcaagaatttattaattattttgaggatttgtttacttcagataatccctcggcagatgatatgaatcaggttctcaatctggtctttgctaaagttttgacagatatggttggttttcttcttgtgcccattaaaaaattggatgtcaaatttgctcttttccagacgaatccttataagagcccaaaaattaatgggatgggagttggtttttatcagaaatactgaaatgtgattggtcctgatatttataaggctgttttgggagttcttcaaggacatgtttataaggatgtttataaagcatataggttcttcttcttggaagcttcctgagatagttgtgtccggttcaaagaaatttttggttggtgtgagagagtgttaggccagttggtaaattatttggctaagatttccatctatgatagaggatgaggaagttatggcttcactttgggggttagtagagttctatgccatgagaaatagctaggtctctattgtattacgaggtggagtaagtctagtttattttaatttatttgtgagaaggtttggagtaaatatttttggttgaaaggcttaaaactctccttcagcggggggtcgtggtgaggtgcttctttaatcgataatccaagctatcctgacttatgctatgaatcttctccattttctcgtgaagtgggttgacgagctccatcgaatttgcgctagattctggtggggtggtgattgtgataactggaaagtgcactgatgtgcatgggagaggctttgttggcaccaatcaaacgaccgtatagggttccatgccctcttcctttttaacaaagttttactagccaaacaagcttggcgtctctcttccacgaaaggtatttattatccaaatgggaattttcttatagctgaggaaacttgtgaagagtcttttttttggaaaagtattgtttggggtagagagctattggaaggtggtcgtttcgttggcttattgaatcgtgaatatagaagatcagattggattcctaagacgtctacaaccctctcatattcttttcgtcctcttctgaatgtttctttggtcagtgatctcttgttcatggccggctttaagttgtgcaattgcacagggcctaactaaataaaagccaaaatttttatcatttttaaatttaaatctttttcagttt

SEQ ID NO: 17616 - DNA, 5546 bp, Cannabis sativa
tggcttaacataaactggggtcggtggtggcttaggtttctccacatgaggtggctttacgtacactggggttggtggaggcttaggcttctccacatgaggtggcttcacgtaaactggagttggtggaggcttaggcttctccactggaggaggtttctcgtaaactggagttggtggaggcttaggcttctcaaccacgggaggagggtgaggcttgtaaatgggagcctctggcggtggcttttgatacaccggaggcttagtagaataatcagccagagttgattgagtggcaaatagtgccactccaaggagcaacactaagaagtgagaagaagacattgtgtttagtgtgatatttttgttaggggtactaaatggttgtttttatagcactaattggagggctatgtcggcagtagagtccaaaaatcttatgtgtgttcatatagagaagtcaaatttgtatatatttcttaggttgtgaacaagatatccttttaggtaactttgggtcccattagggttgaaacttaaaataagtttggttttagttgacggtgcatggtgctatattgttatataatagcctttgaaatccgtctacatagacccttcctacaaaagtatgtgatggctcttgaaaaatgacccattaaattaacttttaatgttctcttaaatttggttaaatattattgagaaaataataaataagagcactttcttttattggtgtttccatattaagagagtttctcaatttaatgattatatatgtttagttatttaaaattaattttacatttaaaataatttacgagaacattaaaaataatattaattatttattaatatacatataattaataaaatattaaaattctattttaatattataaattacatgaaattttctaaatatttaaactactataattacaatgtatatcatcataaaataaaaaatatatattatactaaatgaaataatcttctcaattctaattgtcaaactaggtagatagaaaatttaccgaaatatagagaagacttttctaatattataatgttatctaatatattcttacgtacgtaattatagtttaataagtagtgttgaacatctagcaaatttattaagcataaaattaatactaattaatgctatatatatatttagttagttacataacaacacttttttataaagatttactttttggccaagaaattaaactttatataaagttaaatgtgttatgtccatttttgttggctgaaccatggaagcaagaacttgctagtatcttctgacagaacagaaagattatcttatcaatgaatttcctcgatcaaataaaaataattgttttttagctactacgtacactatggattttttatttttagaaagagaatcacctgaaaaataaagtttaaattctgaaattattgttatattaatatgtatttatatacactgaagtatttacgtggtgtttcgggatcggagagtattttagattaatttttttataatcatttacattatttataaatttttaaaaaatttataatataaaaaaataaaatttaaatattttatgtatgattattttttgtacgcataagttttatttttaatattataacttagtcgaaatttttaaaaaaattattagtgattttaaattaatagttataaatacacacatcataaccaataaaaaattaaatttttttataaatacgggaagagaaaaaaacttactaaaacgatcttaaagtatacttaaagaaaaaaaaagtataattacagagtattaatccatatatataatatacattaggtagacttaaactgtacaaattaattaaccgcatttagatataagtttatggtatgatattgtaaataagtagaataactcatacaatacttcataaataattttgtatgaattatatatgtgtactgtagatggatccatctgaaatattatatgtatatttttgtatggtgaagaaataatgtcaggatgtttccgacacatgcatgtaatatatgtatgtacgcgtatttcaagatatcatatatatataatatactgtcattattatatatatatacatacaatagaagacgatatagttgaaattatataactcatccttattacatttttatatatatataattaatatgcctagctagctagtttcatcatttcatgttctgttgactatcgctattatagtattacgtactatagtcaaacaattcagctgtacgtactatttttttttttaattaagcatttatatattaagatacgatctaaatttaaaatttttaacagataagaattttcttatgtcatttgaattagttcgaaagaactacctcaacaccatgtttaacacttgagctgtacatactaacctgtatatatatacatttatatatactcgatcatcattttgattccggtgaaaaaatatgagattatttcacatacaagtattaaaataaaaataaactttaatgatcaaaatatttttatcgactcttatatattataataataataaatagtaattttataaaatttttaaaaaaattatgtatattttaaaagatattttttttttatttgagctcctaaaataaatgagtctaagtatgagtttagtcaaccttagcttattagggttgacaatataattttttttacttttagtaacaatagatttgtgattaatataaaaaagttataactaattataaattattattattattatgttgttattaaaagatttatggttaaatatattagttacaaaaaatataatttattgtgactaaagtatgtatttttagtcacaataattaaaactatgttagtaacaatttatatttaaatactatgtaatgttagtcacaagtaactttttattatgactaaaaattatatttaattacaaaaaaatttatattgttactataaaattattactaagtgcttaggatatactcttcttttatacatatataaatatatattttaataatttttgaaaatataacatacttttttttagtaaagaactttataaaattttttcttatatataataagatctagaccaaccaaatctcacgggtgattttgtatataacaataattcattttactataaaaaacatttgttgaaattggataattgtgagtgggtagtaaagtaaatctctttcctctctaaagccgaaacagctgacctatatttcctcagaaaatgatagtcacttaattaattactaacaaaatagtccaaagaagattataataattaggttcggtttatatactgtatatttaatataatatcatgatcaaattgtgtgggcataaatagtgatgtaaatatgggttggaatttttgatacacacgaaatcggtacgagcacaatgtaattacgaaaaatataaatttaaatacgatacaacatgatactataaattagtacgacacgacacaaataaactaatttaaaagacacaacatgtgagaagcccaaaaaatacaacacaaaatattaaaaaactttaccaattactaattacaataataatatgtatctgttaattataaataaatttaaatactaatacaacttaagattcaacattatgattttctaattaaattaatcttaaactaaatttgtatatatatatattaatttatttatatagtatgatataaaatttgagtatttataaataaatatttaatttttaataattttaattagttttttatataaaaatttgtaaaatattattaaaaaattatataaatataattaaaattagaaatatataaatacttcagtaattaactcaatattaattataaaaaaatatagaaaattaaaagatgaatcctagtcccgacataaaaatgggctagtttatttaaaaaaaatagattaacacgaaatactatagactgtaccaaatttattgtttaaaaaatattttttagaacattgttcaatacgacctacattttaaagtacaaaaaagaaaatatgaatagaacaacaaaacacaccaatttacagcaaatccataaaagttaaatacagatacatacttttttcaaagttaagttgtgtttactttagtgttatatatgttgataaaaagggtacttgactctaataaataataattagaaaaatgtctttatcgaagaaatttaggactcaattattataaggttacgcgtttcttgaattcccaagcatattttgatgggtgtgtgttcctaataattaaagacaaaattaaatggtcatatatataacatattaattaatgtcatgatttcatgcatgcaattaatactaccatataataaatttatatatatatatatatttatatgtaaatctgccttttcttttttcttctgtacccactaatctgaccactccacttgtgttggtccccctcatgcaaagagattctttacaagatttattttatatatatataatacaataatataattttggattggtagatagtccatttaacttattcatgaaatattttcatagatttatgtagtttttattaaataaatatctaaggctgtaaatataggattgatattttttttaaaaaaaaatataaatttaagtacaatatatgacctgaaaaacttgaatgcacgatttataaattcattcgtattaaaaagttaattataaatttaattcaattatttatatattaaattatataataataaaatttaaatattttaattctaatatattttttataaaaattgtcagcaaggctcaaatagaaaacccaatacttttggacctagtaaaactgggccaaaagataagagagtggctaaacaactcagcccaaaatagtaaaaaaagagataagttgaaaaatgtctcttttattaatcaattaactaaatttaccactaatttttatttaattgaaaaatacttctttttatatgtactgtacccaaaataccctaacatatagggagtcacatggagagtatcttgaagtgacaggagcaaaattgatacaatatttaaaaaaaagaggtaaaaatgatagaatttaaaaaagaaggtaaaaataaaaagaagacaatataaaaagggtatagagtctaatttcctcaaagaagaaacagtgggtccaactgtagttgagattcacgaaaacaaaagggagaagaacatgactgaagctgaataaaaaattccagctcacaaaaagatagctcgagccaaccaaaatggctggaggatttcgtgatgatcaagcgatgttgaggagcaagccgtgagccaccaaaagttattaggaagcaattcctttctttttccttctttttctgttttcagcaacaatataaacctttttggtaataagttttggttgcatgttatttgtaagataatattgcaattgaagattgttcct

SEQ ID NO: 17617 - DNA, 5384 bp, Cannabis sativa
  modified_base (1286)..(1296): a, c, t, g, unknown or other
  modified_base (4200)..(4201): a, c, t, g, unknown or other
tcaatttcgaacatagcgggtattttcacaccctttagcttccctttttataaatggggttgaaaaaactgcctctaaaagctaacattgtagtagtgttaacagaatattttaatttattttttaaggatatttaatttaaatttaaatacataaataccatatatatttttaatctgacagtgtgagaatttatttgtgaactatttgataatacttcaaatttattacggttagtttctttctatagaatgaattcaatagtgatacagtattagtttctaattaataatgaagtttattttatataagtgattatgtagaaacttcatacatctttatatctaatttaattaacaaacaagtggaatgaaaaaaatttattggtatgatatatttttttaaaaaaaaatttatatcaaacatttaattttttaatataataatattatttatttgcatatatataaccaaaaataaaactgttattatagttttcatatattaaaaattattgggtaggtagaataattgtttttaatcattatttttatagatattttttaatattttctatataaataagttgtgaagactattttcttcttcttaattttacataacctcctacaaaaataattctgaatatataatttggattagaacaatttattattgcaccagtatttatttctatatttatatctataatttgttgtttggatcttaattttaacacttttttgttatctagaatttcttaaaaatttgagagatataactatattatacattattaatattatataaaataaatgaagttgcaaggttatttatgtaaagaaaatactaaaattacttataaatataaaaatatacatatatgtatgaaaaatattttatcaattgacacgaatttcatatgaacacaagtcaaggattccggaaaaatattattctataaatattatataattgtatgaatttttaaatattttacgtacagattatcataagcttgttttacaaaaatactatttgttatttttatattgttgcttgagctcgtaaaaatataattaaaagaaaccttaacataaaaaataaaaatgactattttatttttatacttcaaaacagtttttttttaatgtatttttacgaaattctacttaaaaattcatattgcaactagtgctgcaatctaaatcgtaacaaataatcgtattgcaacctacatagaaatcaatggagaaacccgtctagaaactcaaaccgtaaatttnnnnnnnnnnnaaaattaaaaaacagtatatggggtaattcccctaaaaaaatgtaaaaatatatataaataaaaaaaaaaaattgagagataataaatatttaaattaagccaaaaataataatttatgtaaaaatgggtaatcaaaacaataataatcttaccaactcttgttctgaaatattgtaatggaggaatcgatctccccaaattggtgggtgaaattttgttgttggtcgaatgatgttttgtgttttgtcatttttttgagatgaagctaacacttgactagacattattcttaattaatgttttaattcacttagcttgtttaaggcaaatgaaataaaatggcattatatatagttctaccaaaagaaatattatgtatctacttaattactttattggtagttacaaactttattagttacttgccttcaagcattaattattgctattagataggttctttaccaaaaaaaaaaaatatatattgctaggtattaggtcattcaaaaaaaaaaaaagaaagaaagaaaaaataattgctatgagctaatgcattatgtgacattttgaaaataattgtgaaattactatgatgtataattattaggatagtattgtataataattatattatattttaaaatataatgtgagtttgaatgtcaagtaataattacaagtaaatttttattgttatgtttgacgaaaaaagttggtaattataatgtaaattaatattgtgtaatattattataataattagtatcattttgtaataaatatttaaaataatttttatttattacgattatctaattatttttgctacgtatttgccattcttatgttgataaaaattaataatacaacaaatttaagcatttcattaaattatgaataatactattagatatttgatttaaaagatgattcaaaaaatgatgtaaagaaaaaatcatatatcatatattcgtatatattagtttttttttatttacaaacaatacaagaaaaattagtctaaaaagatattataaaataacatcatatacagaataaaaaataaaagtatgtataagagaaaaaaaaataaaaatgaagaactaaatcacagtaaataattattatattttaaataattaattaaaattatttttagtatgtaattacactcacttctcataagtgtatgagaattagagagagtaattgaggtatctcaattatctccaattacacaattactgtgtaattacgtggctagacaaacacatcaaactatgcttgccgaccatcgatgaactgatcggattaaccaaccaaagttaacttcagtcattatatattgaacagaagtaaaagcctcaatgtatatatatatatatatcctattttcgattttgatcaggtggcttttcaaacgtgctctaataatttttaaatttaaatatgtgagattcaatacttagttatattaatagtaatactataatatattgtggtgcctaataacatttatctaactagttttagggtaagtattaacgtctttgatttacatttaacatattcataatatttcaagagagataaagatatacaactactataatatttgtgactaaaatttattataagaaaatataaacatcactaaaagttggtgaaaaaagagtgaaaatttgtgagtaaaagtacttttcatttagatatcttactatattgcctaacataatttcattgatcaacacaagttatgaaatatgtaatgttaaatataatatttcatctagtatatattctagaatatctcgtatatataatataaagtgtgatagttaatagtctcgtaatatatgtaagaagaaatatttggtaagttgtacaatttcatattatgggaatgtcaagtgtgataattctaaaattgtgtaagtatgtgactacacagttaaaaataacttaattaaatatggtttcataagtactacttatattaataaagtgcatttttttcggttgcccatcatttaaaaactctaagttaagagtaattcatttgaagtaatgtgtgactatttaatgaaaattgttagtttaacattattttattatttttccattaaagctaatagttaaaactaacatcgttaaattaattaattaataatttttttaaatatctaaatttaattttttattttattattattaaaatgtatcttatataattatttaattttttaataaaattagatagatattttatatggttctaaatttaagtttgaattaaacgtcaaaagaattaactaatattttttaataaatttattagtgattttggttaaattaataaaattaggtagatgttatatatatttatataaatttaaaattatttgaattaaattttatatatttaaacgatataattaaattagataattaatatttaaataataacaatatatacaatacaaatctaaaaaaaaaaaagtatacacttccaaaccttgtgtatatatatccgtacaaattcaatacctaataatttaagtaatgtcatcactcatcaccaatttaatttaatacagaattagagaatcaaacaataaaaccatctctaatgaaatatctaaaacttgtactaaatttcgtacaaaaaaataagtttgtgctatatttagtccactatttacaattgtactccaatgtacaaaatgtaaaataagaaaaaaacaattaattatattgatggtcattttatattttattgagaatatataaaatttattattttttattcttttattatttcaataatggtaatatagtaaaaaagtaaataaagtttagtaaaactcaatgaatcataataattagtgacattatagtaaatnnaaaagtagcatttattgtgggctaaatttgacacaatgttatatcttgtgtcaaatttagcacaacttttagcatgtgccaaatttagcacatgctaaatttagtacactttttagaacgccattgaagtatagtttttttagatgtgctaagagatgctctaagatggaatttaattgggaaaaatataaaaataagaatgagaatgaaattatgaatataaatgaaataaaatcaaatttaaaatacattaaaaaaattgataaaaaaattataattttttttatcttgcattagaatggtgattcctttcagatttaaaagttatttcattaaaatgacatactaatactttaaaatgtaaccaaataaaaaaattgaataaaaattatttcttttctattatattctattttattacttccaaccaaaaaataaccaatttttcatagtggtattctttaacaatttaacacatggctagtttctttctatctaacttgagggtaagttggaaatgctcaatttaacacatggctagtttctttctatctaacttgagggtaagttggaaatgctaccaataaataataatcaagattgcataataaataatatgagctactcaatatatttggcatgtctccctctctgtccctaatatagggtttaggctattgttatatcttcttataacaatagggttcaacatatcacttaagtgatactttatgaatatgttgtaagcaatttttaatatttaatataaataattgcggcataagtacttaaaattttatatttgtaacgggcataaatttaataattttttagcggtataaatacacaatattagtaaaatgtaatttttatcaaattttatctgtacaaactctattaatattttaaacatgagacatgtaaaattcaaattctaaattattagttcttgagggaaatatgtagttcatggtatttccaaaaattaactctagttacaaagttaagacactaaaaaaatacttaagtcgctaaaaaaaatatcattatttttttttttgaaattagcgtgatgtcattaataaaagagaaaactagacctcatggtcattacataaaaggttctccggtaacactgaaaccgggatagatccaaacatatgatgagcaaaggcccatctag

SEQ ID NO: 17618 - DNA, 4174 bp, Cannabis sativa
aggtcaacctgaaagataaatacatatatttatacaatacatacaacatcaaacccaagaataggctgacatgaagcagacaacaaggaatagcaaacttcatatgtcgccatctcatgccttaaatacctgatacttaaacatgtttcctatcaaagcacattaaacgtttactagtcccctaaaacagcaaactagacaagattctcagttaactgggaacaattactgacattgctattactcaaaacgacgtgtatcaaagttgcttgaatatattactgttttagaggggccacctatctgcttgtacatttaagtatgtagggagcaaaaagacaaatgtatttgattacctgagtttcaagcttgtagggattgggcatttctttttcctcccaatcctcccgacatggccttgaagttaatccccaacccggtctatcaaaagcagcaactgtacagccaacttgccgagacaggacccccatcacatgcctccaagagaaaactcctccaccaaaaccatgcaccaaaacaataccaaattgtccatctccttccacttccctttctatagttggataatttattttacgaacctcatcctctttaccagcatctagactaaaatgtggaatatcttcagaaaaaacaggagaattcgtagaaccatccaacaaaggagcatatagagatgagccatgaaattgattgctgtaactcctatgcagattatgctggccttttgagaacaaacttaaaggatgcttgtcaggttttgatcgacccgtagccatttgtaatgagccacagttcggatcagaattgagaaaggtagtagatgataaggaacgaggtggagaaccaggcaagctgagcttgtagtgaagattaatcccttggcatggaatgaataaactgtcaacatcggcaagtagtctaaccgaacgttccccttcatcacgagtattcccaaatggcttccgccttgtctcactgtcacttttaggggtttttcctacagaaggagtgggagatcgcgggactttctgataacttgagaaaacgttcttacaaagaaggacctgtgaacaaatggtcacagagaagaacatgttaacaaataacacaaactattgcttaattaataagttaccgcatcaaaatatactcctcctttctacaaagtggaagggtggttaagacaaattttaggaagctgaaatcgcataaattcatacatacatctatgaaaccagataaaatatgaaacttaaacgtactgcttcggggtcaacacggtgaaataggagcttcctccttgccctgcagcttgttctataagccactacagtgtgtccaagggcaaaaaccaccgatgatagaaacaagaccggcattccccatgacttttttaggtgaagcttctgtcttgagggggaagatgaagcctcagccacaagttgagaatttacagtaaaaacacaggccttgactgaaagaagaatgattgatacaaaggaagataaagtcacggttccaaggtatgggccgtgtgatagagcagggccatcacacattgaataaacacctacaccaaaaaccaatttgataagcacaaaatataaaaagtaatatataaaacataattatcataaaactcattccaatcaaagaaacagttatcatcagcacaaaaattcatttggatgtcattctcccccccttttaagttcatacattcctaagaaaagcatatagcaaaacaagagtatcgggtagagagactagagagacacagtagcagtaaaaagggtccaaatataaagaagtaaaaagacgacagtctaatttgctaattttcttaagagtacagaataatctcatcattctaaattaaggccttcacttacatccggcgaaaaagaactttagttaaaaaaaaatgaaacaaaaaaaaaaggaggaaaatctcaaggcttccccaaaaccagagaaagaagaatacatcctcatcctaatataacaccatcctttcaaccagatgatactgtggctacttcatataagaccgataatcgtcctctccaactgtattttatcgacagtgcaattcaggaagctctatcaggctgttcctcttcaagaaatcttaatcacacttgatgtttctgtagatcctcctcacaaacaaattcgagccgagataaccaacagcaccgcagaggattcccagtccaagacaaaacatcatagtgtatccaaaatagaagctggtctggaagaagccagacattttcgtctttacgtagtagtaatagattgaatacaagaacacaaagaaacagttatcattaaactcaaataccaatcttcgagtgagagcaattttaattcatgttcttccaaattaagcaagctaaacgattatttgattgcagtcataaacccaatccatcatgcaatttaagcaagctcaacgaacaaggatgttagcaaaccaggaaaaaatgttagtaacatcttcataaagctaataaaaaatataagccttcgacattaaacacttgctctttgccctgattttcagttaaaacaattgaaatggaagtgttaaaactaaaatttcaaaacacttcaaactcttcgagattcaaaacggaaaacctagccttattcatttactgtttcgacttgcaagtgaaaaaaattaaaaaaaaaaaaaaaaaatcacgatttgctctgaatacgagtttctaagaatgaaatgtgcgaaaattaatttaaaatctttatagaaactggaagacagaaatcttcaataaaataaatgcaaaagaaatgaaattaagtattaaacaaacttgctataaagatgaaagacagaaaatcatacaaataataatgagagatctgataacagagacgagaggaatatcggtaagagaactcttgaacgcgtatcgattcaaatgctctttaaaaccgtaacaactcacgcacgtaaaactcgagatcagaacgcaaggtaccaagatatctcctatagcaacaagcacaggcaatgatgataccaacagcgaaaccaccatcgcaaacataaaaaacaccgtccgtacacacctccgaagcttctcaaagaataaccctcccttggccatgataacaacgacgatccaacaactctcactctctttctttctctccctatctcgattgatcagacagcgccaaccaaacgcttttatgttggactctgcctaaaacaaactgaaaataaacccgaaaccctaaccgacgccaatgatgcaaaatgtaccggattaggcggcggcctatctgccatttccggcgacttcaacaacgaaatctttcagagagggctttcgtaaagcaacggctattccatacacggccaaggctagggcttcagaagagggtctctcacaggctgtgagagagaaagagatggcagagagagctttctaaccgttgtttttttttttttttgttgggttttctgatttgaattctctcctttccttcttcttcttcctcctctttcttgtttctctctcttctcttttctaggctttcatatatttattcttagcctttagattggatgagaaagttggtttttggtatcctacggctcaatatatcaacttcaaaaagttaaaccaataaccggctgtattttttattttttattaagggatttttttttctgaattattgaggaataatatagtcagctattaaagagttgtgcaatatctattcttgaaaatagaaatgatgttcaaaaaaaaaagaaatgtaaatagaaatagtttatgtatttacgtagtcagctacatacaatcttctctcaatgaaaagttatataatataatctatgctctaataaaaaattgatatattatttttctcgaagtaatatagaccatgcttttcttaacttatagtagtttgtattatttgaaacaaaaaaagaagtgccaaattcaattttttattgagtctctaaaattgtaagtgtgacatgtttatttattaggatcataagatatttgtaccataaaccgcataaataagtaatttcttaagaataaggttaacttaaatattttagattttatagtatcttgtatagtataatttctta

SEQ ID NO: 17619 - DNA, 4306 bp, Cannabis sativa
ctctctttctctttctctctctcaatcaacaacactgaagaataccctctactctactactcatcagtcatctcctctctcgctctatcttcaaggaaaaactttctctttctctgacttggtttgctttgaaactgaagagaaatactcttatcctgcgccacactttctgtacagtgtagagagggggctattttattttatttattttttttttttttttgcagctttaaacagttcaatgagatcagaaatataaataaaaagtaatgctacaaatttttcttgtataatcttttcgatgaaatattttgtattttttattaaaaaaaatggaaaaaagcagagcaaaaccaggtgaacacgaaaaacagtacagtaagctcaaacagagacaagagagagaaatctccttttaagaaggaaaatatatgtaccaaagttcaaatattgtaggattggagaatccaaatgtaagaatgtcaaggtggcgcattttagcacgtggattacgaggatttgcagggttctttttcttgttattttggttgagcattgcaattatataatttaagtaattaacgattttaatattatttattaaattaaaataagtgtaatttcatattaaattatactaataataataataataatattcacccaccatttctctattttttttctccctatatcaaaagtaatttacaaaaaaccctcaagtcaaattattttgggtaaggttaaaattctaaaaaaaaatattgttgcaccaccggcacatcctttattttagtgttttgggggataatatttgatttttatatatatatatatacggcatggttatttaaaataatttataattttttttttcatgaatgtaatttgtaaatttttaaataatttgcaattttttttaaaaaaatattaattaatttagagtactgaaaattaaaataaaatttaaagactttttgcataaaaaataatcatgcccatattgaaatttaattttacattaaatcattcaaaattttccaaaaataatacatatagtcctagactcctagtcctcctaaatgtatctacaacaaatataattataaaggaaatataaataggtaaaaaagttttcttgatggggaactaatttttccaataatccccttaaattaaatatgtttttcttatgtaaaaaaaatgttaaatttgttgtatgttaggccatcaccaaccatagagataccgaatttagtgttgtacacaacaccaaatatatggtgttatagactctttcatttcaactacaacactaaggtgacgtttggttgagaaaaataaaaatataagaataggaatgagaattagaatatgaatatgaataaaaatggaatggaatggaatataatttaaaatacacaaaaaaaaaaattgataaaaaaattaatattatattgaaatggtctttcctttttattccaaaatagaatacttattccaccaaaatgttgaatgagtattccattttgaaatgtcattctattctattccacttccaaccaaacgctacctaaaagttaaaacaaaacaaatattctttattattatattatattttttaaaaaaatatatataaaatagaatatttttttgttattatattagtttatcaactatttacatttttgttatttaagacctttgtagatcaaaagggatattctcgtaaaccttcttatctctttcgggattgagtaaagttttttagtttaattttattcatgatcgtgtatgttgtagttatttaagaccaccaataaattttcaaaatattctgaacagtttacaatgtgaaaataatgttcaaactattcattaccatgtgtataagaaaaaatagtcgcacatatttgaactttattttcagtattgtaaactattcagaattttttattaatttaaaagtgatcctaaataactacaatcacgatcttaaaaaaaaagataactaaaaaattctcatatatatcgatccggataaatggtctacctaaacatccatttaaggggtgtactatagatttatctaataataatatatatttaaatattaataaatataacgtaataatcacatatataatgaagtgatagtgtaaaattaggagtatatacaaattcatctaattcaattacaaccgaccgatctaatcccaaccaaccttttcttatcttaaaagtgtatcttcttgttcttttgttggaaaaaattgctgaattttaatctatattttactataaatatattatactatgtaattatagtggtgcaaaattttataatattataggactcattttacaattatttaatttgtcaataaataaataaatattatatgagatatgttagttaattttaatttaaaaataataattgattaccaaatttgttcttttattacacacaaaaatagaaattacttactatatttgcaactatacattaattctgttttagtaaaattaattgacttgaggggattgtgtgtgaattacggatttgagttcaggggtttaattattaacaagcctttttattatttattattttgataaacagttttttattattattattcgttattgttttcacctgctctatttagcaacaaacagtattattatttttgtgtttatttatttattttttttttaaaaaaaaaagagtgagaaagaaagatataatagaagtactttctgtttgaccgatcgtcacgcgtgcggttcacgacaaaaacaaaactgggaacttcagctagaccagtgttgacacgtgtcatcaccatgtctgatcaatcgcggcgccgtttctactttttcacacacaaattgttgtggctcccacatttttttttttcttctcattcaccaaaaaatgtatatatatattaatttatataaatactaaataaaaataaaaattaaaatatacaatacaagagacaaactgaactgctgagctggttccggagcttcggatcttgggatcgtttttagtgctttccttatcttaataaccaaaatgtaaaactcaattcttcataccatttttttttgtaagaattctttataccaaattaaatacatacaccttatggggaatcggtttctactcaaagggatatgtttctcttatctttttaatttcaccattcaaaccataataggaagccgagtgtgaacttctctaatcaaaagatgatagtgctagcttgcttttgttctgctttgcttcgagttttatatagcttccaatgcgttaggggggaggtctttaaaattattttatttctttatttatttagtttgtttattgtagtttatttggtgttgtgtaccttatgtttttagtgacattagttttatattttttgggggatttattcctttctatgctttgtgagccttgaccttcttgctcttttgttgatcgatgtagttgaccaacatttaaaatcatctcctagtgagattgtgcagttctttatccaccaaacatatagggctttaatcatagtagtcacccctcattatgtttaagcatactccccaactactactagtctccaactatatattattttcattgtattaaaaaaaattataactgtttgggtacatttttactttggcttatagttaaaaagtataaactaaataaaaattttaacttaattgtaagtaaattataaattattttaattttagaaatagtttctaacaagttctttagcatatttcaaaataacttttaaattaaaaataatttcttatttttcatacaaacaccatatttttaatcctaaaaacttacaaagaaataatacaattaagcaaaataaggtaagaacacaaatgagctatattagttcattagcaataatttgtctacgttcacttttgtttgaattgtgattcggacttatgaatatctagatcgcctatttataagagaataatgacaaaaaaaaaattgtaacggaatgaactaaaaatataataaattttaaaactatttattttggtttaaatgacactaattaaaagaaagaatatactaaaaatctaattaattctgaaaaattaagagaaaggagattaatatagaataacatgtagtgggtcacgtagcagattgagtgctttcctttatattaatactagggaatggtaccgcgcttcgcgcggtttttacaacaattgagaattacatatattaaaatcattttttattcatagt

SEQ ID NO: 17620 - DNA, 4722 bp, Cannabis sativa
tcaactaaaaaattaaaaagtaaaaataattttatagaacttgtttttgaaaaatatttttacttttctaattttaaaaacagaaaactaattaaaatagtgttaacaaaccacatctaaactatttaaatcagatttttttgtgagaattaattagagttttgaaacatgtattacaaattatatgaatgccgtaacataaaaatatcaacaaggttttgggctaatgatataatgtttcattagaatagatacatgaaggccgagttggctgtcctttcgacgatatatcctaaaaaaaaaataactttcgtgaaccactagccactagatttcatcgtatatagtgtttgataaattataaaacacacaataccagtatgcctaccacatcacatacaatatatcttttatttttttccggaaataaataaacacactaaataaaagaattagtcttgatttaatttagtaatatccaattttaaatattatttacaagaatgaactagctagctagttgcaatagattggtttgttcatcaatcttggcaaagcaaatagtcaaactggaggctcttacttatcaactaactcttttatgcttgaatcccttccactatttatgacaatatattggaataattatagatttaatatagcgtcgttgtcattatggtgcactataatatgtagtttctttactcaactcaactaaaggaaacaacccctccactaattcgtttattatttgaaaattaaagccgatccaagtccaaaatacaatgccatcgtgtccgcttttctctataccattattttttttaaaaagaaaatccaatttcattaatttgatatttactttgttatgtgtgatcaaaagatgacttatcaaaaaatttcactattgggagtgggccattcaatcgttacttcttttttgtggttggtgtctccttaattagcttgaaatttaaggttaagtcaaaagtagtacttgcacttgaaattcaatgttaaagtagtttaaattcatgcccattttaaggagaaatgttaaaaaatactaagcctaaattctcgtatatattaatattattattggtccaattaattattaagtcacatatagttcaatgcaataattttagagtatcgttagctaattgtaaaacgatacatgtgctagatactaatgatgtttaataacaataatagcaatgcttattatatatccatttacgtgtaaatgtgtatgtgtaggagtaggtgtgcaaattaatgctaacattatacggttgaattgttttttcaagtgtttatgtgaaaaaaacaaaaggttattctaccttagtttatttttggaagggtaaagggagattttcacaaaagaaaatgcttcaatggttggttagcatgacatcctcaaaacttaaaaatctactgtgtggtggattgagactctcctccacattatagatgaagaaaggcccctctttctttattttatttcttttaactatttcaccaaaacaagagaataaaatgatcacgatttcatatatactcctaagcttcatcacctttttttctcttagattagaactattgtttcaatcatagtttcatgttctctgctgtatgcttttccttctcaattctgaagtcagtaatactttttgaatagtttcagcttctatccttggtaaaattttcatattgcctcatgtaactaatttaatatgttttaaaacttggtcaggctctatatataacctttgtctctccacaattatgatttgagagtttcatattctcattgttctttattttttctcataataagaaaaaaaaatatcagtgtcctttttttttcaaaaaaaattattatttaagagaaaaatccattttctttgagttatttaggcttggtgcttttttagtttttactgtcctcccctattttgtttttgttccctccacaataatagagactttttttttttctcattcttttcttattgccttgatttcaagaggacattcgacccctctgattcccaatattatctcagaaattaggttcaggttgcaacctcgaaacttgggaacattttagaattaaaggggaaaaaaaagaaaaataagcctgctattcttcttatgtggtttgttctgcctgaagattcaactaactttaactctgtacctgtttgttgactttcaagtccatcaatcatttcaatcttcaaggccattcaattttcttccgaaaccatcattttgaagatcttcccttcctctcttcttctcagcttcatcccatcacatccttcaaagttctgctccccctgttcagatacttgtctgatcaaataccttaaccaaacgattttttctttttcttttttatttttattagttctttttattttggtgcttatttttttatctgggttattcacataatcatcacaaatgttgtctatgtaaccaatatttggtttgaaaatagtttatttttccttaacaatctggtttgtccatttgttttttttttttttttgaaagattcatcagtaaagatagctctcgatctaaagcagtatgtgttcagaaactagtccacctcgactatctttcgatcgtattttatgtcaggaccatccccacaacctccaaccaagaagagacacagcaattctggagttgaattgtgactttgaattcagcattaacatttgttcagaccaagaatcttcatcagctgatgagctcttctctcatggagtgatccttcccattcagcctcgtgacagagttagtagtactatcagtattccttcaaaaaaaactcaaaacagagaaatcccaagtctcaattctcttcctcctcttccttggtctgagtatcaatcaaagggagaaaagcttaaggaagtttccacttctgattttgtggtggagcagagcaataagcctcagtcgaccaagtcgttttggggaacattcaagagaagtaacagcctaaaccatgagaacaagagaagcttgctttgttcgttgccacttctttctagaagtaattcaactggttcggtctcatcaactcaaaagaaaacttcctcgtttaaggaggttaataagagcaatggtacttggcaaaagcagccgttgattccactggtgagatcatcatcgtcctcatcttcatcatcatcttcgtattcaacgatgcaaaagccacctttgaagaaaaattacggaggagggttttatggaaatggtgtaaggattattccagtcttaaatgtaccacctccctacattcctaaaggaactgcaaaactctttggatttggtaaagatagaaagagtaagaaatgagtgatttatttcatggtgaagaaaactaggcaattatatgttttagttcatcatatacctgttatggtttcaagctccttgtgtttttattttcttaaaatttttatatatgttgtgtcataggatggaacatggaatcttccaaggtgagagaatttcattcaaaagaaaatatatatatcttcagccaaacttaagttcttgtaaattatgaagaaaaagatcaccatattgaaaggcttggaagattcattcatatttaagtgtcacaatatttagagacaagaacaggaacccataatactgggtttgtcccattcgtgttcaaatatatatatttttttatgtaatattattttcttgtaggttctttttcagtcttatcagcttttaaaaggactttattcatatggtagatgccttgccatttatttatttatttatttttttttgcctaaccattttgtttgtaattgattgattaaaaaattgatactttccttgcaagaattgcgataacaaaattcattggagtgggtttgaaaaaaccaaatcacaaaacacaaccaaatgtcaatgtcctacactatgcaaaaagttcttgtctttattaatttttttagcttcttctgctcaactaattcattttattaaggaccatgtcttgtggttattcattagtatatattatatttaagtcatttttttcttgtacactttaaaatatatatatatttttttttatttttaagaattcacataaaaataattgcaactaaaattcacatcataactcacataaaaattaagtaacaatttaaaccataaattaaaaaataatatataaaataattccgctatatataaagcaaggaagattttaaaaacaaaaaaaatgtatcttgcaaacatagtgagagagtacactaccaattaagttggcttgatataattattgtcggagaaatttggacaacaccaaataaaaagagatttgatctttaattaaaaatagcaagtactcaatttaaaacgacgagtattcaaatgaagctacacaaacaaatggaaaagtaatgaaaacaatgaacacaaggaagtatagtggttgagtcagatcacggtctgcttagtccactattgcaaggatttatgtcttgttctattcctattggatcactcctttatatacaaggcaagtgttgctttactaacacagaacttgattgattatagaaccgttttacattaaatattaatattaaattgaaataaacataaatggaataaatgaagaacaatttaaatccgattcactaaatacaacaacgtatg

SEQ ID NO: 17621 - DNA, 2247 bp, Cannabis sativa
taattaaaaataacatccaaaaaaacaattcaaagttaagataatgatcatattgagttgacacgctgcaatttaaaagagaaaatacaaatttttcttaaacatagtatctgataaaaacaaggaggcacacacacacacctaccaaggcaacaagcttaagctatataagatcaaactaaaaaaacccttacagcaaaagtaagttcagatgaccaaattgaaccacaataaacaccccaaaataaaacacacaattttaaaaatagcatacatatataaagctataaatatatctatattagcgtaacacaaagatctaaagcagatcctctaagatgaacttgttgtccttcggcttgttcccaagaaaacactggtgagaacagttttggtctgcagtgatgctttcagtaaattcaacccctgcagtgatgcatggtcatgaaactgattaagtgaaacaaaataatatatataaatatgtatatatatatatattgatacctctttcaagcccaccgaaacagtcttctccacaagagagccaacttccttaacatgaaactgattaagcatagcaatactagaaatagtagacattggcttcacttgaagatcatccataatcatatacgtaacaacacccttaacaaaccctccttcatcaccacctaatgaccccggacccccttcgccgccaccacctgccacggcagccacgtacggcagctcatgggagatggcacgattacaagtaggacacatggctccaggcttgtccgacacgtggcgttggttacagttatgctgaaacggacacacgtagacctttttggcagctaatgaggaggcagcatcgtcgttggtcaagaaaagaagtagtgtttcggcaccgccgagagctgagttgcttggttttagaataatgtctttgttaacgttgggttgaatataggtgctgcttaggttttcgaagctctcgtaaagattaccaatggatcccaccatgccattggtggagaggagtcttatcacagtgcctactggcagagaaagaagtgtgaaaagaaaatcggcaaagtcttttcctgcttcagcgaaaagaaccctttgccctttggaatcgattagaagttttagtgtaactttcgacattggtggttttgtagtggtctccattgttgtaatatattattattcaattaactcgatattagtagtaatactttcttaaggcttgtttatgtatatttatactatagagaaatcgaaggagctataataatgtttgttaattaaaattggttttatttcccataaataaacgacatttgaaaagtccaagtggattaataactaataaatccgttggccatatatattcatgtacatatattattatcgacgatacaaaattttcttgagtaaacattagaaataaaagtcgatcggttgattttataacgaggcttattaaatacccggtttaaaaatgaatttacagcacattaatctatatatttgtacgttgaaccgtatattttcttattaattatacttaaaaaaataataaaatcggttaggattacaagagaaaagtaaaacaatattctcttcaccttcctactttccagtccactcgagtccctctattctttaaaaaaaaattgttacttttagtgataacttttaagtcacaatatatattatttttttgtgattaaatgtgattttaagtcacaataaaattttacttgtgactaaaacataatatttaaatggctaattagcattcccccgaactttgacatgtaacaaatcatgtcccttaaacttttttgtccgttaaaaatttccctgaactattcatattgtaagatttaaggagtacttttgtctaatttcattcaattttactgcttcagtgattatttatatactaaatcatgctcccagactttgatatctaccaaattatatccctcaaactttgatatgtactaaaaaatcatgccccctgaaattttatccatgttagaattttttaactaaaattagacaaaagtccttaatatatttagtcacaataaattgtaatttttgtgacaaataccttcaaccacggaccttttattcacaacataagaatgataatttataattaatcacaacttttttacttttagtcacaacttttgttgtgagtaaaaataaaaaaatttgtagtgactcgtcacttttctc

SEQ ID NO: 17622 - DNA, 3817 bp, Cannabis sativa
  modified_base (2421)..(2433): a, c, t, g, unknown or other
caaataatctaattagtaacttttgaaaaacataaagtttaaaataatatttaccctaataataataataataataatattaaattacaatatcacttcattttatatatataaagaaaatacttcttaggacttgtacctctaggctctacacttattaaatggtgtcttttgaatattttgaatattaaattttttttgaaactattaaaattattagataaaaaaattatttaactttactaacaggtgcttcacataattttattaaaactttgaattcaataattttagtagttaaaatttgagaaaaaaaatcataattagccttgaagaaaaatacaatatcaccttttttttcatcatccttttagaagggaccactcattcattttaaattttttatttttatttttaaggtatttatgacttttgttcttaagccaaactgcttcagattcataactatgttgtagaacttgcagtactattttttttttctgaataattttcctatatataattatgtacttattatacattaaattagaggaactatccaatggaggttttatatttcaaaaaaaaaaaaaaaaaagtttggagtttttgtgaaagtccaacaagtctctacaatatataatgaccccactccactcctatgagttaaaaagaaatttcccaacttaaaatgttgtcccaaaaatatacgtttaaatttcaatgttgacaaatattcataattttaaattttttcactttttcttcaagggaattttctttgttattttatctatcatagcaatgtaatggaaactacataatgctatacattatttcacatcctatttttatatatatatttttagaaaaccccatttttgtttctaaatcaatgaatacccccaaatccactaatactgaaatcaaggtacaaaataccaaaaacaaggaagtaataaaataaccatataaaagcaagcaaaacaaaccctaaagaattgggccctatatgaagagagatgactccaaagtaaagttgtgcccacaatgaataagtagagtagaggggtttggttttcaagtgtaaagaagctttgaaactttttgcagcaaataccaaagaactatataccccacacacaacacactcctctgattttcctttcttattattattaatattatttcttgaaatgggacacactctctgattttgcttccccaataaacctccatgatctttcaataaaaaaaaaatatataattaatttaaaaaataaaattaaattaaatctttcttctgctgtttcctgtgactagaattatcactatcagaatagctcatgaggctctctcccaagtacttacttacacacacacagccaaaggctcataaatcatagcaccaccacccacccctttcccttcttactgacataatcataaataaatctctacccacatttgttatatatatatatacaaatatatattattcctttcaatttaataaaaaatatatacataaatatggaagagtgcaaagtatatatacatatatatagtagagaaaattttaatacatggaatcattttgctatgtcaattggtgagtggtggtattcatgggtagcaccatgtggtgggtactatatgtcatgaaaataagaaaaggatcacacacacatatatagagacacataatacaaggaaccaacatgatgaactttaaatgttttttttctctttttcttttgacccttttcaagaaatttaaaaatatgtacaaattaatattagtggtttgattttgtaattcttaattttgatgatgatgatgatgatcttatctttcacttttgggtttgatgtacttgatgttcaagttagtgaattagctttttcactgctttgcttgtgctcttaactaatcataaagatacaacctctcaacttccatatataagaaagaagctatatatatatttatgtatatgaatatatatggttgccacttcttgggtcacaagcaacaatttttaggtataaaatgtttgtttatctacactagttgttgtttccctacattgaactaacctttatatatatagagaaagagaaatgtgtattattgctatttataattaagtttcaatttgtattattctgaaaaataaagaagcaaactacttgtcatatatatacacatgaataattaatttgacaccaaaagtactttattaccctatttcaatagaaaaaaacaacaagaaaattagactatattgattattggaggtaaaatgtggatgagaaagctagaatagaacaattgaacaaacactagatcacatatattagcataaacattaatctgattattatattcattatttggtttttattattattattatnnnnnnnnnnnnnattattattattaatattaataacggttaatattattttggactctgaatttaataaaaattaccgatttaactttctgttttgtaaaataataaattagattttgtatttttttaaaataatacaaaatagtatcctgaattcaatttttgatatattttttaatataattaatttgaagataatttttaacacgagcaaatatagaaaatatatttatttttttcatagcaactctagatcggattgatattaatttttattttgacaaaaaattaatttaaagtattattttgtataatttttaaaaaatataggaatctaatttattatttaataagatagattatttatcttaataataatataaatattgtattttttataatgaatcttgaaaaggtaaatggataaatatttgagttggagtttagtggtcatccactagtataagatgacaatgtgatatggtaaataatagttggatgatgcttggtatggtttaggtaatagttcacaaagctagttgtcctttaagtgcacatcacttaatctcccattaatttttattagttaggtcatgtaatattaatgaattagataaaaattattaaaatctttcattagaatattcttatatacatgttataaaaatattaatgacattaataataatattggcatatggtatattcctatttttattggccccactataaaataaacaattttcttgagaagaaagtttaggcaaaaattaaaaaattaaatcatgaaaccttcaaatatagatcataggcggccttatgctactagcacttaaaattgcactataacaattaattttttcacattatatatagagagataaaattaacttgattgtttaagaatggatcattagtcaaagtatatcattttccttccaaaggcattaaatacaaaataaaattgttaaaaaataaatgaaaataggtatgaagagaatagattggtactatgcttatgggttgtgattaggaatatatggttatgagtggtttttggtgtgacaaaaaggcatatatatacatatgtatataggtagtgggtatagacaaatagatatatataatctaattaggaataatcatggaggtgcaaaatattattgatcttgttgtattgttatgtattgtatatgttagttatatatataaacaagagagaaattaaagttattttattagtaaataaatataggaaaaaatattatttttgattttatgttttacaaaaatcagccattgtaccttgttaaatgtaataagagcattttttttatttattttttaaaatagttcaaaataatacatgaagtttaatttttatcaattttttttaa

SEQ ID NO: 17623 - DNA, 4920 bp, Cannabis sativa
ccttttttctctttttgttgttgttgggcttttgatcattgttattatgctaattttgtagatagacagaaaatacaagcaatattataaccaaatgcaaaccgtggtgtcgtttttggacaatgtggccgggcgtggggcagcggaaccatacacttcactagcccagaaaacaatctcacgccatttccggtgcttgcgagatgggataagtggccaaatccaagccatccaaagaaggctcggggaacaagacaatggtcaaaacacagctatacctcgtctccgctatgttgacttaaagctcagacaacagagggggtttaatcagcttgccgccatgcgacatgcttggagaccccagagaggtcttccagaaacctctgtttccatcctccgtgcctggcttttcgagcatttccttcatccgtacatcattactctctgccattagtacttttttttttctctctcttaaatcattttgattcgtgtctaactcttttgagttttttccctttacttttgatgtttcaacagttatcccaaagaatcagagaaagttgtcctagcaaagcaaacagggttgaccacaaagcaagtaagaactcttttattattattattattactattattattacaagggagagagagagagagaaaaagaaaaaagaaaaagaagtagacccttttctttttggatcaatgggacaataattagagagttattatatatatgtatgtgtgcgtgttatgatattaggtggcgaactggtttatcaatgcgagagtacggctttggaagcccatggttgaagaaatgtacaaggaagagttcaacgatttggagatgaactccaaagaaggaggagaaggaggaggaggaggaggaagagttgattcttcgtgtgaggaggataagatcaggggagagtacttgaatcctcttgaaactcatcagaatcgtcgtttgcgtcacgaaactaacgtcacggactctgaaacgacaaagtcaccagtcgataataacgctggcttttatctggaggaggacgaagctgtccgtacaagtactactgctaataccaccaccaaccagaaccaccagaaccaggcgtcgtatgatgatatatcagagttgagcagcatcgtagttcgcaacgatcgccacgtgtcgctggctttggagttgcgccactgtgaaagtgaaggattttccacgttgggcgggtcccataatatgaggggtgatgacgagtcagcttcgcaagcttctctggattatcattgcctggaaacagagcagcaggaacgacgcaggttcagcagcaaccctcacctgttgcatgattttgtagtgtgtcatctaaaaaattaaataatcataatttagcctctaacgttcagattgtggaaagttggaaacccaaaaaaaaaaaaaaaaaaaattatatataagaatatgaaaaaaaaaataataataatcatgtgctgttactttcggtctttgtctttttttttttttttcctttttttttttaaccctgtgtttcattggttagagagctggaaaaacaaaatatgttgggcaatacagataggagatatcatgtagatacatacaaatttaatgtagagtgattttgtaatggtaccatgaataataaacaaatgtatctgttcattgaaatagtaattttgtatagcaatactctgtactttcaagtgtgacataatgtatcatattttgaaatatatgtatgtgaaacaaatagttccatacttatctgccactttatgaattgttttaatttctttaacgtatttggcatcacatttctttctttcttttttttcggtcacgagaaagaagattcaaactttcgccttataattcttttttggctctaaacgtgatcaactagattccaattcttctgtatttacttcatcttattggttagcttgttctgcgtcatctttttttgctgccaagaagaatcgtagtgtttctttttgggccttgaagaaccattaaataatactaacttattagcatcttataacgcgtctctcagtggccatattttctttttttgccagtttcttgtttggtcgctgtttggcaatagtcactatattatagcatgctgctcagttgtcactatatacattttactttaagaatagttcttcaattctttcacatattataatctattcacttccaactccatactttacgatttgaattttaaaggaaaggaaaaaaaaaaattcatataacataatgtatgtaagtatgtttcgactatatacatgcatggaggaggagggaccattatctttgatgtgtttttgttattcattagctgagtctaataaatttataaaaattatatatatatattgcacacaccagattccatatactttctgttgctctcaaggtttactttgtcatcctttcaaacctttattatcctgccttcagaattgtaccacggttcagtagggaactcttgttatgttacagcatagtctgtccataatggaagggttcttaaaagcaatcgaccttttttttttttttttgctgttcttaaaccacaaaataattaacaaaaaaagaaattagagttatttatattaaatactattattattattgggatgagaaagtgataatagatagagataatagagatagagactagcggttatcccaaagcactatctaatatatattatatattcacgagaacgagaccaaattctggcagaaagtttccaattgaaattactgagatcgtttcagaaaacggcagacaactttaatctatgaaggaggtgggccttttcggtcttattaaataacaaagttacggaacagagagtgacaactgtaggaggccaaaggaacaaagatggcaatcattactaaagcatccaaaaagaccaacccagaatcagtctcttcagcacaccaatctatctctttctcagcacaagaacccatttttatttgaaattagatttatgaactgaattcagtgtcttctcaccatctctgtatatatttttcttgttttaatctatataatatctatgattgattaccaaagagacttaggggaaaaaaaaggttaatattcttaatatgtgtgtacagatcgactatcaagctgacagttcctagaactgcactgggagtgtgtatattacataagatggccaacactttttttttttttaaaagctctttttacagaccatatatacagttgaacaaaaggacattttaacatgttgaaaagggatttccctttcacctctcaccctgagttagataaccaacattttcactgttttgagcttattagtactttttgagtatcccaaagaaatgtaactgctggcactataaactggagggggtttgatgcttttgcttcttgtaattttacagcactcagacaagtctaggaccattttttttttctttagacaagtgtattttgcgttttatcttgcccaattagctttgcttctttaaagaactagcagaagtctatgtcttcaggatttgcagctttggacagcttagatttagacctgctgctgagataagatatagaagtggggaggaaggaaggggggactatatatatatatacatatagggtttatttttactatattaaaaataaataaaaaagattggcgtcttgctgtttcttttgtcatttactttaatgatttagtgtgactttagaaatgagtaaataatgagagcttttattgccatcaagtttgaattttaagcatttgtagtgcatagaattcaatactggtcaatatctttgtaaatatgaagactactaaagttataaacacacacacggtcacaccacattaaattcaaatataataaaactctatttattagcaaattttattattttatttttgtataaatgtgcgtacactgtagccatgctccaaaagaaagagactttaaagtttttcttttttaaaaaaaaataaaaaataaaaaagaactattgcttttggtagctctctctctctctcaataagaaaatctctcactcttggactttgataattcccctacactaccaatcagggattagagtaagataagcttagtctaattattaaatattaaacacatcagtttgtcttgttttctgctctttcggtcctgtccttgttaacttttttattttatatattttttatttatgcattttgacaaattaaaggtctctctctctctctccaatgaatggaatatttaacggggttcgctctatactcagttcttacacttttagattctcagttggagaaagagaaaaaaagaaaaaaactttaaattatgagaattcgttttttttttctttttcgcaccatattgaatcagcactcagctctggattctaactacgtctcatgacaaatactcttttagtttctctcccttttggaccaaagttttttatcttatcatggccttgtatttggttacacaacttctactactcacaatcacgtctctactaccagtaaatgtaaaaccaaaccttttatcagcttcttttaaagcgtggttctacccaattattgcttcaaaacccagaaaacatgtgaaaattgtgagagccttctcatcgcagtagtgtctggtttttagtacttgggtttttttcttcttcttcttcttcttcttttttgcttctggtccttagatatagatacggatgtatcattagattctcaaactcggttttcgaatcaaagttgcatttactttccttcagacctttgatatagacaactcggttttatatatatatatatatatttttttgctctaagtgactaaacaacaat

SEQ ID NO: 17624 - DNA, 6470 bp, Cannabis sativa
aaaataaaaaaataaaaaaaatctataaacctatagtgttatttatttatgccataaaaaagtaaactatacccttaattcccatatttatgaaaattcccctatatttatgtaatattttttccattttagtatatacatgaaaaaagccctttaattaatttgtttatgtttctttgattatgtataaaaatatatttatgtgactaaaaaatttaaagtgtatgcataaggaaacaccttttttccttttgagatatacttagcatgaaatataaatgctttagttttttaaacataacactttattatattattattattattgagcataatagaaaattaaatctgaactcacgaccctttcctagaggtataaaactactgtagaaagtcatttttttgtgagaatatattaaggggtttaagggacaagaagattaattcagtccatggagaaagaaaaaatagtgatttactctttgagtccttaaatattgtccatatgcatacaaaacacaggaattgtaatagtgttcaatttattttatataagactaaacgttatatacactaggaggaagaaaaaaaacaatatttattggattgaaaataactccaaatattacacataataaaaaagactccacaatagcatagcatattagaaagggacaaatgagagcatagtaatagtcttagattttcagcctaaaaaaagtgacatgtggctctgtgcctcagaactcttgcttgaggatgggtcagaaaagtacctaacattctccaggtcatcactaaaaacttccaatgatcgtggcattggcggaagctccacctctatagctccttcaagaatttgaaccaccttactcatcgacggcctatcagcttcatcatattgtatgcaccaacaagcaactctacaaactctttcaacttcttcaatgcatgcttgctcctccaacctcgggtctagcaggcttaggacattgcctcctcctttcatgacaacacttgcagccaagcatgggaagtaacttatcttcccatctaactcacattgccctgagtttctctttcctgacacgaactcaaaaagcatcattccatagctgtatacgtcagctttagatgttattgctacacctgcaatccattctggtgcaagataacctcttgttcctctcatggttgttaggattctgctgaagtcccttccaacgagttttgctaacccaaaatctgccactttggagcagaattcgttgtccaaaagaatgttctctggcttaatgtcacaatgtatgatgcagtctctacacttttcatgaagataaaccaaccctttagctgtcccaagagcaatttggtatcttgttttccaatccaaaatgttagatctttctatgttgaaaaggtgggaagctaatgaaccattcgacaagtaatcatagactaacaactttttagtaccttgagagcagaatccaagaagtcgaactaaattcacatgttgaattgtcccaattatgcttacttctgctcgaaactccttctctccttggccaacaccttcaagcttcttcactgctattacagtagagtcaggcaagacacccttaaatactgaaccaaagcctcctttgcccaatatctcggaaaagttttttgttgcattttgcaaatctctatagccaaacaccatcaacgagcctcccaccgatgtcccagcaccaactattttctttcttctttttaaaaatataatcaaagcaagaccaattaaaattacgaaccctgcagttgagcccaacacagcaccaattatagctcccttattatctttagaactacgaaactcagaagctgccaatcgaataaatagtgtccttccactgttgtcatgttctccaagtttctccaaattcaagagatcttctttccaaatagaacaaccactgttgttataagcataagcagtgcaagagcagttagttaaacaacttgactcgcattcagcaaaactccctgcttttacaaacatttgattttcaggaagagacatactattaatggctagaaacttgtcactaccaaaactactatcgttcccacactgcaattcagtttttcttgagcagccacctgagtaatgcttcaaatcccactctcttaaagacttgggctcaaaccctgtcaaacaatgacaaaaagggatggagttctcattgcaacttccataggatccacaagaagcatagacttggcattgttgtcttggaaatgtacgaaggacattccatccattcgcaggctgccacattagttgcttcatctgcccagtaagatccattgcaataaaagatataactgttgagttagttgcatgcatcatgaaggaggtttcgttgtcatttgaaacgatttcaaaatacaagattatatttggccttttctctggggccaaggtgaatcttccagtccaaggaccggtattccaatagatcctagacctgttccagagtgttacataggaggtgtcactagggtctatttggaatgagaagaggcctggagctgggtcttcagaattcttccatgaaaagagaacttgtttcttcttagttctcttgttatacccaaatttattaccaggcagccatgtatcagttggataatcaaaactttgccataaaggttttgaattattattggattcatcctttaagaccaagtttccactatccaatagaacaacatgtacagagccaccactaaacatagtggcattcacatttgtggaccaaattggagagtttgactcatcaaagagaactaaattaccatctaagattctcaattcagaaaatctatctaagactggcttttctctatttgccacccaaactacagtctgtgcagttacttgtttgtaccacatacctatatagtagttggaagagttacctggatgaaagaatcccaatacaaagactccaccagctgagacaatggtttggtcaccagagagagattggcttgcagagatggtgtcagttccaagggagatatgggtgttaagaaacaagcataatatggtgacaagaaggctaaatatggagttagccatggtatccatggctgcacaaaagaagatacagagatatatacaatgcctggatacagtgacaccaactttctaagtacaatctacttataataaaggagggaagagaaattcagtcaatcaatgacttgttgaacaagtcatggaaatataatttatattttaccatttattttaagccacacacagagacatttatgacaatagtgtgttactttttttaacaaacaaaattaaagaactgaaaaacatgacaaagtcacaaagtagaggaaattaatttcatgacccttgcattgcaactacaagtctaatccttacgtagtcctattttcaaacctatcaccaccaccacttcttctttccattattggaaacttcggtccaatctaactctgttattgttatttttattttctgtcgttttgttttaaatgagtttttttaagagtttggagttaatttggacacatatggaagactgactcctaagcacacacgaccatcacaatcttctagacgaccgagccttaaatcaatctggaccgatgatcgtttgaccaaacttaagcaaaagccaaaataatgtggtactagctagacattgcaatctcaatggataacactatcatatatagatcatgatacgtatccaattattattttagtgaaaactcaaaaaaaaaacagttattaatatagatccaatttttttgatgtcacaccaattagcataaatattgatatgtctgtagcagcacttgctaaaataaaacaccaattttactgaactagtcaatttgggataaagattggaattgtaaatgtttatctacatacataagcgttaaaaaattaacgtaaacaattctagcctttacgagggtctactctacctcctactctagataaaacaaaactaaccaaggcttgtcagcctaactacctcagtgaaaaaagaacagaaaactaggccagcactttacgcaggttcgttaaatgaatcgctacttctcttgagtcgaggtctctttttttcatcatcacaaacgagcatagaaacaaaagataaattgtcattgctaaacaaaaaaaatacggttctttgttcatttatgagaggtgcagacgccattgtttaccctgtgaaacattggtggtcccattatttatttggttattattttttttttaataaattaggagtgtttatacatccaatattggcattatatgttacatgctaatcgattcaatttgatccaattaattttaattaaccgaactatattagattagatctattctatatatttgatcatgtatatctactggaattgtttgaatttatacaatgttatagatcacctatttctaatcctaaagaaagaaattgaaaaaaaaaaaaaaaaaaaaagttaaattttgatcctaattttcatatatatcttatattaaaggtagttaactaagagaaattattaattaaacgattttttttaattttattttttttattaaaggtgagaattaaaattaacacgttaaattaatcaattaattattttttttttaaaaaaaaaatattacttttcactacaaaagggactttttatcccacttttacatttggagccttaaataaaagtttagaacaagggccttgtttggaaaacggataaaaaaaaaagtgttggaaagactatttttatgcatttgtcaaacccaacttagcattttaagtgggactttttatgctggtttttacttaataaccgaggtaaggtcctcatgcatttgtgccttttaattattgggccggctacacatataaaaagaacaattaccttttagggttttatttttattagggttactcttatttcctcccacttgatctctctctctctcctatctctctctaagcggctgcccacgtggagatcaaatagcctctaccatagtgtctctcagttgcaatccttccttgctcttctatttttgtgcatcatctcaggccaggggccttttttttggcgaaggacgagccaatgaagttcagatccgagctctatgccctctgaaacttccaagtaccattcattctttttcttttatgttcttgagagatttgtgctccacatcctctaatcttgttctacttttttttcttttgttttttttttatttttctgaaatgtcgatcaactctctctccttctctctttccgtaggtgtgaaggttcatggtcgacaggtacatagtttttcatgatggacgaagcttcgtggtcgctgtttgtggtcgttaataatgactcacgattgtagaatgtggttcgccgctattcgtggttgatgaaggcggttcgtgacttctgttatactaatttttgggatttaaatatgtactgattatatattttacgaaaattattattaaggaaaaaaaaaactttctctgtagtggttcattgcttgttagttttagtataattttttttattattttttttttacctttaatcccagttattataggaaagcctggataaaaaattactttttatcttggtttttaaaggaaaaccaggattaaaaatagcattttatctcagtttttctataataaccgggattaaaagtaattttttatgccggtttttataagagcttttatcccactggaatatatcccggttttcattttagcgaaaactgggataaaatgcccctaaaaactgggataaaaagtatattttttgtagtagtgtttaaatatttaaatttaatttaaaagtaacaaaaatattagataattattttttgcgactattttcaggtatatactaaaatgacaaaaatattacacaattactttaatattactctaaggtataatatttgtatgttatattatatatcatgaaggaaagaaataaaaataaaattaaaagaatacatatcagtaaaaaaaaattaaaaagaaagacataataactcataatactctaaggtatagtatttgtatgttatatttatattactctaaggtatttttataataccttttatataatgaaggatattttaggtattaataagtaaaaaatgacatttatttaattattttaaaaaagagacattaattatcactaaaatatgactatttactagcatttctcttatcttaatcctcttattaaattgtattttatttttaaaacaaaaaatatttaatattcaaataattattaattttaaaattttcaaatattaattatttgtaattatttgacattattaatatcatatctcttataataaacattattaattt

SEQ ID NO: 17625 - DNA, 3395 bp, Cannabis sativa
ttgagcatatcattatttttttagtcattttatatagaacattgcaacaagcaattggtcgaaagtcactcacttttgggcttttacctttttgcaccaaatgaatagttgtatttgttgaactctttcagtaacttccatgagtgattgtccatttattcacaaagctactaggtggatatttcgtatgattgtcctttctactctacttgtattttgttcttttattaagattgattccttatctatgacaattctttggtaatcattttggctatgttacatgttgatattgcttatcgagtagaatcaataaaaatagacaaaccaaaccatttacaagttcacaagaaggacgaaaatctaataacatcttcaattataaatgacccataaacggcaaacatcttgaggccaaatatttagaaagcataaaactaataataatattgacatatatccccaattaaatattaataaattaaattaattatttaaaaatgtaaaatacaatttttgttatgttatcaacctacggtcatgttatagaaaaggctaagttatagcctcttcagtaaacactatgtattataatgaaaaagaaaataaaatacatgaaataaatagataaaatgatccagtcaagaggtaataatcgtactgtgattggcccacatggtacaaagggccaatgtaatggtgagaaatacaccaatcttcttcaaaaacacagacaaattatttgcacctcttatgttaaccactgaaacttttcctgtctcgttgcacaacttagctctaacaccccttttcctttgctttatgaagaagctgacatcagaaccattttcattttcttcgaagacaccagctctagtactacttgaagtaccaaacacatttatcttttctacctgctcaacacttgtccaactaagtgatatcatgcagatgatggtgctcagtattgtccaccatgctaccatcattgatttcgtcatttccactatgtttttattatacttcataataactgtggtgaaagaatcttgatcacgatcatgagtaagggtctgatcggatttccttgcaaaatttatatcatgtgtccctttagaacctaccaagaagtggttgctcaataaaagcactggattcagatggacttgaacagtttgagaaggcacagattgatgaaagaatgtctcagcaacctggcgtgtcgagacgaatagtccatgattgactttgatctcctctacgacctcaaaacttggtgaacttgaatattcatccatgtttccttcctcaattaagttttcatttgggtcgctattgatgaattcaagggaaaattgatcgtttgtctgttcattttcttcattgaactccttattattgcagctgctttgatggcatgcttcacctacatgtataaactccacactcgtctcagtgaaatgatcgaagaaataatatcatgtgtatacatataatacggacggaacatatgttcattattcgatataatttaaacaatacgtatagaatttagatcaatcaacattaccattattatctgcgtgttcttctctacggtagctagaaatattttcaaatggaactatcttctgttcttccacgaagctctgttaatttaatttaaaagagagaagggttcatgttaatatatacaaataaaacactttcttgaaaacataaaataattaaaatatatatatatttatatatataggttgagccattatctttgcacctacttaagcagcaattttttatttttaatacatgaaaaaaaaaaataattcaatgtttttttttttgtatgtatgactgaaaaaaataaattgtcaacccccataacgggaaaaataatactggaatatagaaaagggaaagcatattacataatgaattagtaagaaagagaaatttttcaattgcgcacgatttaaactaaacatttagttatatagtataaatattgtattgtagaattacattggagagaaaacttgactttaacattgaaagatttagttctataatgttgttaattatatttatcactgcaactatgacacaatatataaattatttatcctttttaaggttttgtgaagattaacattaaacatggtgatagattcaagaatttgtgtgaaagagaattatattgattaataataattaagctcatacctcttctgcaattttgctggacattcctatccatctcagattttccgctgacctctgatccgatttgaaatcctcatcgaaatctccgatctcgatggatctcgctaggtgattttcccaggagttgtccacaaaccgcaaagaattcatgtggttgttttctaacaatgattggttgtattgagtgtcttggccaaccatgaagctgaaatcatcagccgcagtaccaatattaacattacttactccccacattgatgcgtcatcagcaaagatactactgggctggtttatcagttcttgagaaacatgagcaaccgagaggatttcttgtaagatatcagtgtcattggccgtagtttctaggattgcctgatgttgatgagcacttgattgcatcgctttgaattcattgattttcgctgaagcttgaccaaaatcttctacttccaatggaggaagtgtcagcctatgttgtaacctagcacactcaagtgctacatcaacctgtcaattatagcaattaaaaatttatataagtattgctttttaatactagcaatatatatttctacattattggttattaaaggtaaaccattttgtatattggtattatttataaaatataaaactgtactgaagctataataaaataaaaaaaaataaaaaaagtaccttggaaggagggtaagaaattcctcctaaattctgaaaggatgaagtggatgttgtaccaaaattataattaaaattgtcatcattagataagaagtttgtccatttatgtgaatgatgatattctggtctatatctttgcatcatagactttggagcggagcaagtgtcaggaggcagcattgaataattgttgctctcaaaatcgtcacatcttccatcagaatatatttcaatgcttgaagaatgatcactagtcatgttaatgttgcgattattatgattaagaatctgatgatgattctggctcatatggttagtagtactggtgcttgtacttccgtaatattgctctccaatctttggcccaacagcacttttcttgaatacacgacaaagtgcatacgcatcctacaataatagcacaaataattatcctacatttttaaaattatacaaatataattaccatcactagtgttgatacatacaca

SEQ ID NO: 17626 - DNA, 3692 bp, Cannabis sativa
  modified_base (3638)..(3642): a, c, t, g, unknown or other
aaaaataggagagacccttttattttattttactttttcagaaaagtgagaaaacaagattagagaaagcttaccaataccatcgattagagacggaggggaggaggaggcggtagtatttgtcgcccgtcgcctggcgcttgggttctaagaaagaggagggaggagagaatcgatctagaggagggtggaggaggaatcgaagccagaggaaagaacacggggcggcgcggctgggactaggagacctgggttgggtgggcgattttcatctgatagggttttttttttctttcaaaaaattagtgtggctgctccctactagggtttggaagaggagggtaatggttatttagggtttgaaatgattgttaaaaatgaatgtatattaaaaaatatatatattataatctaattgggcttgctcgacccgggttggtttctttgggttagaaaccctccgacccgtgatcaacccatatgtaacgggttatacaattttcaacccaagaggaattcggcccatacaaagagaccatacatcggcccattagcgggttgggttggccggtttggtcggcccagcgggttgaatgctcactcctatcattatgcatgcttagattaatcactttaggtgtttccactattaaagctttctaaagcataaagaattttatactttgatgagtcaaagctttaagaaaattgtgctcaagataataatacaagagagatcttaataaaagagtgataaatactcgatatctcttaaaatttgcatgcataatagattggtccttgtgggaaattgagtcgtaaaattattatcaataattataatagtcattagtgaagaacatgtgtactaacatggaataagtcaaaatttaatatcctttaatctttccatttctcatcacaaattgtaactaaatcatcaaaccgactatatggaaagttttgtctagacttgaatcaatgaaaaagtattgcctaaatatagcttatctatcctcaaatttactagcaactatgatatgatatcgagtacatatgcattaatttattatcttaaatttattgtgagtacaaacattcataattaacaaaattatcacatcagaatagacaatggtgatcatacattcatcttcatttttatataaaatttgttcacttatgatctatgccttattttgaatctcaaccataaaaatatcataataaaagattcactagttcaactaaaactattgcaatgcacaaaataaacacactagtctcctgaactcatcattatggaacaaacataagaatttcatttcgaatacccaggaaagctcctaggcgaattcatcctcataaaagtcgtcatataaggatcgatagacaaatatatacctcattagaactagctaacacccattgcaatactcccactaagcatgtagtaacttggcatcatttatattcaaatgtgatttcaagaattatcaatttcgaggcctagtcaaatttctaatgagagatcgatacgataaaatatattatagtcccatccgataaccaagcagaagagattttaaaattgcttaaagataaaggaaaatatcttagagcagtgccactaaggattatacaatttgctcgttttcttagctttctcaatgatctatcaacgaaaatggtcatatcatgctagagttgttcaaataaaacatatgattcttatgcaggtaaggacaattacttcagatatcataaccaaattcatttaatccaataggataaaaaagattgtgtggttcattacatttaatatatattttttttccatctaagtatcctacctatcaataaaatcatcgacacgatgactaaattgtatgtatgaatcttagtattaattgtgattgatacatgagaaaagtattaacatgaatcacagttttcgataattaacatgtgaaaatttacaataggtaaggataacatattcaatgaataattttaatttcataattatctaataaggccaattacgcattttaaatttctagaaaattctattaccgaaaatatcaattaaatagtgacaataatttttataataaatgcgcaaatcatgattaatattttattacaaattttttatagtatatgcctaaaaaaaattcataatataacaataatgaaattcacaaaaattctcaaaatcaccatagaaagatacgtaacaatattatggaatgataaacaataaaatgaccttgtatgagactaaattaattaacaataaatttgtcacaattctcacaattttatgattaacaaaattgacattcttagactcacaaataggtgaatacaaaagcacttaattactattcactaacataattatattatcaagaatgtcaatagtttatcaaataattttctggcatgaaaataattatgtttttagttgataaaaaatacataataaaattgtgagattataattattagaaaataatttactttaacttaattatgtgattgtaagtcaatttaatcatttaaattaaccaaaaatacaatataatcacacaattaagtagaaaaaaataaaatggagtaaaatagtaaaaattttgtctaaaaaggactcttcacgtgtccccatgcgcctaaatttttatttatttatttatttggaaaaaattatgaaaactacatgtagtttgaaaaaaatgacatgtagtttatggtaaaacgacatgctgtttctttgaaaaagacatgtagtatatttatgaaatgacatgtagtttatcaactaaacaccaaatgataaattttcaaaaaaacaacaaaaacttggttgaaagcatacagaaaaatgacatgttgtttttgggttgtcttcaaccttcaaatgggtcattcagacccgatttgacccatttcgaacccgatcaccgacttggtcagatttcagcccttggtatatcgtttttgatgtcgtttgggtggggtgggttcaccatttttcatgctcaatccatttccaatatttatttctaccaataaaactctaaatcaaaaatactatagatccattttggctattgacaaaacttgaaaaaaacttagtgttcttggtattattatccaccattagaagattattttgaaaaatattacactaaataattgatttgagaaaaataggtttttgttgaatgcaagccctaaaatcaaataaaatagttcatgatactaattgttaactttactaaacactgagcattatgaaaacataatagattcaaacactaataattacaacactcatcaaacaacccaaaatcaaatcattctatttagtgcattgaacaatgatgaacatacctccaaaatatatatggattcttcatgtcatcttgatcatcctcttttgatcaaatctatccaagaaacaaaacacacaaaaacaaataaaatgcaaaagaggaactaataaagagcataatcttaccattaccattaaccccattcttattttacccatcatatatatatatatgaatattttttaatagatattaccatgaatggttactaagcaaatttaattataaatattaatnnnnnaaatattaaaccattaaattttgatctaataatgaataataaaagagaaa

SEQ ID NO: 17627 - DNA, 4538 bp, Cannabis sativa
  modified_base (1703)..(1706): a, c, t, g, unknown or other
  modified_base (1874)..(1893): a, c, t, g, unknown or other
  modified_base (3407)..(3408): a, c, t, g, unknown or other
atcaaaaaatgtaatcattgaatagtcatcctacatatatatatatgtatatatttatacatatgtatatatttatatactcctgtggcgtgcccttaaaaaattaggttataattttaccagagtgctaaaacaaataaattctttttttttttttggtaagtaagctgaatttttatattcaaaataattataattaattatataattaaaataaatttttttaatgaaaatatttaataagatatttttcattagtttataaatatttttttttgaataaagtttataaatattttttatttataagaaaataaataaaattaggctagtattaagttataggtaatttataatcaattatttttatttaatttttaaattaatcacaaccgtttaacaatgattcaataactaaaataaagataattacggtttgatataccattgaaatcttctccataaattaacatatcagttacattaataaatatttatttgtcattacaaataatttaatttttatttttttccccaaacaggaatgttctttttctagaaaaaaatggctaagcaagaataattattgaaaaaaactattaaatggccaaactaataaagtggttgttagttgggattattcccatcaaattttaaaacataactccttttgatatttatgctataagtaacacaattatataaatatatactatacaattaacagataataataatttataagaatgtgtttcagtatgagcccatcttttcctttcttttttatttattcttattcctttcaaaataaatttatgataaattttaaaaattacacattttctttattaaaaaaaaattatttcaacttaataatttattattttaagaaaataaaagcattttcagtactctccactaaaagaaaagaatatatatcttaagaataataaaaaaaaatcttaatgacagtgtattatttaattattagagtttttggcgactaaaccttctcaactttcacttacattgaacttttaaagctcaaaatttagatgtaaaatcctttaaattactgaaccagtaacaaatttaaggtgttattcgattaactgccacaatgaattgcttatgtacatactcttgtacatgtagtatgctgaatattattatttaaaaattatttctaaaattcatttaaaattaaataaaattttaaaaataaaaaataaaatattataaaatttgaaatatttgaaatattttttttttatatatattttaaataataatattaagtataccaacataaacgtattacgtgcataagagtgtacacacaagcagttgatgttggcagttaagtgtaaaaagtggatccccttaaagttgcaaatagttaataagtaatttagaaaattttaccgtcaaaatttgagtttagagaattaagtccaggtagaataagatttagccgaaaaaactatttatctattgaattttattttaattatttgttatgggagtaagggtcagtcctttttttattattattaatttcttattcttctttttttttcccctttaaggaaattctagaagagatttaattttactattccttaaacaattgatattattggtctcctttaattaagcatatatatataaatacattaaaaaacaaataataataataatannnntaataataataataataaccaaaaagatcacaccaaagaaaaaagaggtcaattattaattatctcacatgttcatatataaataattacccaaggtgaattggaatcaatgaaaaaggggagatgaatttaattaggtcatgatgaactctctctctctctctctcnnnnnnnnnnnnnnnnnnnntatatatttatatatataaagatctatagatatattttttagggtcatattcatatatataattttacaaaagttttatatcaacacgtgatttttatgggcgtctatctatatatgatgttatgccttagcaaaaaatgacgtggattaatatttaataataatgtttactaatttttagaagagtaagggataaaatcgtaaaattttaagtcctttacaatgagtaaaagaaataaaaaatattaaatatataaaatattatgaacaataatactgaattttgtcaaatatttatcattattattaatagtttagacaagacaatgatcatataagaaatttaataaatagattagcaactgtctatttttgttttctgataataatttatataagactaattagtaactatataattattatatatagactatgtcacgcaaacatattcggatatattttcaatgctactatatatatctcaactcaaaatttcaataataataataataataataatcgaatttaatattattaaaattaataatatctttatatgattatttaataattttattagtttaacagaatatttttaaatattccattaaatttaacaatattaataaggttagttctacaaatatataaatattaatatttattttaataaatattaatattatttaatttaagttaattgaatttgtattaattttagattgatttaaatatatatatatagatcaatatataatttgtaacattattattattttttattgttatttttaatactggagtatggtcaattttaatattcttaaattttatttttatttttctcaaatatttaaaactttaaatattatttttcttaaaaaaaattaaaaaattaatcagtagtttcctttaatgtgtacaattttttttaaaaaaatgaataacaaaaataaaaactaaaaatataattaaatatatgtgcaatgcacgtataattagttttttctttttaattaggtgatgttaagtgatatatatatttttttaattaattaggtaatgtatttttttaaaacaaaattgaaattaagtttgagagtttgatctttgaagattttttacttgttttggctatatttgtgtctatatacgtatttatatgtacaataaaatttcatgttttgaaaattttatttaaaatatttaatatatatgatattataatttaattaattaaggaaatgttttgagccctatgtataatttttagtattttaaatttaaattaaattttttatataaaatatctaaataattttttaattcataattgaactaataaaattaaaaatatgataaaatatctataattttaagtattttgaaatatatataataaaattaaaatatctacataatctttaaattttaaatatatataatcaaattaatttttttatataaaatacatgcacaatttttacttttaaatatatataataatattnnaaaattaataaaaaaaatattaatatattcttttaaatcttaaagttaacataaatattttaaaaatataatttaaatcaaaaattctgttacatagagacactttatataaaataaatttattaacgtacggttatatatatttgaaatgagttctcatctcaattgaaacagggctctcttttaattaagactatggtatactttaatatctcaaattatttaaaataataattatgcaagagaattatatttgctggaaaaaaaattacacttctttctcgtatattggtatgcatttatgcttaacttcatcgactaaaatgctaaataattggagagaaaaataccacgtgcttaaaacgtcttaaataaagtaggtgggaaatcttttaccaacgcatgcagttagattcgctagaaaaagtaaaaataaacaaaacactacgttttggtaattttttttatttattaaaacctttgtcgacgaacctaaattcttcgacaaaagtggtatctgattgaaacacgaaaatctctctttcttccccatttccctcttttatctttctgtctctctggtttagtgtcataaactgaattgtctactaatgatcattattgtgatatgataaactcttttcatagtaaacgtaaagtttgatgaaagttgtttattacatattgtttaagtcatgcataatctaattatacattgtacttatattataggtcaatctacatttgtaatccgaatcaaaatcacatacactagaagtatagtgtatagtaaatcgtacttagcagttttatattaaagaatctcaatagttaattaatatactaccgacttgttttattcatatcatatatcttaattctcttgtacattcttacaagattataccttctctatatgaataaggaattttctgatatttaataattatagtcttataattaatatattatttatcttataattgtattatatatataaatatatattcttcttatatattatccattaactaattaattttaagacataaatgttagacttttatttgggcttacattaaattttattggttttattaaaacttgggttgattggatagttctttgct

SEQ ID NO: 17628 - DNA, 9296 bp, Cannabis sativa
aaatccaccaaaacaaaatgaaaagtaatatatataaaaatattggtaagagtttttccttttctaacagaatattttggtggagttgatatatagatatagatgaaattagaacatgtactttgcgtttacgcaactaatataaagtcatttgtatatatatatacgtggaccgtggtctctttccaaattacacgcgaacattcattcaaacacgtaatttataagttatttttttaaaaggaattaatacgtaacttcaattgtaatatccttgtctttctatttatttcgattaatcagataactgtaatctttatgagacaataattcattttattttattttgagataattcgttttattttattatttgctactaattaaataatggactctttttttttttgcacaaatacacaaataatcaattgcatggaattgatcagtgattcacgtgcatgcgtcctttactaattttctcttacagcgcgattgttatgctcacgagttattaattaaatataaatatggacatatattaatgataatcaccaaattcagttgtgtctataaattcaattaaattttgtacttttatcaacaacaaaaatgtagtgattttcttcacgttgatggatcctataaataatatgagcatcatgttattgggtattagtagttttcaacatattttataaggtacgtcccatgattagctatcgatattttttgaaagatatttttttaaattatatgagtcccgatatttaattacaccaataacaatatgacaccgaaaaaaatattaaacatcaacaatactttttaacaattctcaattaatatacatcactatatagtttcttaaaattcttcatatatatgatttctaagtaaggttcttcacgggaaattgacaatcattgaatttaattttgaaatactttacattatgataatatattaattataaaattaaaattaaccattgcagtagaattaaaaacaaaaattgttacaaatagtactaattaaatattagggaaattttattttcaccccacaaattaataagtgtactccaatattttaaaaaaattaagtttaaaataatttttaaaaattactcttaatattattctcatattattttgtattaatttcaatacttatttttattttattctcataattttttttaaaatcatgtatataactttttttttctaataaaatttcacataattttatttttaatttttttggtataatatttaaaatataatttatttttatttgataagtatattttttaagaatataaaattgaaagaaaaaaaattttaaaaaataatataattaaaattatgtaaaataaaaactattgaaataaggtgcacttataaatttttgaaaaataaaactttccaaataatattttttttttaaaaaaaaattacgagaatgtccaaaatatgaatgaaacctaaactaaaacaatattctagataatacatattgttatttgctatgacagttatgttagctgttagaatttggttaggagttagttagatttgtggttagttggtcagctctattgagcttgtatataaaatgtttagtgctctttgatcaatgttaagactactctttcaatctcaatctttctcattctttctctcttctttctcttctttactctgtctttcttcttctttattcttcaggttctgttcttgtgttcttcaacaatggtgagacaaaaccacaatgttaacatggtatcagagctattttcctcctctaacaacaaacatggcaaacataggcaactctagcccctcgaatcaaatgattcctccagggttctctcaaggtctagttcgaaatcaatctcgagataatgataactctctgatctacttcaatcacacattgtcgatcaagctaaatgatcacaattatcttctatggaagcagaagatcctagctcccgttcgagggaatcaattgtaaatatccatccaagacattgctccaccaccatagtttcttagtgattcagatcaagctgcttctcatcaaaattcatcatttgcatgtgaaatgggatgtcaaagatcaattgctagtttcatggcatctatctccgatgactaagagtttggagctagcgtgttggagaagcatttcaatcttcaagtttcatcaaagatccttaaatttcgtaccaaactctagaacctttgaaaaggaacttcatctctcaatgagtaccttctcaaagttaagcaacatgtggatttgcttgctttagttggagatgctctcttcgctcgagatcacattgcatctatctttaagggactatcaagtgaatatggctcgtttatcatatcttccaatactcgaattgaagggtactctatggaaaaaatcgaagctcttcttctagcctctaaatcaagaattggaaagactgataaatatccaaaattgagtgtcaatcttgttgaatctgatactagaatagatcttaataatcaatggacttatgaagtattttttgctcacttcaattaaaattttagagaggtccaggagcttacaaaagtaagtttaaattaacccctcaccctattcatcctctggttattacaacaatagaggaactaattctagctacacgtctcgaggtggatccaccattcaacactagaagaggccatcctaatactcagcatggtggaagggtttttgctacaaacagcaagcctcaatatcaactatgtcacaaagttggacacatgtctcttgattgcttttatagatttgataaaagcttcacatgagcattaacaccttccaatggatccaataccatacaagctcatgtagctcagatatctcaaagtgcagacacaaattggtaccctgacttaagtgaaccaaaccactgcccatctaatatgcacaatctggtgaatggttctgagtacaatggacatgaaaggctctatgtgggtaatggaacaagtttggaaattcagcatactagccatgcatttttttaagtctaacacctttgataaaaccctgatccttaaaaacttcttgcacatacttgatattactaagaatcttctcagtgtttctaaatttactcttgacaatgatgttttctttgagtttcaccctcttgtttgttatatcaaggaccatataaccaaagccacaatcctgactgggactctccacaatggcctatatacttttgatccaggtcaatttcaagttgtgtcactaaatcaatcattcaactcttgtccagtttccattcttggtgatcaaaaaatatttatctggtcacttctggtacaagcacctctgagcctagtgtcaattcttgtagctattataataattcacttgtttctctttttgatttgtggcatattagattaggtcaccctcaaaaagagttgtgcaaaatgtaatgaactcttgtaatatctctattagaaataataaaagatttgtttttattttccaagcatgttgtttaggaaaaactcacaaaatgtcctttcctaaggagtctcacactgtgtattttgaacctctgcaattagttgtctctgatctatggggaccttctcatacaatttctcataatggatacaaatattacatgtcctttgtaaattctcacactaggttcacatggatttatctactcaaaactaagtctgaaactcttaaaacctttctagactttaaggcagaaattgagctccaaataggtaaaaatatcaaggtacttcaaactgattggggggagtatagatctttttctgaacctttaattaaacaagttgggattattcataaacatccttgtccaacaactcataaatagaatggcttaatggaaataaaatataggcaaatagtagaacatggtctaagtttgcttgctcaagcttccatgcccttaaaattttgggacgaagcctttgggtgtgatgtgtatcttcataatattaatagactacctacacctattttgaatcaaacttttggctatacatttctagagatgtggtgtttgatgaaatcgaattcccctatgtttccaaaaatcctagttctgcttcaagacctatctcttcatctgaatttcttccttttgctttaattcccaaagcatctcatatgtacactactgagtttctttttccaactgatcattcacaattttttgtcaatgtgtctattcctaatcacaatatgtcttctagttctgagtctgcttccctttctctttagcaaaatgagtcatgtgctgaaacctcaaactcctgtctatgttcctctctctgtaaatcatcctcagcttgtttcaatcacacaaactattccatccactaatcctgaactaccacagtccataaatttgtccctccctattccttctcagtcacctggtgtcataacaaaaaagcataaaatgaaaattaaagcaaaatctagtatttacaaaccaaaagcctatttggattttcaaaagccaattagtgtcaagatggccttacagcaacaagaatggagcaattccatgtcagaggaaatgagagctcttaggaaaaatgtaacttggacttatgtttcgctgccatagggaaggacacctataggttgcaaatgggtgtacaatattaaattgaatgcacatggcactataaacaaattcaaagcaaggttagtagcaaaaggatttcattaacaaccaggtttttatttcgctgaaacttttagtccatttattaaacctgttacaattaggatggttctttctttggctcttgtacaagggtagtgtattcaacaacttgatgtgaataagtatttctaaatggggactcaaaagaagaagtttacatgagtaaacctaatgggtttgagttaccaaatgttcctcactcagttcgcaaactaaacaaagctttttatgggctcaaacgggaaccaagggcctagtttgagaaatttcaacattgtctggtagaagactagttttgtatcttttaagtctggtcatagtttattcattcaatatacctctaaatttgtggttctcatacttgtttatgttgacgatataatcatcactagaagtgacactgaacaggtttcaactttgaccaaagctttggattcaaattttctctaaaaatctgggaatcttcactatttccttagaattgaggttcaacacactaaagaaaagattgcatctgtctcaagggaagtatgttagagacttgttgtgcaaagctcaaatgcaagatgccaaacctgcaccaactcccatgataagtggtctaaagtagtctgcattcgaaggggatccagtgaacaatcctcaactgtatgggtctatagttggtgcgctctaatacttaacaaaacagaccaaaaatctcttgtagtgtaaacaaaatctgtcaattgatggctaatcctttgcatactcattggaatgcaatataaagagaatctttagatatctcagtgatattattatacatggtctgaactttaaatgctcaaaagagtatgatattactaacttttgtgatgctaattgagctagtagtgatcctgatgatagaagatctacttcagggttcacaatcttctttggtcccaatctaatcgcttggcaatacaagaaacaacatagtgtttctcgatcaagtactgaagcagaatatagaagcctagctcaagtggtttctaaagtaacttgactgcattccttgttttctgaactccatatacaaccacctcgacctcctaccgtttagtgtgacaatatgagcacaattctactcactgccaatcttattttacatgcccataccaagcacatattgaacttgatttgtattttgttcgaaagaaactgtctcagctagagatggttcagatgcaacatgttctcgcaactacataatggccttacaaaggctatttcaagctcaaggttcaaccagttaagaaccaatcttgaaattattaacaacatcaattctaagtttgaaggggagtgtcaagacaattagtctatgacagttgttagctgttaagattcagttaggagttagattggtggttagttggtcaattctattgagcttgtatataacatgtttagtgttctttgatcaatgttaagactactctttcaatctcaatctttctcattttttctctcttctttctcttttttactcttctttcttcttcttctctaaacctattgttctgttcttgtgtttttcaacaatagtgagacagaatgttaatacatatataacttgcatatactgcttttagtttcatttgtgattagttatatttattttgttttaaatagaaaaactattattaattattaatataattttatttttgaaatcaatgaaagtgataattatatattatataaaaaaatttacgccaaataacatatagtacgttatactaaaacactttcttatgttatggttgaaaaagaaaaacccttttatatatgcataatgaagatagagtagttagtcgatcttattaagaaatgcatgtcgaactaaatattcttgcccacaatttaaattttaaagtaataaaaaaattaacagcaagaaatttatcaactaactggacaagactagctagttatatatatatatatatatatatataaattaataaatttataaagtcatatgataaaaaattacaaagactataaataactaacttcttgctttcagacaaagctagctagagaatacgttgcactaacatttttgttaagggtcacaatctattgcacactaataatattattacgagatatgcatgtacgtaattaattatttgtgacttaatgtaatgatttgtttcagccaaaaaaaaaaagagattttaaattttttttatataataaacttttaaattttaaaaaaagttatgaaaatatgttaatatgaaaaaactttaattttatttttacggtttaaaattttttatttataaaaatacgtttttcaacaaaaataatacgttgtttgattatgttttggttgttttgtatagtttatttaaagttgttatgtggttgattttttcattgttttttgttgtttgatagttaatttatagttgttgtaagtttaatttaatattgttttttttatttttataatttaaaattttaatatcgtatttttaaaaattaaaaataattataaaaataaaaaaaaaattgtaaaaatgtaaataaattatataaaaaaacttattatgaaaaactctaatattttaattaaaagaatcctatatatacaatgtcccatttgccaaaattatcaactaacaaaagaaaaggtagtccttgagcccccaatcaaaaaaaaatgtgtgcttcaatacataaaattaataaaaaatataatatatttatatgaaaatttggttgtcaagggacatataattaataattttatagttatatataattatgacacatatcacgttataaatctaaaagagaagagatctatgtaaatatacatagagaagtggaggtggtgcatgtgaggccaatattggtcccataatcacatgagctaccccaccatgctagcttctgtcatgcactactactaattaatcttttattttattttacatttcaaaaaagattacatttttatttatttttttattttttggtagtacataatcttatatatagatctagttgagcaggctcgatccaacagcaaaaatacatatatattataaatatgggtctcagctgctctgcactggtatagatgtgtctttttcgtgtattagggcaacaaatacagaatcttgaataatattaatcactgtctatcaatgtcgtccaattaaaaataataattcccaaatctaatctgaaccatattttttattattattattattatcaatattatacatattttttgtttatattattgtatacatatatcaccgtcatatatttatggcctatatatatattctcggatggcatggcaacttcccttatagtttccctatgctatgtgtatattatatataaagttagttttcaatattaatagtattttctttgggcctctcttgatgatgacaaattttattttttgggacttctagatgatttagtttctgatttgggacccattaccgttttatatagtactcatgttaatttttatatattactattcgtatatattaactttttaacaaattaatcgagtttttattaaaagtagcaatcatggacgtactgtttttgaattattgattgtaatatcctagagtctcttttcattattgtgctggtgcacataagctaaactatatatgtagtgaatgaatcactctcaacgaacacaatcaagagcacaatgcagcaaccaaaatcaaataaattaaccaacacagtttgatcatacactgtgctgataaaaaccagcaattcaaagaacaattcaaagagaaaaattaacacaaagagttgaaaaacatagaccttttattgatgttgaaaactagtacaagagtgtttaatacaaattgaagaaagaatgagaagaaattacaatgaatctcaccaatggagaaccaagatcagcaacacttggttcccttatacatccctccttttcactctctttatttcttaaaactgaatttacaacataccatgaattgagtgttacaaggtccatttatagtatgaagggtttgttggttgttgagctaactaactcgggtaccatctgtcaaaacagttggtgacacatcagcaataaaatataaaatggctgaactaaacaccacaaatccaccttagtttagtcattttaggttttaggaagaatatgatgtgtgaagcagacttgaacataggtagaaatcagcacttgcagatgttgagtagacttaagcaatgtttaagcttggttaagttgacactttttgtcaacatataagcagggttattatctgtgctgattttcttggcttgaacctctcctttagctacaatttctctaatgaagtgaaactttatgtttatatgtttagacctctcatgtatcataggatttttaatcaagtggagagcactttgattatcacaatataaagttatattgctagagttcaagccaagttct

SEQ ID NO: 17629 - DNA, 4645 bp, Cannabis sativa
gtgggcaatgctcaagcaaatgatccttctccgatttcgcacggtgccggcagggtctctatcggaagaattcttgtcagtggttcaaacgggttcggttcgtgagtatcgggttacctgagaaatgctagcttcgcgggtacccgaggtaccagatcacatcctggagggaaactttgtcaaagggcttcgtgaggacattaaggcagccctgcatatccttcaaccccagggattgacccagataatggagacggctcagcgagtggaagaaggccacctcatgctaaacactagcccaatacacccaagcccaagcgtgaaaccccatcactccaagaccaatttcaatccattatctccaagcagattcagctccttcaccccaagaaatacccaaactccttcaccccaagaaatacccaaacaattcagccacaacggcccttctcttcttcatccggatccatggtttctacagcttccaaggcgggcagtagtcggtatttgcgctaacgttgagcttgatttaggagccattcgagtaataacggattttctcccacttaaattgggtggagcagatgtgatattgggaattaagtggctcgagacactgggcaatatgcaagttaactggaaaacaatggttatgaaattcgagatggcgggttcctgggttactctacagggagatcctagcttgtgtaagtctccgatatccttgaaagctatgatgttaacagttgagaagggggctgaagtgtattgggtccagttaggctcactggccacggaagggagtggggagcagccacctttacccaccccgattacccaactactagaccagtaccaagaagtgtttgagttgccaccgggactcccaccaccgcggtctcgtgaccatactataaacctaaaacctggtaccgagccaatctcagttcgcccctaccgatatgctcaaattcaaaaagctgagattgaaaagatggttcgcgacatgcttcgggtgggcatagtacagccaagtacaagtcccttttccagccccattttattggttaaaaagaaagatggaagttggcggttctgtgttgattatcgggctcttaatcgagcaactgtagccgataaatttcccactccaatcattgatgagttgcttgatgagttacacggtgccactattttttcgaagataaacttaaagtcaggttaccaccagatccgcatggcttccgaagatgtggaaaagacggcatttcgaacacacgaagggcattatgaatttctagtcatgccgtttggcctcaccaacgctcccgccacatttcaagctctaatgaacgaggtattccgtgatttccgtggctcttgtgtactacttttcttgacgatattcttgagtacagtcccactctagcagcccatattactcatctcggcatggtccttgaacgactccagcaacatcaattgtttgctaaccggaagaagtgtatttttgctcagccacaagtggagtatttaggccatgtgatttcagccagtggggtgtcaaccgacccaagtaaaatctcagccatgcttcaatggcctattccctctaccatcaaggaattgaggggttttttagggctcactgattactatcgcaagtttgtacagggatatggaagcattgcgcggccgttgaccgaccagcttaaaaaagacgcttttttatggtcctcagaagctcaaagtgcctttgatcagttgaagagtgctatgtgtaccgtgcccgtcttagctttaccagatttttcagccctctttgtccttgaagcggatgcttcgggtatgggattgggggcagttcttatgcaacataaacgacccattgcctatttcagtcgcaccttgtctccacgggctcgatcgaaatcagtttatgagagagaattgatggctattgttttggcaatacaaaagtggcgcccatatttactcggcagtaagtttttagttcgaaccgaccaacgtagcttgaagtacttgttggagcaacgtttggtctctatggaacaccagaagtggctcactaagctcttaggctatgattttgacatccagtataagccgggttttgaaaatagagcagctgatgccctctcacgagtttcagcagaagcttctttggctgtcgttacggttcctagtgtgctacccattccggatctacaagcccaagtggacgctgaccctgacttggctaagattatttcaaaggtctctcgcggccaagatggtgggggtttctcttttactcatggatgtctcaaatttcgtggtcgtttggtgctaccggcctcttccccttccattccaatgttattgaaggaatatcacaacagcaaggtggggggtcattcgggcgtctttaagacttttcaaagaatagctgctaagttttattggtttgggatgcgcaaggatgttcaaaagtttgtggcagaatgttccgtatgtcagcaaaacaaatatatggctcaatccccggcgggtttgctgcaacccctccccattccagagcaagtatgggacgatatttctatggatttcatcgaagggttacctctctccaatgggtttgattccatatatgtggtgatggatcgtctcaccaaatatggccattctatacctctccgtcatccctataccggccttacggtggcagcagcctttgtgaaggaagtagttaagcttcatagtttccctcgctctattgtatccgatcgagataagatttttttgagcttgttttggagggaactattctgtttgcaaggcacctcccttaaacatagcaccgcatatcaccctcaaaccgatgggcaaacggaggtggtcaatcgatgtttggaaacgtatttacggtgcttcgtcagcttcaaacctacctaatgggtcaaatggttaccatgggccgaattttggtacaacacgtcacaccacacctccatcggaatgactccctttcgagttttgtaccatcgcgatcctcctcctttatgccggttcgagacctcaagcactagagtctctactgtggaacaggtactttcggaccgtgaagatatccttgccttgttaaagcaaaatcttcttcgggcacaacaaagaatgaagacacagactgaccgtaaacgtcgcgacgtcagttttgaggtgggtgatcccgtttatgtgaagctacgaccataccgccaacgaaccttggccaaacggcccaatgagaagctgtctccccgttttttcggccccttttcggtcctagctcgtgttggaccagcagcctatcgcctccaactgcccccggagtctatgattcaccctgtttttcatgtgtccttgcttcgagctgctttgggaccccagcaacaagcctcgcctctgcctccgggtctcacttctaacttggaatggctactcgaacctgactccttgctggccattcgccccggcactcataagaccagtcctcaagctttgattaaatggaagaaccttcccgattgtgaagctacttgggaggattttccggtcatccaggctcaatttcctcaattccaccttgaggacaaggggaaacttcatgcgggcggtattaataagccacctgtcacttatgtctatgcgagaaagaggggtaggaactttactgtaggtgctggcacagagaattagctgactgtgcaagtttgttaagtgagggatgtttaggtgtgactgagtctcaccattgttactgtggggtgaggtatataaataatatgggttgagtttgtaatgttttttaggcaggaaatactgatttgtaaggagagcccaggttctcgaatacctggggacttcaattatcaatatcaatttcttttcatcttctttctttttcttctacttttgtttgtggctgttgaatcgataggtgttcacctatcaattggtatcagagcatcgccttcatgggaccaaagagagacgcgatgccagatatcattgacgagaaggtggaagcgaaagtctcggagcttcgccaagatgtccggaaagtgaatcaagggctggagaagctccaaggagagattcagaacactattgcgcacatcgttgccaagcagatggaatcggtggtgagtcaaatctcacagctccttttaccacctgggaaacccacgctcgatgcgactgcggctgcgacagatcgccaacggcgtgctgttgaagggagcgggtcttcgatcggcgaacccagcggccccggagctcaacaatctccaaagtttccagtgaatatggccgtgccaccatttccgagtccgaccgggccttcgattcagcttgggtcctttcagaatggccaatcctttggccacgattttcggccaccacgaatggaaatcccgttgtttaatggcgaaaatccagatggctggatataccgtgccgagcggtattttctcctttcaaaaatgacggaagctatgatgctagacaccgcgattgttggacttgatggggatgccttgtcgtggttccagtgggagaatcaacgccgcccgattacgttgtgggcaatgctcaagcaaatgat

SEQ ID NO: 17630 - DNA, 3608 bp, Cannabis sativa
  modified_base (70)..(70): a, c, t, g, unknown or other
caatctcaatagttcaggagacatctttaacaaccttaaaagttcatgggcataatttggtacatgtcanagttcagggggcaaaaatcataattaaccaaatatattttttgaaatattttctacaacaacaaaattcgttaatcctataattttggattactctattaaatatgactaatgagggtggttatttgtcaatgaataagcatgcatttgtaagatgataagctaaaataaaatattaatttttgtagttaatatttttcttttaataatatgatagaatattttattatgtataaatatttgactggaatgttggattatatatgtggtatgagttggatttggtgatgatgataagtaacaatggatgacatatgtacttgccaacatgttccacctatttcaacggcatacggtaaaaaaaatgtacttaattttgttggtcttcaatataattgtcatacctatattgatttatactttactctctcatttttttacctcacaaaaatactaaaacgacacctttgatatttggtaaattttttttatatatatatattttaaaggtcaaccaaaaatatccattaactaataaatcaaactgaaatatttaaagagcataattcaataattttaggctaattaaatcatttacaattaaaaaaagaaaaccgtagtagcatcttgaatcatcaaaagattgggaagaatattaagttttcaacctgaataaacaactgtcaactccattttattaataatgactgtcaatcaaaaattttcttatacaaatttggtaatttaacacccttattattcaatataagaataaccaactatgtttatactatgccaatcccacaacaagattgaacaccagaacaaaggatcaataaacattagggattttcctgtaactgattgataatgatggaaatataaactctctattttgagtcaatcaacaacacaaactactacccaataaggatcaaactctactccgttcatcaaatcaataccaattattacaaatctagcaagatagtgaaataacattgttatttaagaaagaaaaaaaaaacaattgaaatgagacacaaacaaaaactttcttagttagataaataatataaaataatttttaaaaaaaaattgttcaaattatttataaaattagtatggtaatgaattatattaaaaaattcatattattttatgaatgtgtgtatataatacataaatacattaaattataataaaataaagcaatggagaattaagactttaaatgaaaaagataagaagtaaaactagtttaataaaattgtctattaaatatgtacaaaaaaaactatataatatgtatagtgtacaatatatatgttcggtcggttctcggtttaatcagttagtttgccattgacactaaaactgaccgtgcaaaggtaattttaatcgaaagcaattttttcggtgttcggtcgatcggtgtactcggtttggtcgattttttggattttttgctcagccctagtctccaccctaaagccccaaaatctatgagctcaaccaccttaaaacccttgaaatctctacccatcgttggagttctcaaatcgctcgttttctatgttatttttttcttttggtttttgacaatgtcacaaaatatcgctaaagatctctagttcacaacattgctaaatacatcgctaaatgtcgctaaatacatcgttaaacattttaaaaatattgccaaatatcgctagttatcgctaaaatttatctctaaccctcagatttggtttgtcattgtaaatacattactaaatatcgtaaaatatcgcaaaaaaaaaaaaaaaaactagaaaaaaaaatgcaaaaaatgagagatattgtgaaagaagacgaagacagggattcacatctaggattatgagtttgtgtgttcgactttagagattctggatctgcatcttcaacgacagggttttgggtcagggttcaacgtcaaagagtgagagagttagagagagaagttttttttttaaaatataaaaatatttttgaaagggaaaaaaatattaaaagtagatatactatttttatttggatagtatattaaattactatattttacatttaagtatactaacctaaatttttcaaagaataataataattttaacattttttttttctatcaaccattaaacagccataaaattgcatctatgttattattattattattatttcaatattttttttatttggatgaatttccaatacttagttagtaacgaaacgatggtcctgttcctattgcaatagctagtctcactacactacaccagctagctagaatatggaatatggtatgatttgctttgaaaaagtgactgtaaaatattatcacacattttttatttattaccaaaagttaaatgaaaaataataaattgggagaaaaatcttctgtcttttatacttggagaaaaatcttctttgtcttttatgctttttttttaacgtcttttatactttataattaccttcttaaagttttttttagcttaatagcagttttaaaaattacctaagagttaattgggatttatacattgtactcaaaataattgtcgagatccttctatgcaaagataccatagccagggacggaagtagaaattaagaataaaggggctaaaagataaaaaataattaaggggggccaaatacataattttttgaaaaaatacaatttttaacattaaattgttttataatttttttttgtccgaaattttaggagaggccatggccttttttggagctaaagtagctccgtctctgaccatagcctaactgttattctcaaaggagcaccatttttaaggcttattaaaataaatattactacaaaatttaacgtaaaatcatacaactaactataccaaacactcggtattatttatttgataaagttacttctcaaacatttaggaagaaaaaaagaagtgatgaaatgtatggaatgaagcgtatttgagtagacaataataggtgtgaatgttgagtggagtattgactaaagtacattcaccacttaaaacgatatcgtttagagaatattttattttatattacaagatggtgtgcggcattgaaacatgactaaaaatgaaaggtatgcagtgcaccaccatatgaatgtgttggaatgtgttcccattaattttgttaggtaaagatattactttattaatcaagtaataataataagtgtggcaatttatctaataccaaaacaagttatatatataaaaaaaatatttaatatttatttatattaggcacgagtaataaatatgacaaatttcattgtaagatgaaacttacacgtaaaaacttaagctgccatataggacatagtactcaaattattaacacccctctttcttaaggtattaaaacacattttggatgagataaaaaattaacacatgattttgtgtttcacattatggaatatagagaaggaaagaaattaagaaagacatttgtacccaaaattacatgtgattgggaaa

SEQ ID NO: 17631 - DNA, 2735 bp, Cannabis sativa
ataataatctcacataataattaataatattctttttttaatttttaattgtatcactttcaaataacatataaaaaaattagcataaaatttagtatacgtgagagtcgcaggtaacttttttgctaatctatatatatatatatatacttaaatagagttaattctatagtatattattttacaatacaatgtacttaacaccattagcacgtaaagcaatcaacattcatataaagttattgcttgattaattttattaaaatgctataacatctatcaagtttcaagtcttcaataatatgcatgctatatatattaatttcgaataagattgtacaagtgtcgtgcaaatcttcaggtggtctccaattaatgatagattattatttcaaacttgtagataacaattctagagaaggaaaaaacaaataataaaggatcacatatcatataatctaatgtaagaaaagagtaataatgaacatctttggtgtttcatgtttgcaagattaggaaatgtaaaatagagagccaaagtctatgaagtttcctattcaacaattttattatcacacatttaggctgatattcccctcttattttaatgtatgcttctccaatggaataaatggtcattatcgaaattcttcaaaaaagtatatagttggttgggaatcaatcatatctcattttagctttgagcaaatatgcattgatttgttttcttgtacaactttccatctacttaaattctcctctctctctctctcaaccccaatcatataagttatgtaacgaattttttgctttttgacttctaaactcatcttttctaagtagccagaatctaggctacactcttccatcatggaaaagaagaaaaaagtctttaaatatggcgatgcattgcttcaaaactcaagcccttttaccaagaaaaaacagagatatggctgtagcttctgcctttcccgatgtattttcctggattcagaaccttccaccagttaatcaatggcgaacaacttgtatttccttatgtttaagttcttcatcagcttcaaatcaaccatcactcaatctcaccatatcaaaaaccaaccaaaacccaactctttgtttcgccattgttgcaagtttcaaccttcctatctatctttggacctcaaaaccagttaacttcagctcaaataattcacttaagttgctaagtgaagaggccatattgtctctattggttaatctcattgaagaagtccttcgctatggctcaaacaacaacaactccatcaagttccaaagagtagattccattcccgaagttagagaaatctttaaccttgcttttcaaactctctttttcctcatttgcatctatgaaactccagttgatctccgatcagattgtctaaacactcttaggaacaccttggccaaatgccaatcaagaagagcaaccaaattgctcatgaaacttctggggtcgaacttagaagagaagtggatgcgctccataaaccttgccataaccaattggatatcggaggtgcaatccactcgccgcggcagctccctgaaaacaccctcgccactcttctcttatgctatttcaacattggggttatggaaagttcaactgtactgtcctctcatagccatgaatctcgagagctcgagtaataatagtgctccttcggctgatgaaaagcttcaattctctctcgattaccaccaattggaaggtgtgattcagttcaactacagagtcatacctcaagaaacctgggtcgggatcatggttaatattgacaacataaggtaccgtacatatatataacaatacacgagaataaatcaataatcttcgcaacaaattaatgggcattcgtttctttcttttattttttctttcattccctgacagatgtgatgtgatcaagcttgtgagcgatacactaatggcagaacgaggagttgggtcaacagaaaagcacttcccatctcgaatatctttacagctaaccccaattcagcaaaacaacgtactaagcgtatcggtgagcaaatcctctgaaaacccagcaagagaaatcggggtagagagaagcatagaagccggattcgagcccccaaatccttacttgggtctcagggtatcagccggagagacaatgacgatgaccctgaagccatggaagttcgagcaatcagtgtacggtaacagtggaaacttgaactggtacctccatgatagtgtggacggaagagaggtattttcttcgaaaccctccaagtttgctttgctaaacccgaaatcgtggttcaaacacagatactcaagcgcctacaggccatttacgaggcaaggaggagtggttttcgcgggcgatgagtatagggagagtgtgttatggaaggtggacaaggccgccatgggaaaaactatggagtgggaaataagagggtggatttggttaacttattggcctaataagtacagaacgttttataatgagactaggagattggagtttagggaaattgttggtctaccaatttcttagaaattactgttactttactcatgttttgtttggattgatctttttgtaaaagttttttttttttagtattattctaataaatagttagagcaatagttgctttgtttgacatcattgatatttaagtaatagttgcttgtttgatctcacttatatttagagatgaaa

SEQ ID NO: 17632 - DNA, 5363 bp, Cannabis sativa
  modified_base (2765)..(2768): a, c, t, g, unknown or other
aagagaagagaggcttacacctctttgtgtgaggcacccaaacaaagagcctcatttattttgggcttattagaagtgtcgtgcccaacaaaactagcttaatcacaattgcataattgaatatggtgcgctaaaagtgacttttctaagtattgtgcctaacaatagtgcctagagagtaatttattcgtacaacctagcattagttagaaaagaccacatgaaatcacatgcaactagttcaaatcaaacatataattgatttctagtgtcatggtttattagttttagaaatttacaatttaaaaaatagatttttatatgcaagatttgaggcttatcatgaacaatcaccttgaggcttaaactaacctttttaaacattgccaatcactaggaacaactatttaaagaaggagaaacaaaacaagatgtagaaattgaagctcatccaaatgcagtctgaacttcaggtaaagcaatttgaaaaataaaaactcccaactatgcattcataatacaacaacacagtacacccatttacaaaaaaagaaactcgacgttgatattggagctcatccaaatctggaatgaaattcaggtcaagacaaaaattaaattaaaatagaaaggcaccaacaagaggggaagagggggaaatattagccgtaccttatcagtattaagccatttcacatattcaactaaccccccagcataaaagtattcattagactgaactttatccggatcactatcttcttttctgagattgatagtaagctgccaaaattcaggcccaaggataagcacaaaacttttaacagtggtcccatggaaagaaaagcactgtggtacataaaaactaaggcgcactgaaaaattctcactctatgcaagggcaaaaaattaatgagaataagtttggcataaacaaaggcataaccataccatagggttcagaaaagctagttctcttattcttccaccaattgtgttgtaatcaaattcaattgcagttgtaaatactgcagggaaattcaataatttagtgaaaaaaccattaaaaaattttgattcaaatttaccataattttatctatttcaatttatgtttttgatacagtgggggattaaaactccttccccctcccacaaacacccaaccacttaagttagcctcgagtagaatataataatttttaattgtacaacagttgagggtaacaagaccttcattatcgggccaaaatttaatgcgcgttccttgctgattcttcaattcagctggaaggacttgagatataagagtggtcacaggtttaccacgagagtaactttgacgatattccattccgtcacgccaaattgtaacgtccaatgcctaccaaggtatcaatcataaaggatttcaaataataaatgtcacaaacaaaggcttacaaaaatctgaattagaaacttaaataccaaaaaaggaaaaaattcaagcaagctgaatctacaggcaaaaaacacacctcggataaggcattaacaactgataaacctacaccatgtagtccaccagatacactgtatccactactagaaccaccaaacttgccaccagcatgcaaaacctgtaaaattgaatcacaagaaccaaatgaaaggatatatttatatttttcagaaatacatctttttcttgcaaaggaaaaaaaaaaaagtgatacttagatgcaaaagtagagatatacaattgctgcgaaaaaaaaaaatggagacatttaatattttttgcaacaataccgttaatacagtctccagtgaggatttcttggtcactgggtgcatctcaatagggatctgcaaaaatgaagtaataccataagtgagactggtataattgcaacaatactgttaatacagtctccaatgaggataaaaaaagctatcatcaactcaaattgcaaagttaagttatcaaacaagattctctaaattaatatataagtgctgaagtgcctgttaaaaaaaaaaacaaaaatgagcagaagcagaacttgggtactctataaagtaaaagaagaataataacaacaaaaagcaatgcatggaatcaacatccacaatttcaagaagaatgtgtttttgtatgtaataaaaagaagaagaaaaatgctataaaattcataaaagtttaaaatgcaattccttctggctgacaatagtgtactgtactctactattacgagaaataaatataaacaattttatacgagcattccaaagatcctgaacttgttttcccatacaaatctaccaaaaacatataagtcatgcaagaagtaataaaatttaaaatcccaactacatacaaaaatcagaattagcataacaaaggtaattaataaaagctgataatcccaactgcactcatataaatttattttaatcatctttatgataaaaagattttccactacactaagctgctatatttctttatgataaaaagataaaaacaaataaataaatttcgaagaaaatgaaagaaagaagcataccccacgaccgttatcagtgatgctcacagaattgtcttcgtgtaacacaacctcaatatttgtagcatatcctgcctgagcctcatcaacagcattatccaatatttcataaacctaaaagaccaaacataaaattatttgcaaattcatctcagatcaacccgacaaagggcatgtaactgatgttgcctggagagagagagagagagagannnngagagagagagagagaaattataccaaatgatgcaaaccacgaggtcctgtacttccaatgtacatccctggccttttcctaacaggatccaatccttccagcacctaattaagtaattcagtaatcagcatgatcaaaagtgaatttttgaatagatatagctacctcacaaataaattatttattatcttttttcttttcttgttttgggattcaacaagacacattttcatttctgatgtcaagttgttcgggcattaacacttaatccataatctttaggagggagacaggctctaagaaatggttaagtagcaatgattgtcccaatgtgctgtgaaaccagaccaaattacaggccaaaccactcgccctatatgctatatttcacaagataaattacagcctataccaaatttattacaattacttcttacttccaacatcatttattctgcttaatccatattctaccatgcacaaatagcacagaatccaggctcacctgaatttgatcagacccatatgatttcgaactggcgcttgcttgtggagcttcagttgctgccccagatgacatgaatgctctcggagtgaccgcatttggaagcggaaaacaacatgaactcttcctcaatagaaaatccgacctggaataacaacaaatacaaacgcaacaactaaaaacccccaaatctatttttcatttttctcaggaaatgctagaaaaaccactaaaacgaaccccaaaaaaacatctttcctggtaaccaaacagaaacagccaaaagggaaaaaaatggtaaagataaagaaagggagagtacctgggtgctttaacgaataacaaaggccgagggagcaaagaagaagaatggaagtgagagtgaagggaagagtaggagataaagcgagaagccatgaaacgaagataaagataaggaggaggtttgggaaggagctgaagcgccattaaaattttgatattttgattttgtttttagtacagaggacacccctgtacatgtacacgagctgtcttttccctcgcttccttactctccctccctgtcctaaaaccctatcccctctttttatttttaattaaaatttttgtatggttatgtatgttatcgttatttaaaatatcgtgtaaatttttaaaaaattcgaaaaaaaaaataactacaacgtacacaaatataaaaaaaatatatatatataggagcattttctctttctgtacgggtagtggtgtgcgcgttttctgacagtactggtttccagggtcatccccgatggtggggagtggtggtgcggacccgtcgtggtgtcttaggtccttgtaccttacctcctctcggtagggtttgcattttcaaatgtgcaagagtctcaattttctcattttatcctcaaaggataaccctaattttgcctggtatttgtgttggctgaatagagtgttttgtgttgtgcgattctcaggggtgggtttgtttgcttttatggatactcagtttgttcacctagagaggacctctttgatagatgagactatggaggagaatgagaatttcttgcttgaagattttactctacaaatcgaaccagatatccctgttgcgaaggatactattgctaggtctattgtggggcgattttttactaaacgggggatgttcaatggcacgttgaggggtgcactttcttggatgtggaagttgtctaaaggttggcgatttcaggaagtggataaaacagaggagaatcttcgtgtttagactcgaaaaagctttagaagctcaagttatcctttgaatggccctgtggtctccctgtggtggttttatgcttgtgtgcccaatgcatgatgatggtagatggcaatctactgatttgaagagtatggagatttgggttcgtgctctgggtgtcccaactcggttcatggctgatgctggggctgtcaccatggcaagctggcttggtacttgtattcatgcgtgtccggttagaaaagggggtttaatagttaatgagtatcttcggttcagagtttgtattaatctggaggttcccttaatggctggtgcgtccctactggatgaagggcataataaaatttgggcgtatttcaaatatgagagactcctgctattttgcttcaaatgtggttggataggtcatgaagaggctttgtgttctggtaagaaaagaatgttatgcttggatgatggtcgctcaatgtccttttatggaccttggctcagattggggtctcgcattgagaatagtttctctcttttggaagcgcaggatatcgatactcgggacagaatgaaaagggatttgaggccaaaagttatttcacacttatggtctatagtggaacatgcattagttgggactcctctcatagcagaggcgctggctgaggatggttctaatcgtcagagaatgacgccggcaaaagagaatgttcaacagtctgctaaccagattgttggtggtcatcgtactgataatggcatggggatgccttcttgccaaaaagaatgaatgattgttatggtgggggaccatactttctc

SEQ ID NO: 17633 - DNA, 2444 bp, Cannabis sativa
  modified_base (2270)..(2272): a, c, t, g, unknown or other
atatatatatattaattgaataatgttatatatgaaaaaagaaaacaaaattatctttattcaggatttggattagtataataattgtatatactagctactaaacacacctcttttaagtaacatgatttagattttattttttaattccatgttatatataaatttagtaatgatgacattcaatgttttcttcttccatattctctctcaatcattatctaattcgactaaacgaatgagttgacacttcgcaaaaccttattatgatcggaaggagtagacgggagaagcgccggccggtggccgttgccgtggcgggtggaaagtgggctcgcacgtgcctttctgttggtggtgcgtgttggggtcaatggcaactcccattgactaaaataataataataattttatatattatgctatatatattgtcaacaacgtaataattcgttcaactagtgcaaaatagttaacacgcgggcgcatatatatatatatatatgcatacagaaagtctttcttttatttaccattgtcgaaccatttgggggtgcacttacaccttcaatgtggaccatatatgcccacttttgagtttaatctgattaattatatcgtttattttctctacaagaaattaaaacgctaaactaaactaattatgccatgcaattaagctcatgaccacaaagtactaattaagtactactaattagtctaacactgctctcctcaatttcccccagcttttatggttgtacttttcgggcataactcaccctcgagtcctcctgctctgatctgagagaacattcaagagggtcttaaaggtacaacactgacaaagccaatatttgatttgaatctgcatttccttgctgccccttaattgtggacccaaacacattaacaaatattcccttggtgtttgggccttatttcttaattgcatggtggttgtgtgaaataatgggtatttacaatatgcattcaaattggggtctaacacacttgatgagtttgtactactatgtctatatatcactattgcggcattgctactactcatggatatctaacctaagctaatatctaatccaaaacccagtttaattttgctgtgtaactcggtttctaactcaactgagttgaaaaacgagtttctttttcttttttgttgcatgccttgatttctgtgtattctattcagatagctagctagctgtttctgtttgatgctcaattcccaactgtgtaattgattatgattggtatgaatgtcattttctcgagaaaatgattcatattaatggtatatatagcaactgaatttttagcagggttactcagaaaccaaagcagagaaaaatttaaataaataaataaaaataataacggcgattaattttatcagatcataataataaccattgtaattgcagagaagagaaagagaaaaaagtctttttttttgttctttctttcccacagcttcaaacaaggcacaattaaattttagcgaacaaaaaacaaaacccaaaaaatcataacataaattttttcagtatagtactgctccatcgaaatcctcttagttaattaatataagctctatgtatgaaccatataaagtatataagagatagaaggtagtgaaacaaaggcctcgtctgaactcttacataatgggttttcatcttcaccccaaaaaccttctgtacatagtaataacaagctagcttcgtatttcaactcctaataacatcaaatttatcctaaaagtaattttttttgtcactaaattaagcatgtctataagactataacttatatatgtttatatgtaaacgaaataaaacaatattcatcaaaaaaagaaaaaagatatgatcacttacacataacagcaattatatataattgtgtctgaacaagggtagtgttgaccaaaaatcttcaaaataatccaatatagaaacgaatcaccgtctgttgtgcaaagggttcgaccccgtaggaactcgtcgtttctgggactcgaaatctcttgctcgatcgcccgaagaactttgaaccggccgaggtcgaaaaacttgatggcttggactcgaatagcgccttggataattaacacgaaccggacttgttctaatggcgtgaccagttttcggagctaagatcgtaataagaaaaagaagaacgagacagaagtgatgaaaccaattattcatcatccttaattatgtttcttcttcttcttcttcttnnntttttttttttttgaattaaaaaatttgttttgagatacagaaatgaggatatgatgaaaaagcttaagagagtttttgtgtatatttatatggatttttgtatgtaacacctgaaagttatgctatatgttagctatttatatatgtatataactttattacatatatata

SEQ ID NO: 17634 - DNA, 3124 bp, Cannabis sativa
aaaaaaaaaaaaaaaccttacaaatcatagaaggttttttgtgcccttatttcttttgaaagattaggatgaatttttggtcaataatgatgataataataataataatgatatgtatttttatgatttgttaataaatgggttataacttaaaagttaattttttttatatatatatatatatatataaaacaatttaaatgatggttgagttgagtagttgtagtctatgataataatgatgttgatataccatgattgcaattacatgcaaactttcccattagtgtatcataccatcctcaaaatccctccacatgattatttgagacaaattatctaataaagtaccccacaaaaatagtcctcatttcctaattgctaaaatcaaggttaaaagcatgcaaagaaaattagttgcaaaagagggcatcatttaaaaaaaaacaaagaaaataaatttaataacataaataaagacaccaaacaagtatgagctgtaagaaggaccacttcttaggcaaagccttatttattaggtttgagtgagtacaaatcaacccatatacatgccttatctttatttcatttcacctttgtattgccccccatctcatctcatctcatctggtacccaaaaattgacaattttgtgcatgtaacttttaaaaataagacctttttaccaccaacccacagtggactcaccacctatacatatataagaaatttttttggtaaaggaatgtcttttggcctcactctttatatttgacatgtaaaagtattataataaaactttttttttaattatatatttatagtgtaattatttagggtctcttaaataagtttttgtaaaattttgaataattaggatgttaagaatcaattttatgtaataaaacaagtcattttcatattctccacacatggatatttaacaatctatttttttatacataggcagttatttaaataattttataaatttttgagaaatttaaatgatttagatatactgaaaatatgaaataagttgttttgaagtctattctatatgcttgtgaaataagttgttttaaagctaattttctaatactataaattatttataattttagaataaaatggtatgctctatattaaataatatatacacataaattccccaatatatatttatattatcacctttttgtttgaattttttttcctgaaaatgagagtagttttattgatgaaaaggttaaacctcaaatatttaaagagtcaaataacatacatggagtattctcagcactataatagaattaacatcctcaatctcttagcataaaaacttctcaaattcaacctttatttgtgacgaagaaatcaacatcatactatcaaagatagataatacactccacacaaaaagcccaccaaatctttgatagagtcacacaaacacaaatatacacccgatcagagccatgccaaagctcaaggaggtgcaaagccctagtccgaaaatcaatggaggtacttggagctagtagctagggagaaagaaatgaaaccctttgagattttattttatttttaatttttgatgatttggtttataatctaataataaaaagattttcaactttccatgttaggcgtgcaagttttaagagtgtgaaatgaataaggtcccggaatgggactcttaaaaaggccaacttcttaaatggttaggcagaaactcataattggtgaggagtgccttccttcattattgacctctacactattctaaccccacttccttaattcatctccaattttgtttttattctcaacatatttccttataatcttattaatcccatcaacaatcacaaccaattataacatcacctattttttattttgtttttatattttatatatatttttttaattttgttttttctggctctaatcgtcaaatccataattatgacataggttgttgagatttattatgctgcttgggttgtgacaccaacaagtgacagttacattggaatattaagaaaattgacactgtataatgaacaaaataataagaaattatggagaatctttctgaacataacctaccaatatgatcaatttcattattaaaaaaaaactatataaacatctggaaaataatcatcgtattgtgatttcaccattatatatgattagtttagtctgaatatagtacaaaaaattgataatctgagtagataatgacaattatattgtttgtggtctgagaaaagttttgccaaataaggtcatgcgaccaggccacttcaaaaaatatatttataattatatgatgatatataataaaataaacagaagaaaacaaagtcacgtttgcaccactaatttataaattatgcaaattttgataaatatatatatagctccacataaatctagactctaattaatatatatgtgtataattagtaactccaatagtagtttaatatactttctataaattatattctttctttacaacccaatagttttaggtcacaccactaccgaatgatagttacactgaaatcagtggtgatttgagttgtgggactttttatatgggtccatccctttttcatatatagctatatatgtatatattttttctgtgggttttttaatcattaacctaataatggtcaccaaatcacatgcatgagcattaggacacactaattatatcattggatatagaatattgtcatattattatacacgtattcgcccacacaaaagaaaaatggagcttcatgcgtataattttgcacacatattgttgtaattttgttaaagttaatgaatatttaacaaaaatataaaagtgtctgtgtgtgaattataaagagtctaacatggaatattagtcattgtttataaaggagtattcagttttgagcaaacatgtgaaaacacacactagactcactatacacgcgttgttcggactgacccaatcgagctagttagtgtgatactttatttttatcgaaaatttatttaataaaataattattttttctttattttatttatttgaaaacgtatttaatataaaactgaatacatagtt

SEQ ID NO: 17635 - DNA, 3011 bp, Cannabis sativa
  modified_base (2970)..(2985): a, c, t, g, unknown or other
taaagcttttcttacctcaaaccaatatcgggtgtgcgagccgatctaggtggaaccatgcttgacaatctcgagtcctatgtcacgataacaaaactcgattaacaacttattcaattctcgaaataaaccctaattcataactggacaaattctaactcttgattcaaaataggataaacaattcccaaatacccaaaaccaggtcttgaaaaatacccgaagccaaaaattacgttccagaaaaaccaagaatttccccctactagccaaccggttaaccggttctccagcaccctgaaaaaccgattaactggtttttggcaggtagggaagatgctggtttttcaccttgaaaccaaacctgagctacacgaaacctgctcaaacctttcagaacagtttaataatataaagtcaatatacacaaacacccaaaactcataaatacctcaaactaaacaaaacaccacacttgaatcaaaattaggttcaaaattcaatttttttctcaatacatgtttaaacagccaaagtaattatcaattcaccacaaactaaccttaaatcaggtccaaatatatgttctaagctccagtttatcccacaatcctaaaacctaaagaaaccctaacaacacctaacttaaaaccttaaaaactgaaagaaaatagattggaaacttacctcaaagcttaaggaatccttaaactaagttaaattttaattaactcgtaattaaaaaatatctattctaaaaatggcattcacgatacccccatagtccgataaaatctctgtaattaataaaatatgttttatttattcatttacccatattttcttaattaactcgtaattagtttaagtaggatcctactctaatactcacttaattgcatatttaataaaatatgtctaattaaatatcattatatttttcgggatattacataaatattttgtaataacattcttatatactaatttattgttatgactctttatcttttttatagaataaaagtaaaagtaaataatatagattaaaatattatttcattgatgttgaatattttaaaagtcataagccaaaaattgaagaactataaaaaactatacaataaattgaaaatatcattagctaaatgtaattgatacatgattcttaaaataaataaagtatcaaactaatacaaaccattaacactactacaactataacttatgcaccttctgccgcatttctaacagataagcaagcaatattaatcttccagttaaacaggaaataatattagaatctaattaatgtatataaatagttacctaatgataatcacaataaatattatttatataaggtcttccatagtaagataatgaggaatttagaaatcttgtaattttattttagaaaaaaatatatcaaaatacaaaaactaatacagtgtagtcaacttgatagtatcatatacctcactttaaactaaccttagcgatagctccttgtattgcaatacaatcgatattgcttgttagaaaattttgattgatactacaattttcattgcttattagtttcttgggaacctgaaaaaaaaaaaagaacaaaagcaacaagaatataacattaagtttctattaaaataggggtaatttgtggcataacctccttaagtggctaggtttttgcaactaactccaaattctaaaattttggtggtaaaactccctaaactcgtgttctgttagcagtttaacattttcatccatttttagttgttaactgccatagtggaatgtctacgtggacacagtgtacacgtggcataattttattggtccacgtaaataaatatttaaaaaaaataaaaaaaaattaattatttaaaaaataaaaataaaaaatatatttttctttaaaaatcaaaaattaaaatttaaaaaaataattttaaaaaaataaaaattaaaaaaaaaccctaactccctaatttactcacgccgtcctcctcctcctcctcctcctccttattcttcttcttctctgctaaaaaatcctaacctaaacctcctttcgtacagccacccaaatataaaaaaaaaacctaaaaaaaatccagagttttgtgctgtgtgaagaaccatgcaaaatgatggcaccattctattgcgagctatctgagaaatatccctctcttttgtttgttgtaatcgacgtggatgaaatgttgaatggtgttcttttcctgtataagaatttcgattttctatattagtgcaactaattactcattgggtagaatgccttaccttggatctcgatctgtggcagttaaaaaaggcttaaatatttgtaacttaatcttcaccttataatctagtttatctattcaaatagtgtaattgttgcattaattccaaatattggctatgagtttccttaatttagtcatgattttgtacggtgcaggacttcagctcctcgtgagatattaaagccactcctactttcttctttctccgagatggtgaacaaattgacaagcttgttggagcgaacaaacccgagctgcagaagaagataattgcacttttacattcaaccgctttgtgatgagaaatgatttggtatcatgaaaagatccgcaggtctcccttttgcccttgtgaatttagaaatgctgtgtgtagaattttgttcggccttaacttgtaaaatgtaaatactgattgatcgcatggaaatggtttattttgttaaagatttttgggatattttggaaacctgcgaatcattcttacaaagttcttttatatttgggtggttgtgcaaaaggaggtttaggttagggtttttttagcagagaaaaagatagaagaagaaggaggaggaggaggaggaggaggacggcgtcagggaatcagggagttagggtttaatttttattttttttaatttttttnnnnnnnnnnnnnnnntaatttttttaaaaaatatttttttt

SEQ ID NO: 17636 - DNA, 3926 bp, Cannabis sativa
atacaaaaattatataaaataaattaacaataatcatcatgaaattttaaggtatacaaaagctcctaaattatgaagatgggtacaataaaaatgtataagttcattcttacctgaaactttgttagttttcctctaaataggctgatataacaggcacatggaattataaaagactgcattgaaaaatcactacaaccctttagtacatataaaaatatatatactatcatatatatacatatgtatgagatatgattatatatatgtgatgtgaagaaaataaacttaccactagcattgagcatatagaaccaagtaattgcattacaatagctgcatacatataaataagaggatacacagttttgttagctcgtgattggtaaatgcaatataaataaatttatattttaaaaattaaataagtttagttctacttaccaaagaatggaacagtcaaggctacaaccaaagttgacaaaactaaaattgttctaataaaaatggagacaatgtagtattctcttaatgcttctggcaaaagctcttctaaactcaatgtcacaggtgtgagtgtcaaagcatacttggttattggattcaccaccttcatatatttaaatatacaagtaattaaacaaattattaactataatttaaattaaaataataataagaatagaattatcactatatatcataatatgagttgtatctatatattagttaccattgtccaaattgcaattttagaagcaacaaattgtttgggcatgtttaaagtaaactgagattgagttgagtctccaaacattagaaaagcacaaaccgcaactccaatatagagaaaactacagaaaataaagctgcatccaataaaataaaataaatcaatataaaaacaacaagcatatatatatattcctctagtatttgcctagatcattagaacacattcttctatctaaaaacttaatttacatgtgttctcatttaatacccattttgaaaattatatgtagggtatataatgtatcttctatatatatctagttcttgaaatttttgtattattggtagagaacataataataaatatcatttttcatacctgccgattaaaacaaatggaaatcttgagggttttttcattgaagtatagatatttggaaaaaccgaatggccagagaaagcataaccatatatgccaattgtggaggacagggttgccatatttaagattggtccacgcccatgaaacccaacattgttcaccacaccagtccataacaagcaaagtgccaccaatattgatgaaactactcctccaactataattaacatatataaatagaacactctacaatattcaaatcaaggtcatatatgtaattgcaagaaaaaaaatacaccaaacaaaattacttcacgaagtgatattcttttacaaaattctttcaaactatcatatttccaatacacttgacactacacattagaaatttatattgtgacataaaggttacctttgcaaataaagaagacatattatttgtaattaatatgcatttataaattagtagtagctagttgtatatatatacacttactagagaagtatgagagcagactaagatttttaagccaaacagttggaagaatgactagagttgctgaaatagcgaagatttgatgagagctgagatcaaatattccttccaaactcatagagatgttgtttgagagcaccgatgtcatattgtcactgatcatggttataaactccacacaactaccctacaaaaaccaaaactattcaccttttttttatgtgtcaaacaagattaattaataatatatagttcatccgattataaaagagggcttgtagcttggaaatatgtttgaaagccaagaccaaggaggatcattgggtttcaggtgtattgaggaatagtatgtaggttctattggtaaacatgtttggtctttggcacagaaaaataacaatctttgggccgggtcaaatgagttcatgagtgtatatgaaagatacaaattggtgggattatgaaagcaagaagcagttggtattggactcaaattgtgattgtgaaggataaattaaaagctaacttttctaaaattcagctggaaaacatgaattactccattaaaggaacttgtcaaagcttgtttaatagcccaaaagaactcagctgggggttgccaagcaggtttggaatcgattcagcattctaaaacattgatttatttcctggttagcagtttataacaggctaaagatagctgatcgttttcaaaagcatgggacccaaaagtatgaatacttgtttcttatgtggcttggagatggaaacacttgttcttcaagtgtagtaggtagtgtgttcaacaacttctctctaggtgtgaaattggttcaaatcagtttcacttcaaaggaattcttaattggataagaaggtcaaagaagagcagggtttgtattctttagtggtaaatgcttgtatatgctcaatttggagagtgaggaacaaagttttgtgggaaaaaaatttacaaagtgttaatagctttattcaaaatcaggagattgggcgtataggggttgtaggatgttataaatatttgatgtacatatgtcttgaagtgcaatacaaatcagtttatttaccccccaaaaaaaaaaacgattaattaataataacaacagaattatagaataatcgaattggttggtggtcggcacttacatataactcgaagtacaaaacaatctgcataaatgaccaaaatttacccccaaaatattagtgttatttgttatatataaaacatacataagaaagggaattactatataaggtaaactacaattgtgtatcttgaattcgtagaatttagtatcaggtgtggtgcacatctattgtaaattaaaatatatgtaatcttatactaatttgtatcattaataatagtaaaatataaacttacagctatggctagacgaccagcgcggccaaatgcagcttggccaatatctgggaaagttttgagaccaggattgctctccaagcaacgttgtagtaatatgccagtataacaagctataatagaaaaccctacaagcaatatcagacttagccaccctccttctcttaaggcatatggggttgtaagcagtcctatgccacaaaggacattaatccctgtccacaaaagtatgaaaaaattaatctaaaaaaaaagtggttgattttttattctaagttttatacattaccattgagtaatgcttgagcagtgcttgaagattgttgcttagatggtggcaagtcgaccgtagaagcaacatgtcttaagtttgggtaggaagaagttggagtaataatggtggtaccatcttgtacttttccttcttgataatcttttttttggtttgatgaaccaacaactggagtagtagaatcaaggagtaaaggtttattcagcaataaatcgtcatgtggatgattagcagcatatcttggtgacattttgcttgttctcactccacacaaaaaccccattggaataggtggactcacacttgtataaaaatccattgactgcctgcatacatatttcaccctgataatcagcttatatttaatgaaattttaatatgactctttctagctaaaagaaaagaaaaatcccaataacaatataaaaagtaatagttcgattgttaatgtgtaattctctttttattgactgcctacatttatacatatttcaggctcaatttttccagtgcatatatatatacatatcactttatatgtagaacaaaagtcataaaggaaatcttgtaccctaataaaagaccaacgatctacaaaaacatctatactgaa

SEQ ID NO: 17637 - DNA, 1857 bp, Cannabis sativa
gtagtttagccgccaaaaattcagtttttgtggttaagtgttacaaaccgtaaagttcaggtgatttagccgccaatatcccttacaagaatgaactcatttcatttacacattctaaaaaaggtagacatggtttagatacaactcatgtaggaaagacttgccaccgtcttggccccgctgctgctgctggtccacttgacaaactttggccttagctggtgtagcaacagttactgagggcacattaacaagctgcacattgaaataagactgcattattgtaggttctgtaatagggttaacatcctaacttcaccaaaagcatcacaaataacacctttgacagcttgtttgtcatctataaattaaaagataacagtgaaacaaaaatatacctctaggttgacatctattccaaacttgttgagcatctggtttaccaattttctccccttcctcatctccttccaaagcatcatcgattgcatcggccatcccatcagatacgaactccatcttctcattctgcctttcaaactcttgcataattttctgtagtgatgggaggctcatctgtctgttcacttggcccatcgccttcgtcacacctttctttgcctctcccattagcttgtgtggattccaaagtctgaaaatagaagagtatatgtagattaatcaacacttaagaagtcaacaagagctatacctcaaggaccataaagaatcagatattatatcatttagattagactcaaattctgatgtgacccactgatacacagctccaaattatagaaaaatagcaagaaaagaatataggtaatagatgaaaattgatctagttgatactgataatatcaaaggtttacagtagaagtccctaggcaattcgagagggctctctccatgatgcagagaacaatctcttaattcttgcatatcccataatatccccttactcacctatatatactacccaattcccaactcaagaaccatcctcaatacaatgactcaaattatcctttttatctagtgtactttagcacattccacacaatcaatcttggggtctagcaaattccaatcgacggtactcttaccattcttcaccaggtaaaaataagcaaatacagtatcttctattcacagttgtaagaactagggagaaaatatttttttttcaatgtttgtgtcagtttaaattaatttaattcgcaaactaaatattacctggactctaagagatactccttgaagttgtgatttgagcgtgtaaaacttttcaatctgatgtcttgttctaaccaggtctttttccataactttcacagctccctgaaacaaaactaaactgcatcaaaatatagttggatatctgaagcttaaacatgtcctctccatgaaacccataatgaataagatccagaatgagccaaatgaaatcatgcaccattttcccttgcttggcacttttctgaatctcttgaattaatttcttctcttgattctgaagaccttgtctcactttctgtttctctgatttatttgtccagcattctcttattttcctgcataagttctgacattataatcatatatgcttgttctcagcttaaaaaatgaatactttaacaaagtaataatatactcataataatgccaattctcgattgagcatgtgggtgataaagaaacaatagaaaataaaacattatagaatgtttcagactcaacaagaccaactatgctcctcaagcataagcacggaccaattaaaactccattctctattttccaatacacgtacacacacaaagcatggaaaatccacatttacatataaactaa

SEQ ID NO: 17638 - DNA, 5497 bp, Cannabis sativa
ttagtacataaacaattactaaatagtaaaataaaatgaaattaaacaaaagttcttaaatctaaccatctcaatagttcagggagaatttttgacggtcaaaaaagtttaaaaagcatgatttggtgcatgttaaagttcaggggccaaaaatcctaattagccaaaaaataatgataatgtatttatttatttttttttattttccaggttgctggttttcttaactacaggatcatttgcaatactagttttaccatatccaatgtggttgggccacaagaggctattgcaatgggagataaccctataacttacatgagagtgaactcatccagtctacctcatgtacttatacatctctttcctatgctctcatttaattttttttgttgttaattctcattaaattttagattaaattaataattggaagaaaaaaaacatgtaggcactgactatgcacatgttgagttatgctggaagagctgatatgcaaattttggtggctaaagatataatcccagaccctgaattccttgctaagtgctttgaagactctttgcttgaaatgaaggaagcagcctcggccattatcaaaagtatctgacaatctgacatacacacatacactgatatatatgtatcggtaataattaggactcttttaaatattactatcagctactttaaagtgttcaacttcaacataattggcgcttctaaccgttttgtatattacttgttaaactaaaatatacagaagaacacgatattaaattgaatcaatagctatataacatcttaccttatgagatatttctttttgttgaaaatgatatcagaatttgtattgttgaaactttcacaaaggaagtttagtactaatgttttatcttcttattattagcttcattaattctaagttttaagatatggtgttgtatgatcacaaatttacagttgatttgataattacttatatcttttcttatttactctatgaaaacgtctgtactcaagttcgatccttaacataagcaagttaagtctgtgcctagaacccacctaatttaggagttcaatttttttttccttttcaaaatacatatttttttttattaattttgaaaaatactatattttttctaaataagaaccaaaaaataattttttttttcctataaccaactaaatttcacggtcgaacacatttttctcacaaatttatgctcccttttagactttgttcttgtgctggttttggctcagattttggagcttgtatgacagattgcttcttctactttattatttaattagtgaagactaagattgttagggaagtcctacgttggatgtaatttctcacataattccttttgtatgtattcttgttgagttttctatttattgcaaataaatatccctcgtaacatataagacactttccaaaattttctaacaggagtgcccatcaagcctccctactgcttaaaagtgagatgttaaccacactttaataagtatctagaggcatttttaaattattgcaatagtagaagtttatcaataatagttatggcttctttcattttaatgtattgagcttttaatcttattttaactaatcttgtgctacgcatttctggttctcaactcaatttcttttcttttcaaaacaacaaatatacatatacacatcacccatgtttacagaatcatagcacacacactctctctctctttctgtctctaaaatgagacaccacagttaatcaagaacaactcaaatgagcttccttttttcattgcctccatggcaatgtaactcttctttctttaatttttatttttttgttctaatctgttagtcaaacttttgctggaaaccgagatttgtgactctgtcccttctttctccttcgcagaagcttccgcagcaaatcgaaacctcccttcttcttgcttggcacaatagccaaagccccagctgcattgttactgattttgcaacttgagctatgacatgctaatgtagtatgtgccgggacactaggagaatcgattgcattcatgctatctgattgagatggcttttcatcggtttccacattgcttgacatttctttgacattttgagaactgacaacctcagctttaacatcatcctcggccagcattttatcacgtagcgaggatcgcttgcttaacctcttatctttgttggctacgggcgtttcactcgtggtggagaataccttatctaagagtgctgcttccctcggcgaagccagtgctttcagctgttttcccaggttgacaattgtttcttggcactctgccaactttgctgaagctgttgtgatctcccaatcctgagaattttcactcataagcttcatatgacataatcaattgaagtaaagtattttaacgttatcaagattcatttgcagtctcattttttggtgtagacttacattttgagattgtttttcctcttggtttttgaaatctgtagtttcttttgttgcatcactaaaagaaaaatcctcatatcagtaattctcagaaaacattagaactaaaagtttgtgcagtaatatgatattataattaatctatttgacaagaatgttacctttcaagttggagttgaagctcaagacatgttgcttctaactcttcacaacagttacgtttgtcctctaattcaacctctaaagatgagaccttttggtaaacttgattcagtttagctttggcaacactgagttgagtatcaaggtcttcactaatcaacttctcattttcaatctcgtcttcaattgaccctttcgtttctttcatagtctccagttcggcttgcaagcttcccactctttgttgggattcttggagctgtttcatcaacgcttcacttttttctttcgctgaatgtagcataacttccatctcattctttacagatataatattctcgagttcatttctcaatttgttgttttcttcttgtaacgtcgaaggaatgttatccactttgatcaaagcttgttgtccttctccaaaagcaaccaagggccaacccaatgagtgtttttcagatccaacgccttgcgattccccacttggtagacatacttgctcatcattttcaccttgtgtatcatccaaaccgaaatgcttcttgattttgtcccttgcacttgcagcctccttgggggccacatagttattcaaaatccactctaaagtcgatgctgcgtcctctgcaaaatcttcaagacgggcattcccattcagcagatcatcacaggtgttgataaacctttgtagcatagcatttagttctgaccatttccattgaaaaacatgaatgtagtagtcagttgaaggtttatcaggagaacagttcccaattacagatcctggattggtgtcttgaattagcttaatgattttgcagattgatttactcagattacgctgaatgtgctggttcccgcctacctcaactgaggtttcgacactcagagctccagtcaaagaatttaggactgttgatcttttcggtgaattccaaagatcagtttctgttggagtcctagactttggttgatggttagttggctggttaatataaccaacagaaaacttgatatcatcaagtagctcttctagacttcttttggaaacatgtttttgatcaatcattgcattgagaacaacctgaagccagtcaaaggatttgtcatcatctttgtgctgctccatgttcttctcaccacaatgggagagagcttctgcaaccggaaccagatccccatgagttagtgtgtcagcagaaactattgccaatttctccatttcaacaaaatcatccattaagctaatgtctgaaccttcaaaggctttgcggtttggtggatctccaagtttcccatttttgaattgttccaattcagaaattagagcactagcccaagatccagaagatctgaatgcattttcacttttcatgtcaaaatctgttgacacaaaaagtttctttgctaaaggattagattttgacagctccattgatttctggcctttggaagctgtttctgtatgtatggctcttgacaaattgtgttcaggactcttcatgtttaaaatctttttaagggcttcattttcttcttcaacaaaccgcaatctttcacacacgaaattcacatccttgctcataatttctaaggaattatctatggaagcatctctaacaatcaaatcttttgtaggactaagctttcttcttctcatcatctctgtctggtttcttccattcacttgaacttcactcttcatattcctagacaaaccgagaggaccaggaagacgctttcgcataggagagcgtagtttttggcattcttgttctaacattgtgattctcttcacacactctaaattttgctcctgtaatacatcagcagactggcgataatactccatttcttcgttacgaatctgtagctctttttcaaccatgtgaaactcatatttcagaaaagcattttccttctcagtagaatctactctactcatcaatgcactaaactctgcatcagattgagacttgtgtctgtttaaatcttcaacaactttttctttcacaagaagagccttggtaaggttagaattctcaacagctatatctgtgagctgtttacttgcctttgctaatttctcctctaatttcttctgagccttctcatattctctcgatgccaatatcaccgcgtcatgtatctttttctcagtctcctcttcaacaaagattaactgccgtttgcattctctatgtgcagcatctgaattactgaatctttcattagcagccactcccttcttcaaagcttcatctggctcctgctttagaggctcaacctgctcttggcctaaacaaaaattcattcattgaattacactaaatgtcaaaacccaaatgtagttgtcaaacatagtttaaatagttgaagaaaagcataattttgaatcacctttcatggtttcttgagttattttcgcgtttttcgccacaagattatgttcaacatgagaatctagtatgactaaagctaacttctcattcagagttttaccagtttcagatccaactcctttttctgttggaatcttttgcacctaatacaatcatattttggtaagatacattcattagattctaatactaaacattgcttactagaagaaaaagcagctcttgttagttacctcaggattaccaactttattagctgccaaaattgtcttctcagatgattttttcctccaaagccaagacttgtgatccatgatatatatttttctgtaattagagtgaaaaaacaggactgtaaataaatacatatggatagaaattttaaccaaaaaaaaatgacagatcccttggtagctcagctgggatatcaacttgttttcaatgttt

SEQ ID NO: 17639 - DNA, 3973 bp, Cannabis sativa
  modified_base (3857)..(3861): a, c, t, g, unknown or other
aaacactaaaatcttaagacaactgactagaacaccatagttacttgttccgaatagttgaatactgttaaaaaaaataggatcaggaccaaaaaactacagcaattgatatgtgggtaccccggagggacttggaactcagacattgtagaatagttgaatatttaactaacaacaagttatgttttagtgaaaatagaagaaagagccaaaaagccttttaaaaatgaactatgatcatggagctttgtcatgtatctagacaaaatcaagataaccttctgtcatgtggaatttacaggagccaactatatcttctttctgaaatcaatgtctttgcatagatgttaacattaatattctttgtcatataatgtaggttatttattctccctaaatcatgcccggttggtggtcttaatggcaactatgtatgctctatattgtgtcaaagttcgtgtgggatggcttggtgtttttctctcaattaatctttcaattttatcaaatgatgcattgaatttgatgctccaatggtgtgataatttgagagaaactacacagtccgaagagcagaaacattcagaaaccattcttgaagatgatttccttggggagagtgaatactctgccccaacagaagaagaatctgagaagctgcattcctgtaaatcaaccagtaaaccagcggcttcatctgttattgataaactgaaagaaactcctgttatcaatatagtgaaggagcaaacatgttcagttgatgagatgaaaagaattttaagtagtatggaccactatgaagcactgggatttccacgacacaaaagaattgatgcattagtgcttaaaaaagaataccggaagaaggtacctgtttcatcccctttcactttccctttgtctttcccttatttctttttattctctttttatttttaatttattgagagaagtagtaagagcacttgctagcaggctcagtttcactaccattgaagttgtacaagaaccatcgagctactatataaactcagaataattactttctcgttgtttaagaatgttatctacgtcttctatgaatgcctcctaatatacccattaatttttctcaatgacactcttttatttgtaggccatgcttgtgcatccggataaaaatatgggaatgccactggctagcgaatcatttaaaaagctccagtgtgcatatgaggtaaagatttctgttcacttttcttggctttactgccgaaaagatctatgatatactttaggtgggtaattgaaattaagttaaggataataggtgactcattcagataagagttgtgattgcttgcctaatagcttagagtgtaatgcacgtgagatgaaattactctgatattatcttttgtctgtaaccaggcttttagtaaataaatagtacctataagagaaaatatttgaatcagtttaataaagtttgagattacaacagtctgacaatatgcattataggttctttctgattttacaaagaaaagagactatgatgagcagttgagaaaggaagaatccaggactcgcagtgtctgccaaaactcacatggtacttcaagtcaggtgagattatacttgtaagactgatgctaaaggcacacaacattgtagactcactagtgtgacttgctttgcaacttcctatgaacttagtgtgttttctctttgatttggtgaatgaaaattgaaaaatgccaagtcgttgtgtattttgggtgtaaattgtctcatatattgctacttgttacacctcacaagctttggggaacttattgttgtgtgttttcattatgtaaacctattaaggttggtataaaaaatgctctgggctatattgggggattttctagtagtaaggaaggaattgatgaatgattcttttgtctattattttgtttgatagaaagttgctttttctcctatttgtaatttttattttgttaataatttgttaattctgtatatggagaagcaatagaataacaaatagatagtggtaaaagttgcaatatctgttttaaatctgcacaaaattatgtactttgtgaagttatgccaaatgcatatgtacttcaaactaaagataaattgaacatttattaaatgcggattgagctcaatttaattgccttaccatacttttactgtaagcaggacggtccagattattgctctgaggaatcaagacgtatacaatgtactaaatgtggaaattctcatatatgggtgtgcaccaacaggagcaaggcgaaggctagatggtgccaggttagataccagtcttatcattcactactctctctctctctctctctctctctcacactgtagatgatatcatgtgacttattgaaggttttctgttatcaggattgctgtcaataccaccaagcgaaggatggagatggatgggtggaatacaaaggctctctggtctttgataggcctcagaaggtaaattccagaagttttttcttgatttttttcatatgattgcacactatgcatgaagtccctatccttcactctgttaaattattcagctgaagctgctaacttcatgattttattttttgaaagaggggaaaaggaccatgtgttttctcattgcatcatttatgaacttgttatatttgttatttgatgatgatcttttatgtttctgattatctcgcttgactaaggcttgcttgcctcaattgtgaaacaaacctttattcctaaaagctcatcatcagagacatgtttgtcttgggatttatttatgtttacttttgagttttgactgattacatttggtgaagttggaatttgctgttacatcgtaaataattgctcttttgtatgatacaattgatgatgctgaactttttttctctctcttttaggttgagataccacgtgcctttgtttgtgctgagagcaaaatctttgatgtttcagaatgggccatttgtcaggtcagtgggttaaattagttgtgtattatatacttggtctatatgttctgtgtcatttagccagtgctctgtttcatatgcctactttttagagacctacgcaaaattccatgttaatacaatcactattttcaaaaatactggaacaattttttttttttatggcaattttaccttgcatctaattaggtatatatcttacaaatttgatttgtgcccattcagggaatggcatgtagacccaacacacatcgaccaagtttccatgtaaacatggttggattggagaaaactcaaagatcgaactcaagtagatacccatgggatttggatgctgaaatgatggatgaaaacgaagaagcatttgagctatggcttcaagaggcactggcttctggcctcttttgtgagacatcgaaacgcaggaagagctggagtccattcaagttacctcaaaagaaaagcaagaagcaatggcgaaggacgtcatgttgacgaaattattaaagaacttgcaagagccaaagaagacaatttttttttgttgccaatcctaagaaagagggttatatctctgccggatgaatagaatgggtgattgccagcatcaagattaataagtagattaagccattaaaacctggtaactgcttacaagagataagaggggaaggtttacattgttgagattaatcttgttgggtacctttgtatctctacccgaaaaattagggtgtttcaagtttaagagcctaggtttgaattgcgctgctcactgcaagtttagccacactcaagttttcagtggctgctggggtgaataagctcctcagtaatgtctctgtatcnnnnnttggtgaggcattgtaaccttcttaggaaatcattgtggaacttagcatctttttgtacatattttcatgttaataaaatatcttgttcttatgctgacctaggtctattgt

SEQ ID NO: 17640 - DNA, 9641 bp, Cannabis sativa
ttcaggtaaagcccttgatatgggtagaagctcaagttgaaaggcattcaaagagtcgtgttgagatgacggttaaagctaggagccagttcaaggagcgtaggtactttctgtatatctattttattatttgaaccaggctggaacttgtgctctggttttcttcttactcatatatctagttagtctaattgcactatgttatatcaaataaataatctgaaaaaaaaaaaaaacaaaaacaaaactctaagtcatctattaattgcaatcctacagcactgctaccaacgttgagatagagctgcctgtgccttatgatgctacgaatccagaagttcggacgtcaatggggtctgcagcatacgcaccagaaagcgatgcattggtttggaaaataaaatcttttcctggtggcaaggtacacagattgtgttttcctgtaacaatctgcgactaatttgttatttttatatgtattccatattaattttttgaatccaacatatttaggagtacatgttgagagcagagtttcgtcttcctaccataacagcagaagaagctgctcctgagagaaaggctcctattcgggtcaaatttgagattccatattttactgtttctggaattcaggtatgcattatagtccttgattctggtcactaatattatatggagatgctttattgaaaatcttaaggttgtatgcaaatgcgagacagaaactttcatgcacacatttgttcagcatgcaattttgtgaatatgactggttttttgcaggttcgctatttgaagatcattgaaaaaagtggataccaagctcttccatgggtgagatacataacaatggctggcgagtatgaacttcgacttatataaacccgttcccaaaccaaattcacagctaatctttaattgacgaaagattgggactcccatgaatgaaatcagcaagaaattcactctgttttgagagcaatatttgtgctcggccttgcgctgactgttatcacgatttctgtcttctattagtagcttttaaccttatttttctgaaaaatagcttttttctgtgtattaaactgtgaatcaatcattcttttttttcagcattgtgaaaattcattaaaattttatgattttttggttcaaagcagttaaatatttatgtattttctttgtacatgttacattacagacatataatcatgactccagtttctatttcaccaataactaattcctgtcaaattaattgtttatgggcagtctcactaatcccttattcaaataaacaacttaccatatttaaaattaagtttctaaaactctttgattacataatggaactttatctatatattataactaggaatcatagtgtgattaatgagccaagacttatttatacacctttgattcagaacaaaggagaaattctgttacaatagaatttgttacagttggcacaagagtacaactacactatctacaacctaaactaattttctaaccaaaatcaagttgttggttatcattcttcctcaaaccaaaagtggtatttacaactttgagtttagttttgagatacaaaaatcgatctttaagcaagtatttagtaagaatgtcgtatttacaactttgagtttagttttgagattaaaaaatcgatctttaagcaagtatttagtaagaatgtcggccacttggtcaactgatcgcacaaaatgaactgaaagtgtattatttagaatttgatgacgaataaagtgtttatcgatctcgatgtgcttacaccatgcgtggagcctcttgattattgacccaaactataggaacatcagcaagaatgactttcagttcagaaagcagggatcgtaactacatgattcagcagtggtattggctaaggatcaaaattctgattcgttagaagagcgagcaacaactttctgcttcttagcagatcacgaaatgagttttggaccaaaaaagacagtatagccaatagtagaacgcctgtcatcaatacaactggcccaatcgacatccgaataagctacaattgacacaatcgatattgagttcttggaatggaataacttctaccactacaataaccaccatgatgaccacctcgaggaggagatggagttagaggataaggtagaggatataccattccataactaggatagccaaaaccataaggattgcctctgtaagcagggtgatatgaacctcgaccaccattatgagggaaaaaacgggattggatgaggagagaggcttggatgaggcaaggtagatttggtttgatctacaagattagcctcaggtttggaaatgtgaagctcataatcttgagtctctttgcatacttcttttgccataaccagggattcaacctcagcaacagaataagcatcttttcaagtcaagagagaggtgataaaaacagagtaatcacacagaagcccattgaagattgccttaatgtgatcttgaggtaaaagaacgtgaccaattgatgccccaaagaatctacaagatgcttgatctgaagaagatagtcattgagatttcttgtgagacgagtgcgatggagctgagtgagaaactgaatgatcttagcacgattatgatcctttaagactggaccagatttgagctgtggtattgcatatgtccatgcgcgtaagaatctttttagacatcaagagaagaagccatgaaacaaggagactatcccaaatgtcgtattcaataaattcagggctaaccgtgctagcaagttcatcttcaatcgtattcaattttggaggagttgaggaataatcaagaatttttagtaaacgacttcctttaatgacggcatagacttgatgtcgccatggaagaaagctgttttcatccaatttgacagacaaagaatgattgaacgagaatgagtgtggttttggtaacgatgatcttggagcttttaacagtggagtcaccaagttgagataagattgaatcagccaaggaaatgattggatcaagaaagcaaatgataccacttaagagaaacgaaacctcagataagattgaatcagccaaggaaatgattggatcaagaaagcaaatgataccacttaagagaaacgaaacctcagagtaaataaactaatgttttgtattgatattgtaatcttgaataaatgatacattgattataacttttatacagagttcagagatagaattagttatagtcatatatagagagttagttacaactgaaaggctaacaactaattgaataacataaaaataaaagcatttatctctacttaagatcctattctctaacaccttggctcgtaaaaaatcaccatgagagaaattcaaaacctttcatcacttgagctacaactccagacaatgaatgataaagatgccaagtttgcttagctatatataggagagccttattaaaaacaaagagatgtctaaaccacataccacaacttgtgcttacaaagcctttgtcaagaactactccaatgcatctttctatttttagtccccaccccctaaatatataattacatttttatcaaactttttgttattttgaatccattttcctcttgtctcataccttttttgttgatccttctccctccccacttttgctcttctcaagtaacacatgaaataatataaatatttagaagaagaaaaattatgcattaaaaacatacttatataaaatccataaactttataatttctttttaaataaagaaatctcccatttttagtttaaatccaaacaagaaaaaaaatcattaattcagatattttttttgttattttttatatatattataatttttggtgatcgaattggacatttattaatttaaaaaaatggacatttatttgattaggtaactattgttcgagaatttataatgtttggaagattgttttatccttaaaactgagagccaatctcagagggatgtaattaactagagaatcatggttgaaattacttaattatatgtttttgatcttgttctgttaatttaaattgggtaattagctagaggaatatatatatattttagaataagaagcttttatatgatgatgatgattgatgaaacaaattaatatagccgatcgagaattgagaatcatatcaaatatattaaaaaaaattaataataagatgcagtatacccttgaaggtttcagctcttctaattttaaggtcttcttctttgttattttttcatatttctaataaaatgcaaatttataatgagtatgatattattattaatattcttactcattctttattagatgattcttaagtttagtggccgaatctttctccttacttacactaatttcttatacttgtaatgaactctggatttttttggcttcttttgaatggaatttttcctttgtctcaataataataataataattaactgtagtcgttgatcaatttgctgcaccaaatattacaatataacagaaagagctatatatatatataaatagataagctcacaggacgactatataacttaacaaacaagatacaaaacattaaaacataaaaaccatttcttaaagaacggtcaacacacaaccatttcttctaagaattggcatatatataaatatatatatataaattattcttattattaatttgttttaattggctttaatactctcaagcctatccaagaactgttgaaacacatcttccctactcagtatactgactctagtatagcttgaatcagatccaaatcgtttcccacctctccccaatatcttgtattccttcaaaagcttctcacaatcttctacaccttcttccttacacttcagccaagcaaatgctacaccatataaaattaattaacatcatttaatcaaaattgggtaataataaattattatacaatacaatacgtaccaggatatgactcagtgcactctccattaaaaagacaatattcttgagagtacttagggagactaaaaacattgctacgaccaaccacttctctcaacctcttccatctattctccatgagtttacgtgaaaactcaaagaaatgagtgttgttattattattattgttatgagacttgaaatcttggtaatcatcacaaataactttcatgatctttgcagctctaatctgagaatctttcgacactccaatcgagcttagctcaatgaacttggtcatttttctagctatagcctcgtctttcacaagagcccatctttcaaaaccaaaaataaacgagtcagtatataaatataaaaagaaaaacttacaaaaatagaatttaggttgtgttttcataaaacaacagtggattacaaaacagaataactaaaaacaacaacagtgaaacaacaattaaaaaataaactgtagaacaacagtgaaaatttaacacaatacacagtataaaacttatccagtatttttgtaaaaaattatgccccacaataaaaaaaagtataaaaaaaattgaaaattttagtaggtagtgtaaatatctctattataataaactttgtaagatgtattcgatgtgggacaattaatggttggtatttggtaattggtaactggttacgtacccaatgcgagaaccggcgtggccagtgctcttggaaaaggtaaagtacataatgtcgtgattagcaggacgagtgattggggtgtactgaggccaataataggccatgtcgtagataatctttccttggtcacttattacaacagcttcacgagttgtgccatctgggttatttggggaagtaactacttcaatataaggtccatccttatcaaatgcatatgcatcaccaccccacttgtatagtccagatctcagataatccgcctcttcagcatattgctacattaattaaaaaaaataaataagcaattaatgatccaaaattgtatttatgaacacatggccatgttacgatatgttaatgaaaaacaaagtacgtgggttgtgttggatgttcccaaaaaacatgtctgtcgctttgtcttagggttccatgtaaacatatacacatgtcttctattattctatacaacacttatttaataactcctcactcactaatcactacccacacatacacataattttccaattttaattcacaagtcacaccatcaagtaacatatatattgctttgtaaaattaatgttttcagattcctgaaaaaaaaaataaactaaaaaagattgccaaaagcagtgctttgtgctttttttttccaacatttgtggctcatcacgtggcctaaaatgattgacaatatgactaattatgagaaaatgctaaaaagttttatatacctaaatcaatatggttattagttcaattaattacgagtaataacttttagaaaccattataatatatctaaaagtgttaaatagtactggtacacaatatcaatactatataaaaaaatttgattttcacaacaaaaaaatcactctttttttttttattttcaaaacccaaatgagaaacaatcaagaaaaatcgactcacgataataatgaaatgattaacagcactgcaaagattaaaaacatatgttatataattaattaattttcttaaaatccaccaatatcaaagatctcggatccaaattatttttaatcttttttttactttataattattacatatatatttatggttgaaacttgcataacagaaaaaaaaaatgagttggattttcttttttctttttttataaaacaaaaacaaataatagataagaatgtgatgattcagcaaaaaaaaaaaacagataagaatgtggatagagtaattgaaaaaaactgaccgaatagtaaggagcggcacaaactacgggaacaggtagttgatcatgatgaagagggttgttgtcaccgtcaccgttaccgtcaccgtcaccggcgaaggaagtagtagtgatagcgtagagtagagactgataaagctgagtggagccagttccgacgaccacataacggtcatcgatgacggcgttacctgttaaacggtggagtttcttaatggcattttccaaatcttgctccataaaccaacaaggcttttccacatcgcttatgtaactcatcaactcgcttcctttaatcacaaccgtacatttctcttccaatctcttccagtacgcctcgtacaccgttggatcaccactgcatatatatatatttaattaatattatttcaacataaacaaaacacatacatatatatacacaaaacattaaataattaatcttactgatcaagattaagaacaatgtgagatgataatgatggagaattgagtttggtggtggtggtgccattggtagaagcttggttctcactgccacacatctttaattttctcctctgatttttattttttatttttatgtattgaaatattttgtagttgggtcacacttgttgggacttatatatgaatatttatacctatatatatataaatatatatagagagagaggttatgaagatgcatgaaccaattaatattaatgttatagaatccttccatgttgtttttcctttttttatgttttgctttttatagagagttattattttgttatttcaaaatattagtgtgttggaaaatccatatagtaatgacaatatcttacttttccaattatgagagattcccttttattattttatcttaatatatatctctgttcaatttttggaaaaaacataaaagtgagatattgttataagaatgtatatatctcatgacttggtatatatgtatgtaatctaaaaaagtgttcctttttgggctaaactgataaacatcaaaatactaagtacaaacatttcttacccaaaaaaacatatcaaagtttggaaactactgagttcaggtactttaggaaaatagctagtgagaccaaaagtagaaagtttttgactcaatatagtaaaataaattattagcccagtctcaactttttttttttttttaccttttatgaaattttacgggatttttttttcagtaattagttaaagatatatgtcatcttgtcaaaaaaaaaaatcatatatgacaaaataaattaataaataaatacatcatcaatgatttcatttcagatatacatactaagataaatatcagtggaattattggaaagattcatataataagtgtataaatgtaaaacaaatgatttcatttcgtaataatttatctatatttgataatgaaaagatccataataataaaagtgtatataaatgttaaaataactgttacactcatggcaaatacagggaatttgctttattttatttatgtataagcgataaggcctcaaagataaaacttctcttttagaaataaggctttaaaaccctttaatgacaatgctagacgttttttatatagagaatgttttttattgtgtaattatttatatgcaatattatgaaacatgggagctttcatatgtaatgtacgtgtgtacgtatgtgtacgtatattagcttacaaacatcaatggccatatacttctaacctaataataaatggtaattagtaatagaaaagattagaaatttattccattatatttaatttgatctatttgttggattaggaagcctagagaatcatgataaatatattctttctagagagaaatttaattgacagcataattaaggtcgtagagaaacaataatctcttatttgctccttgataattatatataatatacctcactatttgatgactcaattcggtttagaaagattaagaaatcatttaataatatgagaaggagataaggtcaattttacttattttgaagaaacccttgaagatgaacattttatttttttaattttatgcttttgttatccatgttttcaagtttgccgctaaattatttaaattttaaaatatataaataccgttttggatcttatattttacaaaacataccgattagaccctatattttgttaaattacaatattcgaactttatattttttaaaatggtacaaaaatataatactctgagttcaatttttataaaataaaatttaataataagagattattgtttctctacgaccttaattatgaagattatactttatgcatttgtttgttctagaatttagtttcaagtttgttatattgaaaataaaattgacaaaaagttaaatttagggtattattttataccattttaaaaaataaagaatttaatattagttatgttatttaacaaaataaatgaaattcaatcaataatttttaaaaaatataaggtacaaaataatacttacccgaattttttatagtttgatacacttaaacattcaattattttttttagtaactaaactactaaattaatttacatctttgttacacttaaacactctcacacagctaaaaatttaatataaatggatttagattggagaagccaactttaaacctttatttcttttaggagtttttacaccacgtactg

SEQ ID NO: 17641 - DNA, 3138 bp, Cannabis sativa
  modified_base (769)..(771): a, c, t, g, unknown or other
taatttagtagtaattaatccaattccctgtggttcgacctcacctgcgtaagtatactacttgattgcgtgcacttgcgtagtaattgataaatttcagcaacacaaatgtaccattttaatatcgaaattagggtttaaaagccatgacttttgtcaaaatatcatagtaggccgcgacattggccctccatgtcgcagctcttgaaggaagttttcgtgtagtgagcttcctggtgcgagattgataatactttggccataactctctcaatattactcgaaattggacgattcaagatgttttggaaagcgaaagagagatctagaacttttattcacaatattttcttaaaagtgaacgcatcatagttaaaaatttattttaaagaaatactcgactcttgtcttttgcctttattgaatgagcatatataaaaaattctacataacaatatgcacatctttataagccatgtaccactaaaaaacaacaagaaatcctagactaattccaactcttaacttattcacttaaaacttaaacaaaataactagatgacatatgagaccaaagacaagtatcatgcacacttttatatgcaccattgtaatggtatatgggagagcatttttttttacgaaaattcatataacaattcacatagtaattaactgaacgatctaaatcgtaaccaaaatttacatagcagtccacataaaaaccattaaaacaattaaaaccaaaaatttataaaaaaaaaaaaannnaaaaattaaaaaaatagtacataaaataattacataattaaactttgtttacaagtcaaatgaacagaggttaactaaaaccaaataagttaattaattgcttagctaaaaatatacaaaattagaatatagtaactaaaaacaaaatgtctaattactcccaaaatttaaacaaaacaaactattttaaacttgaataggcacactaatatagttattagcatgtaacattggtttgaccatttattattggattatcattattggaactacaattgtcaagatagttttgataagcataagaaacaaaaccccaaatagccaaaaccatagccatagccttgaccccaatccatattttcatggaagaaaaatacagccataattgggacaataggtgaacccaaaatacttatgacattagaaaaagagtgaagagacttctaatactaaacccactactccaatgaagtaaatttgccatgttatagtgatccataataatgtcatgacatatgaaactttcccaagttgaaactcattcatttcttccctcaaagttgaccactcactacttgcaaaaagtcccacaagtgttacaatagttgccacaagtgattgaaacactataacatcaatgataactgaaaagctctcatttttaagaacttttttcatgaaaatttgagttaagtttaggttcaaaccagaccctgctgaggcacccaatgtgcaaataaacccaattgcatacttcccttttgagattttagaagaagaagaagaagagtcttgtgattcgggttcgaaaactagcaaaagagaggagatggtgagaagtactagggagtttattatgtaaggagtgaatttttgtgagttgagaaagaatgagaagaaagcattgaaagctaattgagatgataatatgattgagtaagttgatacttgaaggtacataagtccaattgagtaaaggtaacaatttgctgctatgagtaggccaagaacaaagtaaattgtggtaactagtaacttatttgttttggttttggtaactagtaacttatgatttttatttggtatgaaatagtaaggaagaaaaataggaaatcctactaattgaacaagtgtagccatccatttactctttccacctttttcataatacaatcttcctaataaggttgctattgcttgtccacaaagaacaaagaacgaatagattccgattcgaatcgaaattgtaagttttctgtgttgatgagaagaacaagttattggctggttgttgcttgattcatttgctgaagataacgcattagatacataattagcatatatataaatggtatttatgaaaagaatcattcaattgagttcttttagtaccaaaaaattggttactagtaaccatttcacttaattagttgaaagttgaaagaaagaaaacttacctctaatgatgctgagttgaatctctttaacacctcccatgtcaaaagatgaacaaatctctcacaaacaataatggtgaatgagatagagagaaagagagaggctttaattgaattgggtagtaataagtagcactgcagatttaattttttcattaaatactatcaacatgtcattttcatcattgaattgttagaaagaaatatctaatagatataaagctaaaaacaacaaagatatacatatacatatattggctatgaatttggtccctttattattaaaaaacagaacctcatgtaagttttagaggaaattacattgtatatccactttactttatttgttttgatttttacctctatttttattttctttaagatatacctacttttatagatgatgtctttattataccccttaagttaatataaattatatgctagacttaagtggaaggtaggagaatatttaacaactcactcacaattgtgggtatatttcaatgaaatataatataagagtatttttgattgatggacacaaaataaaaatatttttcaacttatccctaagtttctacactcgatttgttttatttgatttgaaaccgttaaatcaacttaattttgatctaatagttataatcttttaactttataaataaaaattaagtttctaatatataagtgattaacacatatatgattattttttttaataaaaatcataagatttaataattaacacatatatgattagtttagccattgtgggtcaaatgagattcacctacatatatatacatatatttatatgttgaattcttaatagatattactcatgaatgtatattattagaaaaaaatgaatttttatacttagttttactatctaattaaaaaaaaa

SEQ ID NO: 17642 - DNA, 4320 bp, Cannabis sativa
  modified_base (164)..(174): a, c, t, g, unknown or other
  modified_base (1145)..(1154): a, c, t, g, unknown or other
catttcacaaaggggtacccactatcaaaaaaatgagattttaactattttgacaaaaatgattgttagtgccacaaaactaggttttctctcaacatgacccatagaaaagtgataaaaaatggtgttggcttcctcattgtgaaatttcacgattttttgannnnnnnnnnntgagattttaagagaacactaacgagtgtaagcgtaaggaaaaaacttgtcaaaatttaccctgaaaagaacatttttaatttttgaattagggggtcattttaaccaaatttaacgtaaaagtaatattcatattcacgtcttaatagtacgaattcattgtgactagtggagaaaaatatttcgagatggatctgggccacatttcaaaaagagattatcagaaatgtgagatcttcactatttcaacaaaaatgattgttagtgcttgaaaaataggttatctagtaatgtgtccaatagaaaagtgatggacaactgtctaggcttcttcaatgtgaaatttaacgattttttgagatgtgtagggtgagatcttaagagaatacttacgagtataagtgtaaggaaaaaacttgttaaaatttaccctgaaaaaaaaaagaacatttttaattttaaaattagggggtcttttttagaaaatttaacgcaaaacaaatatttatgtttacatcttagtagtgcaaaatcattgtcactagtggagaaaaatattctgagatgggtctggaccacatttcacaaagggtaccactataaaaaatgagagatttttactatttcgataaaaatgattgttagtgcttaaagactaggttttctctcaatgtgacttatgaaagtgatgaacatcggtcttggctttcttcatgtaaaatttcacgatttttcgaaatatgtagggtgagattttaagagaacactaacgagtgtaagcgtaaggaaaaaacttgtttaaattttccctaaaaagaagagcattttcaatttttgaactaggggtattttaactaaatttaacgtgaaacaaatcttcatattcatgtcttagtagtacgaattcattgtgactagtaagaaaaaatatttagagatgggtccaagtcacatttcacaaaggggtaccnnnnnnnnnnatgtgagattttcactatttcaacaaaaataattgttagtgcttgaaaactagatttcttttcaacgtgaccaataaaaaagtgaagagcaacggtcttggctttctccttgtgaaatttcacaattttttgagatgtgttggtgaaatttcaagagaacacaaacgagtgtaagtgtaaggaaaaaacttgttaaaatatacccataaaagaagagcatttttactttctgaattagataactattttaaccaaatttaacgcgaaactaatcttcatattcacgtcttagtagtacaaatttattatgataagtggaaaaaaatattccaagatgagcccgagccacatttcacaaaggggtaccactataaaaaatgtgagattttctttatttagattaaaatgattattagtgcttaaaaactatgtttcctctcaaagtgtctattagaaaagtgatggataacggtttggcttcctccctataaaatttttctattttctgaaatgtatagggtgagattttaagagaacactaacgagtgtaagagtaaaaaaaaaaacttattaaaatttacctgaaaagaagaatattttcaatttttgaattagcggggtattttaaccaaatttaatgcgaaaaaatatttatattcacgtcttggtagtacgaattcattatgacgagtggagaaaaatattttgagataggttcgggccgtatttcagaaaggggtattgttatcaaaaatgtgaaatttttactattttgacaaaaataattgttagcgtttgaaaactaagttttctctcaaggtgtccaatagaaaagtaatggaaaacggtccaggattcctccctatgaaatttaactattttttgagatatgaaaggtgagattttaagataacactaacgagtgtaacagtaaagaaaaaacttgttaaaatttttcctaatgggtgtatctctcgcaatccgtccaaaatcatttttcccgcactcaagttcacaatccaataaggttttacttcatcataaatgtggtctactaatatttcatttctcattttttgattctgacgagttataattttttttaccatatccaactaagagcaatgcatgattttgacattttattttatattcattgacttttgggttcaaaattaattcataagacaatgtaaagagtaaaactagaacgctcggtacaatcgaaagataaagataaatcgtacaataaaaaacaaaagattcattccaattcgcaacaattcgattgcttggattcgattaatattttaaaaaattattttatttatctgacatccaatttaattattctcttaaatttatataaatatttatatttaagtttttttttttctcaaattacacccttattaacaagagtaaaggttaacatataacaattaggaaagatagataattcttaaaccaaattaatttactatcctaagtgcatgcacaaataatttatgagcatccttacggatgtaagacaaacataaactagtatgttagtttaaaaaatttatataaaattatataatatccaaagtttttcatatcttttatatattatacatgtttaattttttacataaataaaaatatatttatattagaataaaaaaaaattatattcttactttatttacctaaaccaaatgtatgtatattatagactatagttaaaaaattaatatttctacttttaaagaaatacccaatttattcaggtaatatacaaaattaacaatgatataggataaaactagaaccactacggtacaatcaaaagagaaaaatgctattcactctctaactctacattttatgtcgtaatgggtgtatcactcgaattcgttcaaaaccatttctttcccacttagattttcaagagttcctaacaatccaatatgattttacttcatcataaatgtggtctatctattctcatttgtcattttttcaagtttgatgagttataatttccttaccgtatctaaccagaagtaatgcataattttgacattttatttcatatttgttattttttgtatttaaggttggttcataaaacaataataaagaacaaaactagaactgacttggtacaattgaaagagaaagataaatcatacaataagaaacaaaagattcatacgatttgcagcaattcgattgcttgggttagacagagggtatttaactttttatttttttgtagaaacggtaggcaaggtattgtctctgaaaatagttgtatttatttggcaccgaatttaattattccctttattttatataaatattaataagttttttttttttttttttttttttaaattacactcttattaacaagaatgaaaggttaatacatgtcaattagaaaaaatggataatttcaccctaagtgcatgcaaaactaattcatgagcaactttataagctgtaggcgaacataaactaatattttagtttataaaatttatataaaattatatattatacaatttttttcatattttctattccaaaactggtatactattaattttttattccaaccaaagaatgaagatgcttttttaattaccatttatgttcttataaaaaataatataatttagttgaaaaaaaaaagtaattacttaaattaaatggtcttggtatcttgttggaggcaaaatgcttttgggtctccaataaaattctattttatccacttctaataataaccatattattcacctaatacatagttaatagaatcaaataatatttaatgaaattaattatgtaatttactgtacaaaaaaaatataaattgatttaaaaaaaatccttccttaaaaataagtaatagatttttacttttgttattaaagctaatatggttgaaataataacaaatatacatctacccacacatatatagcttcgtccttgagataatttatttttatcacccataccaaaccttcatttatattaaaaactagggaactaagccgcgcttcgcgcgggttcgacccaactttaataatattttaatattttaatttatttttgtaccacttgagttatataatttataatatattaatattttgatgtgtatattata

SEQ ID NO: 17643 - DNA, 3988 bp, Cannabis sativa
  modified_base (3490)..(3493): a, c, t, g, unknown or other
tccttaacacccaaagcttccaccgtttcgggttacaacacccctgaccgacagcaggtaaaagcttccaccagaaattagttttagatattagtaggctttaaattaaaaaaataatttctcaacaaatttgttattattgttattttaaaatttaattattttttatttaatttattaattttaattataagataagatattttcttatttaattaataaaatataaaatgatctttttagcaccaaatgttgttagagaaatttagacaacactgaattatgcaattactcgtttagaatagcatgtactcaaaaaaattgaaaaaaaaaaaatctaacatatttttaaagacaaaaattataattagcactcaattttaaaaaacctttctcattcccacagacatagttttgttttataaattatttcttatatactttatccctataaacttcaatttaattacattttaaaatattaaagcttaacatttaaaactacatgtaaatattttatttttgtgtaattattaaactaataccaggatgtttagggtaagttcatattttattggcgggacttattttggttcaaatatttattctccatttcaagagtgagtcctttgtctaaatttcaatagacaactcactcttcttttaagataataaattggtttgcatcttgtaagatagtcaataaattgttttgcatgcccataaattaaataacatattcgatgaaaaaaaaaatatctctgtatttgctattttcattctttattctgacactttcacttttttcttaaaaaagataataatatgaaatgttatataaataaattaaaaaaaaatgttagcgatataaattgtgtatttaaattagtgttacatctaattaatcccttgctgttcttgttaaccctgctaatttaacactcatttataattttttcgtaagctagtgttacatacaagtcattataaaaccaaggaaacaaaacttttaacttggcaacacctaagaactagaagagtttaaccaagcatcttcttcactttaatggaaagagcttattagtcaatcacatcaatcttctacattgaaaaaaaaaattaaaaaaaaaaataaaaactggcagagtcaattgaaaatcaaattactccacacatattgactcgagcagtttctcactggcttcacccacttccacattctccattttcaaccggcgacgcatagcctggcttgtccttccggcagcagcataagtccttattaatgattcgaacacctccacctctaaggtatctacaacctttttcaaaatctccacaaaaccttcggcgccatctacatctttctcttgctcaaaattctgcattaaggtattgacaatttcatcagatggaatccactttttgccatttcctctgccagtggaaatcgcattggtgacacagtcaactgccgatttaaaatctccattcttcaaataataatcgaaaaagatctcccaggttttcacattgggtttggcccctcttcggcgggcatgctcctgcaactccagagccttgtctagtagcccttctttagcataagctccaataatagtatttgcaatacgaatatcgtaagttgagcaccatgattcccattccctgaaacacttctctgcaccaggtagatcattcaaattaaccaacacttgaatcatgttcaggtaacttacatttgcagttttaggaaacgccaatcttaaagatcgccatatacgataaacttcaagaagatttcctgttcgaccatataatgtaattagaaattgaaaagcagaaagatccttgtgcgagtttttcttctccaattccttgagtgcagtttctgccttcttaaacaagccagcattaacataaattgatgctaagttgctatatgtggtccaatcactgacagctcggccatctctcttcatctcatcaataaccctttcaaccccagagatgtcattgacaacggcatgagctcgcatccagatattatatgaaaatgtatccagcataacactactagccttcatttcttgtacaatggcagaaattttttccggcttcccagttttttcataaagggtcattaagctattataaggcattgaacttagaggaagactgagttccttcatcttctccataagagcttcagcttcgtcagtcattaattccttgcagtaacagttgagtaatgcaccataacacagatggttcttagaagattcaggaagatcaatgaaataagtttctgcagcaggaatccccctagatttagcaatcaaatcaagatgaatagcctgatcactgattgtcttgttcgttccccttttcgccatagcttctgagagctgttgaataaataagtttgtaaagcacaaaacttcatgaggagctaagcaaagggtctcatacctttcatatttttccaccaaataaattacttctataacaaaaccaaaagccaaataaatcctcattgcaaaagcaaaaactaatgtagacacagatacattgatcagacaaaacagtacatagacttcagcagcttaaccttacacaacaatgtgcattcagtttaaagatcccaccaaacgttttttattgaaaaaaatccctgcctaaccctacaatatttggggaccaagaaactatagcaattgccatgtagtaatcaagaggaactcgaactcagacctttgagagcatactgccttaccatttgaattacacctcttcggtaaggatcccaccaaacatagttttcacaattcaaattttaggcacgaagatggtaaacactattgtttttggacttaaaaatttcatggtggtgtgtacatgaatatttttattgtacaccctaattctcaacaacaatacagtattggaaaaatgtagaatataatccttgaattgcatctgaaccaaaaactagtactgcaaacaaactgtaaaataatcaattggttcactccttaaagaaacaacaacaaggaatagtccatgtcagataacaaatcaaacacaatagtataaaataaaacatgtctttatcatgccaagcgtcatattcatacatagtttgagttccaattcaaataacataaacccttatacaaatatgaaaatatacatgcgtgtaaatctagtgactactaacaagttctgaaagatacgtactttgatagcggggctgtaaaggtttcgatctcgaagcttcttgagtgtatcatcaacctcccatttgaacactcgctttcggctcttgaggaactgattgagttgctgacgaacactcatttccgaacttccatctttgaagagtttcttgtacagagcttcgtccaaatacttgggagaacgctttgtcacgctcctgctgcgcccgaatagctgaaacgccatttctctctctctctcgctctctctnnnnctctctctctctctctcttcaattatcgaaaattgaataaaatataatcagatcaaaattaaaacgttgtaagaaatgaatcaaaataaattccaagaaaaaaaaaagtacattgtgttcaaagcgagaatagatgagttaaagaaaaaataaataaatacatgagaataaaatagagctagaatacctgtaactgtaatgaggtaagatggaaattagggtttcgagctctgagactgggatggagaggcggccgagctctgagactgtgcgacgacgaagagaatgtccagccagcctagttgcagtaaatgcccttcatatgggctaataaattacacatgcactaggcccaaacaatgtgggctcggcccaatgtttacttcctagaacacggggtatgatctaagggaaatttacaaaatatagtgaaaattacattaaatatggaatttcataccaaaaaaattagaaaaatatggtatttataggttt

SEQ ID NO: 17644 - DNA, 4849 bp, Cannabis sativa
tttttttttttttttttgaagctgcaagataaagcataaaaaacaacagctagcagaggaaacaagaagaactcctcttagccttcctctcgcaacctgatggcatccttgtcaagggaatgagcttggacattgaattgccgaggaaaatgcttcaaagaggcatcagggaagttggagatggaatgcctgatctcccattaactttggagacaaggttgagacagtgagtgaaaattaaatctggcttcagctgagaagagacacaccaggagataccttccaatagggcttgaccttccgcaaaaatgggggtggatgctcctggtttatgggccattgctgaagctacaatttgatttaggcctatcttgaaaacaaaaccaaaacctgtgatacaattatcttgatccaatgctgcaactacatacagagctgggctataatcctgaattatgccagttgttgtggagatagaagaagaactctgctggcgcgaatttgatgctgaaatagctgcattgtgaattttttgggcctccttatactcctgtaaataatttaagacaaactcttccacattgctagaaacacaagacttttgaaacaataaagagtttctcgtattccagatatgccatattaaaactaacaaaaagacggagatcctcttttgatattaagtgaaggccttgaaggtagaactcctgaatatcaagcctttgatgatttgtgtgaaaaaacttaaactttgaatgtttccaaacagtacgagctctgttacgatcaataagtgcatgagttaccgattccattcagcctccacagaaatgacaaaaggggtcatgtaggacattcttgtgaaacaggtttaaatcacaaggcaaaatgtggttgaacgctttctaagtgaagtgcttaatttttggggggatagggagtgtccagagggttttccaccaattcttaagtggattaggatcggaggaggaggcacagtgaacatttgcaaaagaggaagcaagatggtatgctgaattgacagtgagaatgccagattgatgaaaaccccaaatgagagtatctgcagggttgggaataagagggatttggaaaacagatttagcctggtacatgggaaggtagtgctacaactttgcaacattaatccaggtgctattaggattgatgaaaaaggagacaacggaaagagaagggtctattggatgaagaagagtggggtgagagattccaggtatccaatttgaagcagatatgggtatgtcattgccactacctattttccaaacaagtcccttcttaagaagttgacgaccccaaaggaggcttctccagatgaaggatgagttgtaaccattggggccaagcaaaaaatcagagttcttaaaatatcgggctttgagaatggaatgaagaagagagtccggatttgaccaaactctccaagcctgcttggctagaagggcttgattatgatgagtgagggttctaaaacctaaacctctaaagaatttagagaccgagagagcagaccctttcttccagtggattttcctaatatttgaagtatagccccaccaaaattttgataccaaacgttggatagtctgacaaatagattttgggatcttgaaataggacatggcaaaggagagaatgggctgtatgattgctttgattagtgtttcctttcctgcccttgagtaaaatttatcataccagatattcatcttagaagatacattttggataaggtaatggaaagatatgttggtaactcttcccacacaatgaggaactcccaggtatttgctgataaaaccctcgctggcaagctgcaaagcagtctggaacctatgttgtgagtcctgagaagtgttcgtagagaaaagaatggaagatttgtcccgattaaccaactggccagtggcctggtgataagtatgaagaatagaattaatggcctcacttgaatgaggcgtgacaggagcaaacaacatactatcctccgcaaacaaaagatgggataatgaaggagctcccgtacaaattttaataccagagaaaacatcagctgtctcttgaagacgaatgacagtagagagactctcagctacaaggaggaaaatgtaaggagataggggatcaccttgacggattccacgagaagagaaaaaagtgtcagacaaaataccattaagggataacaggtaagtgactgtggacagacaattcatgatgagagagataaagttggaaggaaaaaccacatgagcaagaagatgactgaggaaatgccattcaactcgatcgaaagctttttccatatcaagtttaataacaacccaacaaattttacccaatttcctggaatgaatagcatgaatgatttcattagcaataaggatgttatcagatatttgtcgactcgtgaggatagaactttgattaggggcaataacagaatgaagaactctcttaattcgattggcaaggacttttgaaagacatttgtaaagagtgttacaaaggctggtgggttgaaagtcacacacagttttggcatttttcttcttaggaatgagaacaaggatagtttcattaatcaacgaaatgtccccattatgatttagaatatggagaagcgcttgacaaagctcagagccaaaaagatgccaatgtttttggtaaaaaagagaattcaacccgtcaggaccaggggctttatcccaagaaagactaaacgtagtctttttgatctcatcctcagtgaaagcctcatccaggaaagttttttgaacaggagagagacgactagtgatcccttggaggatagaattgatagccattttattgacaccttgagtatggaagagattgaagtagaagttaagaaattgagataggatggtgggtgagtcatgtgccacagatccatcaggaagggatataccacgaatgaagttattctttttcctaatggaagccttatgatggaaaactttggtgtttttatcaccggctctaagccagtcgaccttagctctttgcttccaatagatttcatctttttggagtaacccatctaaattggattggagaaaagtggcctgctgtaaggattgagttgtaggcttagtgttgtttagaactctatgaagctcagtctgagttctagcaatttggaccttaaggggatattgagaactactccaatcctttattgcagagagacagtaagattgtttagcaagaaaattttgaagaggaaaggaaggaaaggttgtagagagacaccaggaagaattgatagtgttagaaaaagatgggtcattaagccaatggttctccaagtggaaacgagtgtgactctgggtgtttgaaagcttgtcttccagttggactttgagggcccggtggtcagacccgtaaaaacccaaatggaagagagaagcacgggggaacaaatttttccaagattggttaacagtgcaccagtctaggcgttccaaaatgagaccatgcctccaagtgaatttgttaccagagtgattgagtggtaaatgattacctttattcaaaaaagaatggaaatgatgcatagcgtgtatgggaggaacagtggtcaaatttttatcactaacagataggtaatcattgaaatcacctataattaaccaaggcgaaagaggggcatcatcatacaaccgattgaggagattccaagtaacagacttttgatcaggataaggagagccatagtacccagtaaagtgccatttcatatcattaaaattacttataatacaatcaacctgattataagagtaagtagtaatagttacatcaatgcaattgttccaaaaaagtaaaagccctccccctaaaccttgcctaggcacttctaaaacattatcaaaatgaagcttgtttttgaaataaagtccacggcctggctgcaacttagtctccataacaaaaaataaaatgggctgatgctgcttgaccagcagggagagattacggaacgctcgaggactccctaaacctcgagcattccaactgcagagactcatttttctcggcggggtcgcaccgaaacatccgctgtttggtcatcatcagacaaagagggaaccactgcttaatcacttgaaagtgctcttgctctcttgagcatgctacgaaccgagtgaccaacttcagtagtttgcctagtgaaaggctgcctggttacagaggagggagcagaggaggaaattgtacatggttcattaatgatgaggctgtacttctgtggcaatgttgaaaagatgtacggggtgggcaggattcaatcatagcaatacctttaccttggtcaatatgagtgatgacagaggtggtcatgatcggtagaggaatagtggagtgggtaaactatggaggaaatgacaccggggagtgagtgggacaagtggtagaaaactcaggtcaagaaacttgtggttccatacagagaaatcggtcaacggcttgttgcaagccttgatcattggtagtactatgagaaaaatactcctcgataggagttgagttggaaatctcaaacgggttcttcttgagatgagccagagttgtggcttggaggttttccttgtatccaagagatggagggacgagaaagttgtcacaacgcaagaggtatttagcacatttgttataggtgtgatctatgaggccacagaattagcagagatttgggaggccttcaaacttaaagttgatccatttaggatcgtcaatagtgttggatattattttaccaggatcttagatcttctcacaa

SEQ ID NO: 17645 - DNA, 7710 bp, Cannabis sativa
  modified_base (4193)..(4194): a, c, t, g, unknown or other
agtgaataattttccaaacaaaattctttatttttgacagaattttccaccaccattacaagttccaccaagcttcagctatggaagagttagattggagtgattcctcttgcattgctatagccgttttgtatttgctctgcaccgaatactcaccatttttgcaaaagttccacataattttatcctcgatacccacaccacttggcatggtcaaaataaggtcagcatcctcactattaaacaaagctctaataaagtcagtgtcccacgaaccatcagctagtcgcaagtcaacaatatgcaatcgttctggcagaaatagcttatcatagaccttaaaggtgtgtgatctcggtagccacaaatcctctagaaccctcaccatattctcatcccccactctctatctacagcccttcatgataatttctttaccccatgtcaaactatgcaaaaagaaggatgcaagagccccactctttgctgccaaaacatctttgttcagtaaataatacgcgttcaaaactctgttgcataaagagttagggaatcgaatgcacctccatatttccttagccaatagtgcttggttaaacaatctcaattccctaaaccgccattcatcctttctccttcggtttacacaaatatgtccatttacaccaatgaatctgcttgttatgttctgaagagcccacccaaaatcttgtagccatacggtgcaggacattgatagtgctcgtagtaactttgaagtagctcatagtataagtaggcattgcttgaaaaattgctttgatgacaacatctttccccgccactaagaacatacacattttccatcctttcacctttttccatactctatttataattgactcaaataactctttcttgcttctcccaataaaagaaagcaacctcaagtacttcccgtaattattcacaaccttaacttccataagactagcaagtctctctcgatccctttcatcaaaagaagctccaaagcatattttttgatttatgaaaagtttactatttgaccaaaagcaatagaatcgagtctaacaattctttgaaacaccgatactcacttttgaggccttaaaaaataatagactgccatctacaaaaataagagatgggattaccgcagctcgctatgcccaaacatcagcctctgtagcctatttttcatctcagctttatagataaattagagaaagcttcaacacaaaataaaaataagaatgagaacaacgggtcaccttgtcttaactcctgttgtggaatcaccttcaccaagaacttctccattcagcaagaaagaaaagctgataaaagtcacacaagacataactttatccacccaaatactcaaattcatttcatttacctcttccattctcttttcttttttatatgtactcttaaagatccaacactccaattttatttttctagctttggaataatcacctcctataccactagctcaagccacaattatcactctcgaatatcccataagccacgtttcaaccataaatcaatattatttgtacaagttctaaatcatcatcatcctgtttttcctttatttcaagatcatttgaagttgttagtaagtttcaaacccaaaactatagtctatttcctttgattatttgatcaaactctcatggctttgttgccttacttagggtcgaatcactaggtgagttttcacattagtcttggactcaaaggttcttcatagtcacgaataggattctccttagaagctatggttctcaaaaatcattctcgcaatcaagctagtttctccatacatttgaagtaagaaaatttagtagaaacttttaatttttctgtatgaaataattttcaaaaaggagtgagaatgaagtataagatttttgccctatttttgtttgttcattattatattatgttgtttgaataatagacggtataatggattcacattatttaaactatagatatgtgaaagtagtttaaataatggtgggtacaatggattcgcattatttaagctaattatattttttggataatggatggtataatagattcgtattatttaaacaaagttacgagtacgatatgttatgctatttaaataatgcatagtagtttaacattatttaaattaggtagaatatagtttacgtgacatgatttgactgagaagataatggttgaatacttgactgttgagtcaatatatggtagataggggccatttagtagtgggtacaattttactgaactcaaccctctgaaatttagtctaatagttcaggtgtatttgccaaagtgggactcgggtgtaatcatttttatgtgatttagcttaaaatctagttactagagttaaaattaagtttatacattgttatttgtctaaatatgtgcatctaagtttttattttatgtgactacctgacaagcattttcttactgagtttagtagttccttcttattaaacttaccatgtgtagattaatgttgtgaaagttagaaagtcggtggcgagtgagaccttggaggcttgtgtgtgtgctcgctgagggccctataactaagggtggtctaggatgcactccatttgttttattaagtgttattaaattaatgtcccattttattttatttatttattatatgtcttttaagtccaaattaagctcaattatggaatattttatttatgaataaaaaaacattctattttctgtattttaacgcttgtatacaatttcataattttataaaagtacgggtgttacaggtatcagagccacaattatattagttctgaatgttcttacgagttacacatatcggctaaaaaggcttcgctcgctaccaagtaagtattatttttgcatattttgtattttatgtgcattttggtaatttcaaaatttcttttcatttttaaaaccctagaaccaacttagcaccaacatcatgagaccagagcaagtagagttaggcacattaaagccttaaaagagttcccaaggccccacccatgcatgaagaaaacaaagtctttatagaattaacaaaatataagaggggatggataagataatatactactggaactgtttattgaagtgatatgagaagtacatagccttaatgcacacactcaatatgtcacatgtccaacgtagtctaagagcagactgagaatatctagggcatgtcatggtagatgaggctgaaagatatgacctactcatgatcaacctagtgaagcaaatacaaaattactgacaccatatatcaccgtaatggcactaaagaaaaaaaaaatatcatcgacacaataatgttgtcaggtctgaattccttcaaaaattaccaatctcgttaaacatagtgtatttagaactcgactatgtaaatttgatagaaaatatgatagaggaagggttagacataaaagattataatagttaaattgtattttatttcatgtgtttatttatataacaagagattttagtatggttctactttaattaagagttttagtataactctaactcctttagcttgttcatgtggacgtgtggaggtgatcatagtagaatttagtgaagtttgttatagtatataaatttgataagatatctaagttatatattgatatataacaaactccactaaattctactacgaccaccacacacgtccacataattaaataatgtcatttgaattttatttattatatatttatatataccttaaatttcttattaaatttatatactataataaattccactaaattctattatgatatatatatcctttagtttgtaactctaaagaataacaagttaaaagagttatactaaaactaaagtggaactatatactctttattacataaacaaataaatacatagaataaaatgtagcttgattattctaatcttctatttctgaccttttctctaatataacttttgtcaaatttacatagtcgagttctaaatacatcatgtttgacgagattggtaacttttaaaggaattgagacctaacacattatatcgatgatatatttcttctttagtgccattacggtgatatatggtgtcggtaatcttgtattgatccactaggttgatcatgagtnngtcatatctttcggcctcatctaccctgacatgccttagatgttcccagtttactcttagactacgttggacatgtagcatattgaatgagtgcatcagagctctgtacttctcatgtgactttaataaacagttccagtggtatattatttatccatcccgtcatgtattttgttaattctatcaaagactttgttttcttcacgcatgagtggggtcttcgaaactctctttaaggctttaatgtgcttaacaatgtgttctgcttgctctggtctcatgatgttggtgcttagttggttctagggttccaaaaatgaaaagaaattttgaaattactaaaatgtatataaaatacaaacatgcaaaaataatatttgcttggtagcaaccagggcccttttagtcgatatgtgtaacttgtgagaacattcgggactgatgtaattgtggctctaatacaaactgtaatgctcgtacttttataaaattactaaattatttataagcgttaaaatgcaaaaaaaaaaaaaagaaaaagtaatgtcgcttttattcataaacataaaatatttcataattgagctcaatttagacttaaaagacataataataaataaagtaaaataaatgcgatattaatttaataacacttaataaaataaatggagcgtgtcttagaccaccctcagttatatggcccttagtgggtacacacaaaagcctccaaggtctcactcgccaccgactttctaactttcacaatcttaatctacgcatggtaagtttgataagggtgagctactaaactcagtaagaaaatgcttgtcaggtagtcacataaaataaaaacttagatgcacatatttagacaaataacaatatataaacttaattttaatactaataactaatttttaagctaaatcacataaaaaaaatgataacacccgagtccggctttgacaaattaactcgaactattaaactaaatggcagagggttgggttcagtaaaattgtaccaactactaaaggaccccctatctaccatatagacccaacagtcattcaacaattatcttctcaatcaaagcatgtcacgtaaactattttacctaatttaaataatgttaaactgctatataatatttaaatagcataacatatcataatcgtaactttgtttaaataatgtgaatccattgtaccgtctattatctaaaatatataactaatttatataatacgaatccattgtacctaccattattcaaactacttttacatatctaaagtttatataatgtgaatctatattgtaccgttcattatttaaacaacataatataatattgaacaaacaaaaatagggcaaaaatcttatacctcattctcacttcttttttaacattatttgatacaaaaaatttaaaaattaatttctacttaattttcttatttcgaatgtggaaaaactaatttgattgtgagaatgatccttaagaattgtagcttccaagggaaatcctattcgtgactataaaggatcttagctttgagtccaaaactaatgtgaaaattcacctagtgattcgaccctaagtaaggcaacaaagccatgagagtttgatcaaataattaaagaaaatagactatagtttcaagttaatttgaaacttatcaacaactttagatgatcttgaaatagaaaaaaaaaaaaaaaaacaagatgatgatgatttagaacttatagaaacaatagtgatgtatggttgaaacgtggcttatgggagattcgagaatgataaagctagaaaaatataattagagtcttggttctttatagtacattatgataaaaaaagaaagagaatggaggaggtatatgaaatgaatttcagctatgctttttaggtgtaagtaaagaaaagtgaatggaatgggtagcatttataagcttagaaactaaccctatccttgtcccctcttatctcactactaaccatgattaatatttaaaactaataattaattccatataataacacataagatcttctagactattcccaagctataatatggacgtgatttttgctcatataatatttgagaataatgagctcacgtgtgtagagaactatttgaagtaagtttaatatgctatcactatactaaccaacccatataattctcctataaatgacccactaacccttcatacaggtaagctatcataggcctatatataagttatcatcataatactaattatttcacaaccaagtccacaagcatatataggactccaagcagttcaatcatttattatatatctatttctttatatttattctcgggtccttaccactaaggttaagttctcaacatcactgatggcttcttttaagtttttcataaaatagatccaatcatattaatttctaccaaagaatgttgagaggatccaaaatcatatttcctttggcaacatttcgataggtagaattagagatcaaaccatggggcaaccagttttcaaaggtcccaacataatcatggtagtcatcagtcacaaacacttcccaccgttggattagattttgaaatagaatccatatattattaagccatgtaaactcatcagttagcatcaccttaattaaagttcttctcaatactacattattaacataaaccccttaaaattcatcacgggattcttaattctgtctgggtgcctaggtcaggtgcgattatatttaccgattcaagtttttttttatcatatatactttaaacgattattgatttgtttatttttattttaaaaactaattatgatttttgtctttaaattttaacatgtaataaatcatgctttctaaatttttcaagccgttaaaaatttctcttcaattattgaaaatattagatttaaggatttctgtctaatgtggcgattgtacatgtgctaaattatgcccctgaattttaatatctactaaatcatgctccttgaattttaacatgtacaaaattgtgcctcctaaatttttattcatgctagactgtttggaatagcttttggaaaaactaaaaacagctttttgaaaaagctgtgataaaaatgtatttggtaagcaatcaaaatacaactttttgaaatttttttggagaagctactgctaaaagctaaagctgctccaacccaacttttagaaaaaggtgttttaatttaaaaactataataaattttttttatactaaaatcatatttacttatttattatatattaaaaaaataaaaaaataaataaaaataaactaattataataatataaataattataaaatctcttatttttttaaaaataatttatatttaattttaattttaattttaatctcttatttatgatgatataatatttaattttattggcatgtgcataatgcctaataaatatatatatctggatattattatatgggtatattattatattatta

SEQ ID NO: 17646 - DNA, 3912 bp, Cannabis sativa
ataaattggccaaacttaaatgtgccatatttatcataagaacttttaaaatctcatactaagtgtaatttcctctataagttataagtaaaagcccaatatgccacattatgggccataaagttacaagatctagccgaaaaataaaataaataaataagaagcaaaggaagcagcgatacttttacaaaataaagagtagttttcaatttgccatcagggatccaaaccgttgagagtgttgatcactatctttaaatcgctttccactaggataaaatggtgacctttctccttagcgacctcaagcgccaagcaaaccgcaacagcttctccacacagggtatcagagaagtccattttggctgtaaacatccaaattaacctgctcaggtaatccctagcaactactgctatgcacagatgctcccttccaatcctaacgtcgcaattaattttgatccagtctagagggggcgggttccaaacagcaatggccaatgggggtcggggaggatatagagataatggaatcttgtaatctgcatacggtttgggattaaataccatggaatcaatgaccacaattaaacgcagacaaaattcttctcctatattaaataccaggcgggattaaatcgatgccctgttgcaaattaatattcactttttatattttatatttatgtacatttatagttacatttccaatggaaaagcatatatatgtttttggtgaaaagatgatctagaaaagaatagaaagaagtgaagaaaaagaaaagaaggatgagaagacaagagacataaattccatggagtatactaggtgctacatttgttgtgtaacaaaatgaagtgaaaggagagtcttgctaattaaggtgaatatatatatacattttataatataattaattaagaatgtaccttagttcactttgcttgttgtgaaggggttggaaagttataattaataaactaggaaaactaagaaagtactctctcaaaatctaggagttcgatacacaatcttcgtgttaaaggactttgtcttttcaacagaaattaattctttattttaccaaacatatataaaataactaatgcaccatacgtagtgtcttttttttcaacagactagttgtttacactatccgaatagtaagtgtaaaccaaaatctgtacagaccaaataattaaataatatatattaataaaaaataataagaattaatttatagcactacaaaaatataaataagcaaaatattacattttaaaaaggcaagtctaagaaaattcaagagcgtaatgatgaatttattatagagttaaataacaaaaataaaaattagaaacaaatccattaattaaaaaaaaaataaaagaatagagctcagtgttaccaagccttatacttattaatccgatagtgtaaataactatggaatcgaatataaataatcatatgtgaaaaaaggagttagttatattcttttcataatatatttaaataattttaagtgacatgtatatagaaaaagagagagtgtgtgtgttcatgcccatgcacaacgtttattaacttcaataatttttaattgacaagggaccgaatctctaatcgaaacaaaacaatatatatatatatatatatagaattaccagaaaaaaaaattagtataattaagtatcagttcttatataacatacaaaaaaaaaattagaaaatatccttcaccaattttaaaaaagacacctacaaaaaaatatagatattactaatctgcaataacaatactacaataatattatatatgcaaataaatctgtcaaaaaccaacaaatcacaaatctgtcacacacactagtctacgtagccagtctatatattattaagatatagaaaagcaagaaatataattccttctgcatgaataaacgacataactttagtaaaggcaaagaaagcattttataattggacagaatataagaaaccccattccctaagctttaacaagtatctatagtacaacttttatacatatataatccaaaaccgcaagggaagcaaggtagcaagcaaatattcatgcactatataaaggggccctagagttaaaccaaaaacagcaacccaaaaaccacacaaccacattcattaatttctagcttctcatcactctcttttctctatttttaatacattttattcatttatttttcctttttttcaagtgtgtgagtgagctaaatatggataccaagatgtcaggtatcattgctccatctcatactaagcatacagtcacaaatgggctacctaaacaagatcatcatcagccgctgcagcagcagcagccgcaccaccagcagcagctgcagccgcaccaccaccagcagcagcagccggggcaccacagctttggtgctcgagtcctgggagaagctcatcatggtggtgcaggccgagggactcgtttgcttggaaatggccgtggttcccaccaccgagcgcatggggcatccgatgagaccgagttaggtaggaaaattctggccattcatgaaactgatgagcgtgggattcatgtcaagcctgttctcagcatcattgaagtcatattttaccgtgcaacggctgaccttcctggttattcaccggtatatatacatattttcaacatagttaatacttaagtactatatggttatataatatgcatattgagttgttgttttgaacgcataacaggcagctcccttacctcaatcgttggacattgttccacatgatgagaaggccgtgcactccgctgttgcgctccatgacatggtcgaactcccaacccggaccatcagtgccatttcctgcgaggtcaatcattattattccatcaccttatattgtatatatacattatatacaagaaaatattatcaacgcatgagattttcaccttgcataattgtgcccccaatctattaatacttgtaccaagctctggtttacgaattttgataacaaaaatatatagttgtagtagttttaataatttggggtaacataattagtacagatgatatagtaatagagagaaaaataaatttattctattatttatatgcctaatgtaaacaaagttgacacactcgcaaagtatataaaagagcactcctaataggtatcactgctgtagctgcagcctcagtgacccttttaagaataattagcaatattttataaaaattattatattatgtatagcaatttaggtggtactaagcacaactagtgctttttatgtgtacatatcattactctatttatatatgtggctaaacttggttgttggttgttcttcaaattatgttatttcacagattttcagtaagtgttcagctggggtagacgtgaacacaatagtcatggatatactgcagctaatcaagcactacaattgggattcaaaggtggtgttagtgttggcagcattcgccatcacattcggcgagtttcggctcgttgttcagctttattcgtctaacccactagccaaagccatcgctctactcaagcaactcccagaaatattggagcatgctgctgctctaagaccaaaacttgatgcactctttgctctcatcaatgaaattcttgacgtgaccaagaaaattgttgagttttatgatattcctagaagtgagtacttcactgctgattcccctgaaattttagctgctgcttctcacattcccacagctgtttactggaccatacggagcataattgttgcagctactcagattttggctctcactggcatgggaatagagtaagttactatgttttttttttttttaattaatcaagtgtccctatactgacaatctattttacttgtc

SEQ ID NO: 17647 - DNA, 2649 bp, Cannabis sativa
aaaaaaaaggtaaaatgagaattaaatatttgttgacaacgacataaaaactaccaaatgtaaataactattcccttgcgatattcacaagaggaggacagtaaaatttggtatatgagcaatattttgtcaacgatatatagatgaattattattagctgttttcattttattgcccaatgaatgtgatatttttggaaagttggattaaaaagtttcaacaaaactggtaaactatacatttaaaacaaaacacttatttcttttttggaaagaaaaatcaaatcaatcatttagtgacaatagaaaaagagttttgtttattgtaaaaaaaaatgatcaaaaccctccatttaattgcttcttagtaaagaatatctttagtcaaattaatcaaagggtctaatcttaatattcttattatcctaagtcaaatatgatttattcaaaaaaaaaaaaaaaagtcaaatatgatcaaaatggtatatttgtgatgtgtgctacaactactacctgaaacatttctattgtgtaaaaaagggtgtatttttatttcattagaaaaccataaaaacaaaaaaggtttggttttaaataatcataacaagtagaccaagaaacctaatggatttatttttgtatttttggatgccaaccacaccaaccaaacaccccaaagaaaaactcatcatctcttatgctaaactcctaagctggtgaggttttggttctttgggcagtagcctaccacaatccatatgagctttagacataacataatagagaaggaccattgttcaaaaccagactcaaaagaaaaaccatatatacaaatgaattaaaatccaaatgctgtctttttcatgcactactcttatggttaagccttttttcctaatttgaagggattattatttcattattattgatttatctccaatgaggaatgagcatctgtaccctcccaagttttaatttttattgttaaccaatacaagaaaatggtggtcaaattttcaatcttagttctcttctctctatataattccagctccccatttattaatctaaaacacaacataacataacataacataacatcattcagttcaggtaagtttcattaccataatccatattggcattctgagttttcatacttataaaattctgttatgttcttattttgaataggttgtttgagtgtgaaggggtgttcttcttttccttttttaatggagaaagttagtgacaaaacctttgagcttaatgttaagctagaagaaccaactttggttgcacctgcagatgagacagagaagggtctttactttctctccaaccttgaccagaatatcgctgttattgttcgaactatctactgcttcaaatcggatttgaaaggcaatgaggaggctgtgaaagttatcaagaatgccttgtcaaaggttctagttcattattatcctctagctggaaggttaactattagttcagagggaaaattgatagtgatttgtaatggggaaggtgctgtgtttgttgaggctgaagctaactgttctattgaagagattggtgacataaccaagcctgatcctgtcactcttggaaagttggtttatgatattcctggtgccaacaacatacttgagattcctcctctagttgctcaggtttgcatttttcattatctagcattcaaaacagataacataattgaaacagagttcactttttaagtttctcttagtttttgttaagtgatgaatcattgtatgtttaggtgactaagttcaaatgtggaggctttgttcttgggctatgcatgaatcattgtatgtttgatgggattggagctataatttgtcaactcatggggtgagattgcaagaggcttacctttgaatgtgtctccattcctagatagaagcatacttaaagcaaggaaccctccaaaaatagagtattcccatgatgaattcgccgagatccaagatatatcagaaaccagcaagctctatgaggaagaaatgctttataagtccttctgtttcaatcctgagaaacttgaacagctcaagaaaaaagccatagcagatggggttttagagaagtgcacaacatttgaagcactatctgcctttgtatggagagcgcgaaccgagtcactaaagatgcaacctgatcaaaacacaaagctcctgtttgctgttgacgggcggtcaagatttgagccaccaattccaaaaggatactttggcaatgcaattgtgctaaccaattcactttgcagagctggtgatctgttggagaatcctctgtctttcgcagttggccaagttcagaaagcagttaatatggttaacgacagttacatgagatctgctattgactactttgaaataacaagagccaggccttctcttgcagcaactcttttgatcacaacttggtctaggctaccttttcacaccactgatttcggttggggagagcctttattatcaggaccagttgctttacctgagaaggaagtgattttgtttctttcccatggcaaagagaggaaaagcataaatgttttgttgggattgccagaatctgccatgaaggtttttgaagaactaatgcagaattgaactatat

SEQ ID NO: 17648 - DNA, 3704 bp, Cannabis sativa
gtggtaggtttttttgtttagaaaaaaacttgaacacttctagaatattaaattcgtttacgtaaaagtttgttttgactttaatttgattattatccattgtttcttatcataagtgaccttttagatcttgtcataacgataattcttctgtccgtgattttctctgcagttttaaggtttgtctgatcttactgagctagctagcttaagccatgcctgagcgtgctctgacccgtgtccacagcctccgagagaggttggatgagactctctctgctcacagaaacgaaattgtagctcttctttccaggtacttagttgtgttatgacccttgttgttattgtaaaagctcaataaatggaaccatgaaaagaattatggatgatgttataggatcgaggccaaaggaaagggattccttcagccccaccagatcattgctgagtttgaagccatcccagaagtgaacaggaagaaacttttggatggagcttttggtgaagttctgagagccactcaggtaaaacttgttggatctttattactggaataaagtttttttcttttttggttcttttgagtaaaagtttgaaacttttgtcaacccttttggtttactcaggaagccatatgcttacctccatgggttgctcttgctgtgcgcccaaggcctggtgtgtgggaatacattagagtgaacgtccatgctcttgttattgaagagttgcaggtttctgagtacttgcatttcaaggaagagcttgttgatggaaggtatgattttatctttttttgatctaaaaaaggtttttccttttgatttgttatcctcttaatttacgaaggttttttcttttactttctttagcgccaatggcaactttgtgcttgaattggactttgagccattcaatgcctctttccctcgtccaactctttccaagtccattggaaatggtgtggagtttctcaatcgccacctttctgcaaaacttttccatgacaaggagagcatgcatcctcttctcgagttcctccgagttcactgctacaagggaaaggtaatacaaaatttctatgaattgctgaagaaaatctatgaaggtaagagctttctcatgttattgattttgtttgtggtgttttatgcagaatatgatgctgaatgacagaattcacaacctgaatggacttcaacatgttctaaggaaggcagaggagtacctgaccagtcttgcccccgaaacaccatacgctgaattcgaacacaagttccaggagattggtttggagagagggtggggtgacaccgccgagcgcgtgttggagatgattcagcttctcttggatcttcttgaggcacctgacccttgcacacttgagaagttccttggcagaattccaatggtgtttaacgttgtcattctttctcctcatggatactttgctcaagacaatgttttggggtaccctgatactggaggccaggttagctaaaacagattttgactctcttgtcttttgatttaagtaactttttgttgataaattctaaaacttttttgtactttttcacttcaacaactaggttgtttacatcttggaccaagttcgtgccttggagaatgagatgcttcttagaattaagcaacaaggacttgacattaaacctcgtattctcattgtaagttgtcacataagagtttccaactttctttcatgtaatttgtattttgttttcttttttctaatggttggttgtggtgttttgtatatccagatcactaggctcctccctgatgctgtaggaaccacttgtggtcagcgattggagaaagtttacgatacagaacacacacacattctccgagtgccattcagggacgagaaaggaatggtccgcaagtggatctcaagatttgaagtctggccatacctagagacctacacagaggtaagacaaaagagttctttttgtttgtttgtttggtcttgaatgaacactagattgattgtgagagactaaagaaaagagtatttcgggttgttgtttaggatgttgcacacgagcttgccaaggagttgcagggcaagcctgatcttatcattggaaactacagtgatggaaacatcgttgcctcccttcttgcccacaaactaggggtcacacaggtttgttaagccttctttttttatctttacatgttttgagtttcacaacttaaaatgactttttattatgactctcatttgttgtttgtatgcacttgcagtgtaccatagcccatgcccttgagaaaactaagtaccctgattcagatatttactggaaaaagttggaagagaagtaccatttctcttgccagtttactgctgatctcattgccatgaaccacactgatttcatcatcaccagtaccttccaagagattgctggaaggtgataaatcctctcctctcctctgttttctttcattcgtgcatggttttacttgttgtttaatctcaggaaactaaatcagtctttgtttctatttttccaatccttttcagtaaggacactgtgggacagtacgagagccacaccgctttcactcttcccggactctacagagttgttcacggtattgatgttttcgaccccaagttcaacattgtctctcctggagctgacatgagcatctacttcccttacaccgagacggaaaagagactcacctacttccaccccgaaatcgaagagcttctctacagtgatgtcgagaatgaggagcacatgtaagttttctataccaattcctatgttggatttccccatatttgatcatggcatgtcatgacttaagaactcaccctttggttgatattgttttcgaacagatgtgtgttgaaggaccgcaacaagcccattatcttcacaatggcgaggttggaccgtgttaagaacatcacggggctagtagagtggtacgggaagaacaagaagctgagagagctagtcaaccttgttgtggtagctggtgacaggagaaaggagtctaaggacattgaagagaaggctgagatggcaaagatgtatggactcattgagacatacaagctgaatggacagttcagatggatttcttctcagatgaacagagtgaggaatggtgagctgtacaggtacatctgtgataccaagggagcttttgtccaacctgctgtgtatgaagcttttggattgactgttgttgaggccatgacttgtggtttgcctactttcgctacctgcaaaggtggccctgctgagatcattgtacatggaaaatcaggctaccatattgatccttatcatggtgatagagcagctgagactcttgttgagtttttcgagaagtgcaaggttgacccttctcactgggacaaaatttcagagggagggttgcaacgtatttatgagaagtaagcaaaaaaataagagtagttgattccttcacgcttgttatttagagtgctttgatgggggtattaagagtggtttgtgtctctttttgacaggtacacatggaagatttactctgagaggctactgactttgactggagtttatggcttctggaaacatgtttctaaccttgaccatcaagagagccgtcgttaccttgaaatgttctatgctcttaagtaccgtaagttggtaagtttctaaaattgtttc

SEQ ID NO: 17649 - DNA, 9923 bp, Cannabis sativa
gggggggggggggaactattgctcaatgacaccgtagtcactagtcagttctagcataagtgttgaaaatcactttatttacctgtagtgtctgatcaaaaggcactgttagacctttcgacttttttggatcagacatctttgaattcttatctacaaatgaatcatgccttcgtccagcaagtgactcacgtttgttaatatcacgttcaagaagagagttctgaccctgcaaacgttttatttctcgttctgcaaatgcttttgcaccctaatgatgtgcagataattagttaatgttggttattaaaattgaataacataatgatgtctaaatacacaatatacctcaattttggttttctcctgcattgcgttcttaagtttgaactctgcatctttcagtttcacttttgttttttcaagatcttttctcaaagtttctttttccttggcagaggaacaagacgaaatacttgaaatttccttttcaagaatttgaatataagacatatactcttccttttctaactcttgctgttccaaaagtgtctgagaacaaagagcaaagtacgattgtaattatgttgcagataaaagaaaatacagtttacatgcatttatattgtatgtttatctataatacttggttcatgtgtattacttactctcaaagactgctctgagttatgagcctctagtttaatttcttcaatctggttctggagatcaacaaattgatcatgcaaatgaccctgcaacccaaaatatacacacaggattcttttcaatatgataaaatagtgatcttaaaaaattttaaactcgtaaatcacatcgtacatcatcataccttctcattctcaagtttataaactttctgcatcaagcaagaattcaaattctcatggttacttataattgatctttcttgaagagaactctggctaatcaaagtcttgaaatcctgtgtttacagtagatagtgtttaacctattaagcaatgagagaatcaacaaagatatgaacttcaaaatattgaataaaagaaagaagagttaacagcataaggcactctaaaaatagctataaggaaaagccttatcatatgttccaagaatactcacaaggaacatattaatcacagcagcaaaagtctcagagacatcatccacaaatgaagagataccatcagtaaccatttttgagtcctgaacttctgaaattatatcttggacttcagttaaaagcttttccataaaagcagaatattcctcctggaagaagctttcatatgttagttgaagaggcttacaaattaacaattaaatcccatctgaacacacaaaatctgcagagaaatgtacatcgaaaccaaaaataatgattacagctaaggaaataaaagtagacagataaataatcttttttcttacagattcattagtagtaagttgttcatgagcgacccgaacctcctcccgtgcattcgaaagcttttcatagagctgaaatagataatgtattcagactacgcacaagtatggaagaaagcttaaccattgtataagatagtgaagtatatagggaatattgtttgttggtcttctgatcaaaaattatagtcagactatcttcacacaataaaatctcaaacacatatcaacgatttgatcattaacaatatgtagaaaactatgaagttattttttgtctttagctgaacagatttctattcttcactattgtttttccgttttcatatatttagtggaattcctagggtttctatcttttcatcttcttgtggattggtgtgccagccacctactgtgtatatatatatatatatatattaggttgacacacccatggatccccacaaaaggctaaacaaaactgaagaacgtattccagttgacaaggaaagatattagatttttgggcaaattaatccaccttccacactggtaagactcaaaatgtcagccaataacgctcacaccaacaccagaaaacgctctttaatttctcaagaatacaaagaatcacagctaatttgagatagctaatctcccatgagtctaaaaccccttattacaaccgtcatccacttatttatactactcactaactactgctcaaaacagaacataacaatccactaatacaaactcagctaagtaaaaaaaacttagcttagttattctttatattgcgtctcacataagttaaccctatgtgaggtctatcaatactcttctcccaattttaaaccttgtcctcaaggttgaaatctaaaaactgatgctttatggtctcaaaagactcccaagtgggttcaaaatattgtaacccttgccacttgattaggacttcaaacttcccaggctgagatgttgcttttgccggctgatcgtaccccaagaagcttctcaggctgaactactagctttaattccatagacggttgcggaggtaatggtggcaccagtacgtcagcccacacggctttctttagctgagaacatgaaaaaaaggatgtatgtgagctgtttccggtagttccagcttataggttacttctcaactggttatcgtcgaaccagttttcctctacaactctcgtcgttcaaagtactggtaggagcggccaccttcgtcagcagatcagtcgtagcgccagtgagcgcggttggaagagttgccaggtgcatcgttgacgatagcagcaggtagttctcaaccgtgcctgtcgtcgttcacggttctttcttctccaacagcaacgctaacgtttatttcttctccaacgcctttccttcacagttgatggcaagctcctcaagggtagtgacttcacattcaaacttgaacgtcgtaatgattcttctacggtctacacagcctcagtcgagaatcaagattggttaactccaccattaatgagttttcttgccatcttcatttgctcttccaccatcagcaccttggcaatgacatccaagagtgttttcagtctatattcgcgcaccttaattacaatctcagcatgcaaatcaccaaagaataaatcttgaagaaaagttgctgaaatctcaggaaattgattcgtcggtctcgaactgagtatgaaatctgtcactgatctttcgtatcgaagcaccatcaacttatcgtatggataatcttcgattgaactacaacaattgaacatcgtgattcgaaactccaatcaatttctaattggatctcgttcctctgccgcttgaaaccacccagcaacacccactaaacatccttgagcagctgataccttctttctttttggggtccaatgaacctagaaatactcttctatgcgaagaacccaaccatacaggtcctctccattgaagaatggcaacaccaatgccatgacagagtccacaagatcgtactctaataccacttgagaggaatttcctatcaaattggctagaatagcaggaacatagaacaaaaaagtaatagagttatactgataatgatatctgggtattcgagaggcctagtgctctctcaaagccaagagctactgctctgttacaatttcattctccacttttccctttcctatttactcacccattgctaacctaggaaatccccaattgagcttgggaacaagaaaaaactatttgaaggaaaaccagccaacaaaggaagatagctgcaattagtagggaaggttatctatctctcacacactaaaccaaacatttccctgtgagtctagtgagccaatatatgcatgatccttgtcaaggtcatctcaatgttgtttacagaatcttgagatatctgaagcaaactcaaggaaaaagtctatttttcaagaaaaacaatgatgaacgaaaagtaaaagtatttacaaacgctaactgggctggatcaataaatgcagaaaatctacatctggttgttgtaccctactttaaggtaatttggtaacatggtagagtatgaaacaaacatttgttgcaaggagcaaagctaaatacaaagctatggcccatggagtatgtgaagctatttggataaaacaagtactggaagaattaagagttctgcgtcaacaagtacactatcagcatagcacataaccccatacatcattacaaaacaaagcatgtagaagtggatcgccactttataaaagaaaggattgatagaagagttatcaacatcaaatatgcgctactaatcaacaactccctgatatactgacaaaatgattgtttgaacgagtatttaattttcttatgaacaagcttggactcatcaacatctacaatcaagcttgagggagagtgttgacaaataggaaatcaaaccacgtgatttgataaaagttgtgaaataaatcacacgatttagtcacagttactcttctgtatttaattccttcaaaattagaagaatttattttctaccttttatgtagaatattatgtacagtcccaatataatgtattgtttactattcagaaattttctccagtcatttctttaattacctcatcaaacttctcgcgagcacaaatgttctgctctgttgcaagctccacaatgcttgccaggtttacctggcttgaattcttctccatttccaacttgttaatctgaaagatgacagacagacatagatggaaaatgtatataaaaaggacaagcaaaaagtttcaaacagatttagttttttcatattggtaaaatcccaacccccgacaaaaaggaaaaaaaaaaagaaaagaaaaagaacgattgttatcaaaagaacagttactgaaataaaaaaaaaatgagggagagactgaaaagagaaataataaaaagatgaaaaaagagacaaaaaccttttcttgaagccttttaatcacaagaatagtctctgactcatttgaatccaaattcctatccccagtaattgtaccttcagtagcattattggttatacagtccttaacaccagaaactatatcaacctcagcaagctttcttgtcaagaaatcaatttgaatctcactttcagttctctgcataaaaaatacataaataagcataagaaccaagattaaaatttgcatacaacacgggaacaagaagagataacaacctgactttcaaatttaataaacagatcttcatattctgcttggacatctgctacttcattgtcctgccaagaatgagatacaaagatgggtgtaaaagagaaaaaggaaatcttacaaaccacacatacacaagaggaaatgtcagcgctataaacacaaaactgtaagaaaaggcaaatgttacctaccacgtgttggtctttctttctgacgggcacttttctcctgtttgttatatgcaataaaacacaaggatcaggaagcttatactcctcagatgcattacttttactatcttcatcttgtgtggaggaatcatcctcagggatgctgtccataagtgcctcaaacggaagaagtggtccagtatcacgcttctttttcatgggttttatatcagaagcctctgattgcatggtagaatacacctgaattcaaaatacatgtattaagaaccttacttttatggccttaaagattatactacacaggagacaatttgtattcctatttaatatccttctgtttttccctattacttgtttaagaagtattgaaagcttcaattgaacttttagcaattagttgaaatttttattcatatatgtagaaaatttttggtgctcaagctatgaaaatttgctggctttactcccgaataacacattcatgacctcgagagaagtaggccagatctaatcatgttaaacacaccaaagataaacttcatattgttattagtcagcaatattatacattaaaaaaggaaaacttgatttagcaattaatttaatcttcttccagaattccacatatttcgatagagcagaacatatgagctctcatcaaataaaacctaatgtacttaattcatgtcagattgctaaccaaatcaactaggtgatacatgtgtacatagaaaacatacattcatacgaaaaagaaaaataataatagaaacaacaacatttgataacaaatacttgaacaccatctcaaaaagctcaaggcagcaaaaaccacatttaactcactctgaatctgatctccctaatctgaaaagatagcttgataattacacttgttctctgaccagcaatggtatagattattaaaaacaaaatctttggatagtttataacccatagacagagacaattctattatgaaattatcaaggaaatataatctgcagaattacaaatgaccagcgatatataactttcgcacatgctagaaaaagaagaaaatattacctcttcaagagtctcccgagagaggttacccgcacaccaagtatctcgcctcttctcctagaggcagcaaaccagaaaagttttaacaaaaattacaatgaaagtgtaagaaagtgtaagaaagtgaaaatactgtctgtggaatttccaaactgactcgaatagcttaggttttactatacttatcattcttgttgaagattaataaagattcaaccacattattcacactaatttcagacctagaacctatcaagttggtaagaagaaaaattcagattcagtccctttagtgaagcttacttataaaaaataaaaaacacaactctgtctagtatataagcaaacaaaagttctgtggtagagagcaaattatgaacacccttgagcagacactacataagcttggttgattcacaatgccctagttcatgcagataaaaagtgcagatgcaatcgtgactactactttgagaactgagcgtttatctagaccaacaaaactctatataagctaatagcagtacttttaacaggccagagaactatcataatttggaagtcatgtaaacaagccagaatcaagtctgataaaaagaaaagcacatcacaggaacaattctatgtcttgggtgtattatttctgttcaagaataatattcatacaactaaatcccaagtaaaagagaaataatgttaactattttatagtcttcatttttaataacaatttttagcacaaaagacgtgaaactatgcttatcaatactaacctttctaaaacgatctcgactttcatccctatttgaacacaaaaccattgagctcaagttctcaattttcttttcttgttcttgaaccttcttctcatattcggcttgggcttttctttcctcttccaactccaaagctatgcgttccctatccagctcagtctgcaagacaagtggagcatgttcaagaatatgatccacccttcataactgaaataacttaggaacatacatttcaaacctttaataatttattccgcagattgaggatctgttcttcaaaatgttctgaatgaggaccctgaagaatggataaaagttaaaagaacactacttcaaatggatcattataaattgaatattatttgtaacagataattacactaataaaaattgtagaacaacctgtaatttggctcgaagctcctcaatttccttcttttgacgctttaacaaagcagcatctgttaaaatctaccataaacaaaataaattggttaaaattaatgtaagaaagcacagatatataaaaaaatgaaataaaaataaaagacctaaaacatcgaatttactatagaaaaagaaaaataattgaagaaaacctcattgacatgagcacaatttttaacacgcaaagccctgcttgcaaattgtagactgcttttagtctcgtctgcgtgaacctgccattaaagatgtacaacattaactttaacccaactaaaaacaagacaacaattaacaagaccatccatagcaagtgctgatcaaaatagtcttggtgacaccacaaattgagaaaactaacacaatatgctttgtgcccagcttattttctctatctgtccatgaggactgtatcaataatttgaactctattacttgcatttactcaacatcttataatatatatatatctgcaaaaatagtaccatttaaccctacatacttgccactgaagaaaatacagaataataataagaggaaataaaacctcaggaacaaaataaatatcagttgaacattgcaaaaacagtgaacaaaaatacctgtgcaagtgtaatgttgcatattatagctgtgtttgcatttccaccgagagcaggttgtaaaatgcgcgttagtttactatctctatatggaacatgacccctgcattatatatcaaccacggtcagttgtcttatattataagaccaacttctatgtattttaacaccgacattaacaagtacagacagagcctacccttgactctctacaccttcactcagtttcttaataaccgttcccagtgtcatcaagcttttgtttatgtgggatccctctttaagtctaacaccttctgccccggtttttgcagcacgttctgatccagcaaggtcaactaaattctagaagcaagaaagggcatccaatgtaaacatcacaaaatgaaaagggacatgttcttcttcattaaaattacaaaaaagaacacagacataaaatataagcacaaaagtcaggaaaataactaaagtctcattttctcaagagcatcgccataccaatactgaaacacgaacagcatcacaattaccgatgtcttggtcttcagttttatctcgactctcaattatctgttgattacaacatcataaggtgagtgaatgaacatacacaatattcctgattttaataaatgaggacaaataaaaataatcagattttagatctgcaatattttaaaaacagtaaagtggaccaatgagcatgcattttttttatttgaaactaggctcactgcctaaccctacaatattagggaaccaggaagcatacataatataatattccaattttttgttaaatttgggcggatagagacacataatgacattaccatgcggaaaatagtgtgggatctgctactgtggacgttcatattagtctctccaatatgccgatgagctgaaattttgaagcgcaaaataatcaaactaatcaacagcattaaagacattaaatctaacagaggttgatatctagataaccagggtattttgctttaaaagaagaattgtaaacatgtggttacacattgtaaaagataaacatattataaatatgtaaacaatttaagtagccaggtattcaagagaagctaaacatgactggacaaagctcaggaacagactgactttagatgttagctgtctaaaacaaactaggatcctgtaatattttgatgctccggttgcattctactggagaaatgtataaagcaatataagccaaagcatacatttagacaagttaataagcactcttagttctccaataacgctcagaaagagaacgtataattcaattgagaaagtaaaacaggaaattacattctccaaactccataaaactgaggacttgttcaggtgatgcaacaatttcttctcgcaacccagccacatatattccccgctgcaaaaatgaagagagaaaatcaccatttgagtgctgaaataacatcatatggtcacatattcacatcatacaaattcagtacctctagattttcatgaatctgtaatttccgatgctcaggagccaacaagtcgttaatctcctcgttatagatctccatgtaggacatacgcagaagaaattctcgatttacatcctaaaaagcacaacaaatatctatttaacatagaaacaaatcctagcaaatctttctgacagcaattttaacatt

SEQ ID NO: 17650 - DNA, 6494 bp, Cannabis sativa
atttataagttattaaaataatataaataaagttaattatttgtatattttcaatgaatattaatagtaatattgacttttataactaatttacatcttgtgcatgtacaatacaaaaattaccaaatatagttttatggtatattgtgggccaattgaacaccatggtttaagaaagataatgactctatagagaatagagaggatagtgattcttctttgtgttgatattaatgaaggatatgtttatggataacatttactttttattgactcacaagttcaatgagttttcttgagagattgttttcgcaaaaatacttgtattacttcacacagatttctaatctattgatcatttttaattgttgtctgttgaagtcaacagctgaaatgccaaaaattcaatgtatagataaatgacataatcattagatacatgcctggtcatatcatagtagacaacctttgaaaccccttcttaaagcggtttcatccaaatttcttccgataaacacaagcttgtttatccttttctcatcatcttcccatgtgctgcctggacacccatctagtatggaatgaacccccttataacaagtaaacaagaaaagagcacatataattaatgttgagttaattttatacgttatctttttcgaaaacatatatataaataaataaatatacatatcataaaaaaaatacaaatgagaaaatgagaacctgaaaaacataacgttgatcggattcttttatagacaagacacctttcattctatataagtcctctcctttttcttcaatcagtctttcaagccaatcatcaacctggaccgttaacatgaatacgacagcatgagagtgtcacttagcaccataaaaaaggaaggtaacattagaacactattggctattcgctacattctacgaggtgacttcaagaacatttgcaggcagaagcaatggaaggattacaaatttacattagaatcttcaaaacagttcgtcaggtttttattttatgtcatctgtgtgttcaaaaatctccaacaccaagatcatttgttaagctcagtatcccatgcacctaaagtttcattagtcaaagttcaaaaggcgtagtcatcgtcaaggaagatttggctaaagccaatgtaggtaaacaaagttcattactacaatgtcctcactatctctattgtttcaaaggaggtaggggcaaacaaattttatggatcactgcagtattggcagcagtctggacaatttggttaaaaaaaataaaagagagtatttgaagacgagaaaagtgatcctgaaagcttatggaaaaagattagacaatgggttccactttggttgcataatgtgaaagaatataaagatattctgctcaaatatttaattagtgagtagaaactggattcatctcatgtagtaatggtttgtatttattctgaatcatgtctgtgtattgtgtcattggtagattaaatacatacactgactatattgccacaaaaaaaaaaaaaaaaaaaacccacataaaactttcattgaattacatacaggcatttctaccaattaatatgttgaacgttagcttttcaaaaaaactaataaataaataataatataaatggtgaacgttatgtatgtaagcaggtatccaagtatttatgtatgcacctaaagaaagagtgcctaatggataataaaataaagaataattcaaaggagtcgctgcctggatagttattggcttaactaaaacccaacaggcaagtgtactgcaaagatatacggttataggcataacattggattcctgaagtaaaatgcaattcaatacacacaacaaagagtttattacctcgtcaatatcgagggttccttcggaaacaatagcaacactagtgacagcagaatcgtgaacgtgattgtgatgatgatgatgatgatgattgttgcattctgtggtatccaacccaagtgatgtaatgaaataagttgataaccaagaaagtaatttaaaaatcaaacatatcgttgatatgatgtagttgatattgctatttaaaaagtaatataatcaactgacaactatattcattcttaaacaagaattcacatgcatgtgtcaaagtctagttgctgatcatacactttgtcatgatggtaatcttgtcccattccatgtaggcactaggttagcctctacaaagtgcttaggtacaaggtcagtataacatttcttttatataattgaaaattaagagatttaacataacacaaaattagaaacaaagaaaggtatactaattcttttttattattattttttttaaaaaaaaaaatgattgggtatgctacactatacaaaaaaaaaaaaaaagatgtccactattagtatatcaagtatgacaagtaaatttagtttgtaatatatagatttattcactccaaataaatcataatttctgtttcgaaaccatgctctttataaatcaaataaatttgaagaaaaaaacaaacacagaaaaaaaatggaaagcaagaaacagatagaaaacaatacctttcccagtttcatgttgatgagttgtagaacaggacttatctacctgaacttcagaatcaatcctgtaattgacgcattaacatgttcaatgaaatggaaataaatattgggatggaatggaaagacatagagactagctaataacctatcaagatcataacctcccactccaagaacgaagtccatgtcaacagatccaaacttagctagctccatttgtgccatcccattaatatgctgacacaaatgcaaataaaggaataagttttaaaaattatttactattaaagtgaaacacaaaagccgaataggatacaaaagttgatttttttggtttcttttagttgaagcagctggttcctcaactggtctccttgttagcagagaagtttccattttggaagtagaagcagaggaagacacatatataagcaataacttcttatgtgctattcattaaactgcacatagttatatttaattttatttatttaattttttattttggccctagcagttccaccgagagacctcgcagtggccccaagatttttgagtctatggggattcaaaccttcgaacaaatgcctgctagaactttccaacagtccttaccactagaccacccctcggggttgttaaactgtaaatagttattaatatctcagaaagcacaccttaattctcttggtcaatgtctccagctcagcctcagtcactaaatctatctgcaagaatagttggaatccaattagcttcgaagcacaaaatcatccccgtattgtgaaagcaaatgtcagcttaaatgtatgtacaaacaaatataccttgttcaaaataatacgatcagcataagcaatttgttctacagcctcattaaccacaaatcttggttttatttcattaaggtgttgcattgcgtgcttggaatcaaccaaagtaacaaccccgtcaagtttcacatgctgtgagactaattcgtcggtacaaaaagtttctataacaggaccaggtttagcaagtcctaggaagcaaatatcaccatgataatcaagtgccaaaaccagtttaaagttttaaaaaagaattacaagtcattagacatgtctgaaagatagagccatttgtgaaattaaatgtaaaatctaacaagacaaatcaattttatcttgtttagaagcattaggagggttttttaacagcaaatatattcatttcttctcaaaagtacacacaataaatgcagttttctagaaatacaaaactgtttggtttcattttgagatgaaacaactgaacaaaccaacaactcagtttctatgatttgagccttagatttgtgataagaagctttctagaaatgtcaccaaaattactccaagatacaaaaagggatctctaatttcttttctcaatatttccgatctcaaaacctctttctcttttgtcttaacaacttaacccctaaatactaattattatgacctcttccctccattttaaaatttaatttttttgaaaaagagaaaggagatcttttgtcttatactggccccccacccgatatacatagatagccctcacttgtggtggaagaacaccgtggttacacgagttttagcacaatctgcactacaaccagcttcagccaaggaaaatacaaaaatcaacttatactaagtttttccaatctctacataaacctaagaaagaaaactcctcaaaaaaagtttagttttaaaaagtccatgcagctgtccaaaacttgactctttaccaaatgtcctctctgctgaactctctttcccctcaaaaatttctgatattcctttccattcaatctgcaaaaacaatagccatcaccgcagtcctccacaatcttactaatcttttgttcccaactggcttactcacaatcatatgagggaaagtataaggtaatacccatatcaaaatttaatcacacatgatttttctaaatcagttaatcaaatctcatcagggctcaaaataagaattaacgaccggaataatatacatagggtctaataaagcctaattctcatatgtttgatagctctagggtcttttgttcgactgtcgttctattgtgctaccacggtttccctccgccaaaagtgagattcccttatacacttgtgaggatgtcaatatgacctctgtctctttttcagaaaaagaaaagatggctaaacacaaataaccaaagaggaaatgggtaaaaagaataactaaaagaaagaacacttagtttccactaagtgtgtcataaatgtccaagcatcatacctgttgtttcaatgacaatgtgatcgaatttgtctcgtttgttcttaaccaactctaacagaagcttaactaaatctccccgtacagtacaacaaagacaaccgttgttaaccattacaatttcttcatttgcagaagaatgactagcaaccaaagatccgtcaatatcaacctccccaaactgcatcaatatccaacaggattactataataaactttaagcaattttaaaggagcatgcactctggaggcataaagctcgttattattttaaatgagcatgcactctgtatttgcttgccataagctcatcatcaataagtgggaaataattagcatcttgtatgtttaatcaccattaaagggaaatatataagaaactactttttactctaagttccttttaatactaaatggataggtcatagactacattataactatatagaaattgctacaaactacaaagtcaattgtttcctttttttcattacaaaacaaaaaacacaaaagcttcagcagtagtacaggcaagttgttagtgatacaatgagtaagaaacaactcagtaaaacaaattcaaataattttctttgtaatgtctttgtatgtatatttatatagagttgtatatgtccatcacattatcgttcatactactacaaaaaacaccatttatttcaggactttatgtaggaacgccaattctacttcatcttcatggagtaattatttttgaaaaaagagatgaatggagggacctcctccagaatttattaataaacctcacttatggtagagaaaaaccctggtaacaaccataagaactagaggttacagaaatatagttagtgttagaccctatgattggcagtaggtgatggcacgtagaagagaaaaggggatttggttcattgtatggcagggtagttcttgagtgagaaatgagatagtatatataggagggtagtgagggagaagggcatgctgagattagtgaaattaattcacagcatcatggactagtcccaggctctcgaattcctatggaacttgtgactcttgacattttctgccattaaatattattttaacttctcttcttcttctacaactaattcaatacttctgttactgccctaccgctattcttctatgattcagctattgttctattgggtttacttagctgccaggttcgggtcttatcaattagcagcctaacactatagaagggtctattttcagtccgataagtatttcaacttgtctcagcaattactaatatatagactgtataattcttttctatgtcaatgcaaaaacgaaatccaacataaacatgaaaaagtggatttgattacaatgtgattctgtgaatgagaaatattgttcattagactgaactcccctttctgatggtgacctttttcattgctaaaaaatattgttcaatgcatatcacattattcaaaaaaaaaaaaaaaatcagagataagtttaacaacaaattatttccaaagatccatctgaaacatagctaacgttcacaatatacaacaaaagatccccatcattgcttacaagcgcataatagtcc

SEQ ID NO: 17651 - DNA, 3358 bp, Cannabis sativa
gagaaaggtttcaaccaccaacaccaagagcaacatgcactctacaaaggtggggtatgaattcatttaaaaataacatctgccatcaaatagttctgaaagatgtatattacaacatttacaacaataaataaaactaacatcttggaatctattataaagactaatgatgctatttaaaacaagtctcaaagccaaaatgacacattgcttttaattttaactgcaatactcagatagtctggtttaaaataaatgttatcatacctaaaagaaagacactgagccaaagcctttgccacctcaagatccaaacaaccctctgtttgccagcatgcagatgccttgaccactcccactcatttcaaaccaccttgccaagaccgctgcagttgcctactgaattaataactgcattagtattgactttgaggcagtcctctaagggaggaacccaactactaatactcagctctaaatggggactcaacaatggcctagaagaaaaagaaattgctagcggcctctgctaactttgaaagttgccaaggtagtctcaaacccaattcacaaccaacttgggtgccatctccaagttattataaacttttttgttgcgattatgcaaaatactccataatatcaccatcaccaactcaatcttttcttttggtaaagcatcaaaaatctatgaataaattggagaaattcctcacaacggactgaaggatccctcaaatcaaaattacagagtttcttgcaagtcatcaaaaaagagcacccctaaagaaaatgatagatagtttcttcttttaactagcaaataggacaaagaccatgacgtgctaagttgatctttgtagggatccaattagcagaaacttgccaagcaaaaagtcttatctttggaggaaggtttaacgtccaaatctttttctgccaaaccagaataacccccagatggagaggcatggcccaaactagaattgcgaagagctaaccagtatccactcttaacagagtaccaacttgacttctcaaagtttcaaattaactttatctggcacatcgtaagaagattagtgaatatataaaattgcttctgcttcattagagagaaaaataccatgaaccaaatccttttcccaactgctcgtggctctcacaacaaagatacctttcataaagcatcaagaacacgtggagataaaacaagggaggaagatgcaggtagaatccaattatcagaataaattgcaatgtcatttcctttcccaactctccaaacaacccccaaatcaaaaattcattactgcaaaagatatttttccacacaaagcagcctcttttagataaaaaaatttcaccaaagtttttatttttgaaatacaatcccttcaaaacatgggcactggatgcaaggacattgtaaatttgagaagcctattgagcaaggagagtgattaaacaaatgcatatcacaaaaccccatgcctccatcttccttatgcaaacaaagtttatcccaagtacaccattgcgtctttactatatatattattcccaccccatcaaaagctagcacacatcctatgaacatttttgataaacctctcaagaagcttaaaatgagtcatagtgtaagttagaataaactgaataataggcttgatcgaaacctcacgactcactatagagaaaagcttggacttccaaccattaagttttttccaaatcgaatcacaaatagaattgaagaatccagcgttacaatgaaccttaaaacatgggaggccaagattatcatgacaattagccccaatcaccccctaacaactccaccactctatctttattagagcttgttatacccgaaatcgggctagcactttagaagaggacacgtgcaaaactgggagaatacgaatcaccaaatacaatattaattgtatttgagaatggaataactcattaaatgcggaactgatagggtatattcacaacttgctgactgcaaagtcttaagcgaggtaaatatgtacaaactgttgttgtaacgccctaatacttaggcgcgctacagtgattttccaaataacatactaccttgctaatcaaggattttcttcaaaaatcatgtcaaatcaaaactttgaatgaagttaataaactttataaacatacatatgtatatatattatataatcgggatcccgtgctagaacttttataaacattttgaagatatttttacgtcgcaaagcgactacaaaatatgccccaagatgtcccgagaccgaacactctaggtcgctctgtcttgacatgtataatcattacccgagctcaaaactcattcatgttcagcttccaccttttctttacctacacatgaaagtagaatctgtgagccaataaactcagtaagaaaagcatacaacaaaatatataaataatcgacatgtttctaggcgccatacacctatccacaaggcttactaaatgattaagaacgttcttaatggttgatgctattgaccatgatatcacccattactagcactatgatctcactgcgggaccggcactatgttcgtaccgctatgatagtatcaatagcacctaagagtacaattggccatgatatcactcttagccagtactgtgcccatactgcgaaaccgacacagtggttgtgccgctatgatatcgccaattaatactctctggggtgaatatcactcttaaccagtacgatgcatgtactgccgaaccgacacaatggttgtgccgctatgatatcacccaaaacatatacaatcacaaacacaacatgcttatataatatgttctatgctaatcttacctcatttccgaattcaagtgtgccggacgacctgaatggaaaattatgcgctgaattgaggccctatgtcacaacataaaatttgtaagtgttctaaacactctctaatgcccgaaaagaacctaaagtttttctactaaactttgtagtaaagataccctaaaataaaatatataatttggctctagtttatataccatattgtagagcttgtcataagctttaaaatgctatatagaacgtctaaaacagacacccgagtgaaaaattatggccaaaatacgaaaatcagccttcctcgatatagtccaactggaattccggttggaacagccctgaaccaaccggaattccggttgtttgggcagattcaacacgaaaattcacaaactttaagcctccaaaaccaactcaaatcttccccaatcaccaccaaactttccagaacactcatattaatctcaaagaacatattccaagcagtaaaaccca

SEQ ID NO: 17652 - DNA, 3252 bp, Cannabis sativa
acaattcaaaactgcaaaccgcgcggtttaagaaaaattcaaaccgcgaccgcactgcaaagaatttcaaactatatttttttaattactgtgtgcggacagtgtggtttaacggtttaatgaacacccctaagaacaattgttaaaactgccactcataatctagtaaatggtaccagttcaagaccaaacggtcgtaaaccagttaaatatgtctacttttagcttagggaattttaacaaatatccaacaaatccacctttagttatatgtccatataatgtttcagcttcaagtcttcattgagcccttttaataaaatgcacgtaattatatataaatttgttgatcctcttataattataagtctccattaggtatagtagaaagtgatatatatatagatatatgtataataatatcatgtaaatatataaaattatgtaattaattaattaagaggaaaaagtgaacaaagaaaaagattatatatgggaaggaaaggtgagacaaataaagagtacgtggccgacattattgtttgaggttataaagtgggacctttctatggtttcgcccttttactttatcataccttaatatttaacttaatattttatttaattttatataatttaatataataacttttaaacaaatattagtgatcaattatagagcgtcgcgtttaggtggtattagacaacagtaatattaaataacatataggaaaatgttaaaaaatacttttagtacttttataaaagtgttatattattattagtgtaattactaaatgaatatttttcgtcgattaactgaagggaaattttaatgggaaaatttattgttggttatagaattcaatgtactacaaaaatagtctactccatcgattaaaaattgattaaaatttttttcctgttgccataaatgtgggatttagccgattcaaaactaatgggtaaaagagatatacattagggttaggtttaagttcataatgctgatgcagttttatggtgtttcttttcacaagaaattaatatggaagttatttgactttactttcctattatgtcagaaggaagatatctctttcaaagatgtcgtcttatatgcatcggagattctaaaaaaaaggctttcaataagatgtttgttgatgaaattgaactgggcttgttctattaaactacatgttaatgctattattttattctttatcgttagttatagctttgaataattctaatgtatttaataatgagctaggagttattttttctgacattaaggtgttgctatttaagctttcagagtcatttctttctcatgttagtagtaattttaatattacatgtcattaattggttaagcatgcccttgttagctagacgatgagttttttagctggaagaaactcctctcatttgtaactcgcctccaagacttttttaatacaaatatcatattcttaagaaaaaaaaaactcttgtgcatcattaaccagaactgacacaagctagcgtcaatttataatcaactcagaagatttttgtgagctaaaaaaagtcgtttgtaattgagttatttgaaattggtaagtaaaaaataaataccatcttaagagagattattagagaatcacattattaatatgtgaaaagattatagcatatataaaagtcataataccatcttcttattatcaattaattttaagatagaacccgatacatcttaccattctcatgtgtcttaatcatcccaccaaaattgagggcatgagccgaggaataaggagattgaaagagcttaggaatgtctcaaaggtagacaggtcaccaatcaattgtaattttttctaagtgctgtcatgtttcatatgtgaaatatattattaagttaatatataaaataatattcttttttcacttctgactttaattaattggactatatatattattactataatagtaagcgtggactctccctttcaaaactatatatatggattattttttaaataggtaatatggggactttttttttttttctttgaaagggaatatggggacttttaaataggtaatattttaaaaatattaatttttaaaaaagaatttttaatctaatatttgataataaaagaaaaattaaaatttttgtatttaattctactacttaatttttaagaaaaaaaaaatctttttttttacattatatcaaaaaatatatttatataatatataaaataatatatttatagaaaaaaaaaataatttatactatatacataaccatgatgagtactactagagtagaaaatatataagtctaagactatttaaatttcaagaccctcacttttagaaatatatacaaaaaaaaatatattgaaaataatattatgcataatataacgaacataattgtgaatatttgttgtataatctacttaatttttattaaataaaggcctaatgaaacattttaatttttattttgagtcttgaaaaatgtaagtcctaagcacaggcctaatctatctataatgagtatattacttttaattattagataattattaaattgttccgattaattctaaaacttaactaaaaatagttaataaattatttgtaacctgattttatttcatttattaatatattttgtttctttataaaatattaattacgattaattttattttaaaatattttaataataattgctaattagtttttattaaatatgattaattataattaatttagttctattttttaaaaaaataataacttggcaacctattattatatatatcagtttataaaaagaatgtaacatatcatagttgtaattttaatgtaattattaagtgatcatttatatatagatatattcatatagttgggttcatatatataagttatacatttttacacatacagataagttatatatgattcttattttgttttattttttatatctatagtagtcacaagttttctgcaagtttttttttttaaaaaaaaaaaaatctaaataatttaaatttccagcaacaaatttgtgcataaaattaattatgctcggaacttattttgacaacttaaactatttaaaattttacaaaaagcatataaaaaattgtaaaagaaaattatatataattggatgtagtatatttttctcctttattatattcaattgtctaattgtctgtaaaaattaaa

SEQ ID NO: 17653 - DNA, 9731 bp, Cannabis sativa
tactgacgaaaatagagaaaattacagttttacaaacattaggtacttatgccactaaaaaaaattattaggtttatgccgcttacaaactcaaaactttgagtacatatgccggtatttaccctacaataaaacttaatttgttgtgttaccattaagcttttgactacctacatataagttagatattttgttctctaaaatatcatttttgggcttaactacgaattacaagattagttattcatggcacaaattacaactgcagctctcgagccaacagaacgacatcatataattcaccatgaactacactaaattgcctttggcttaaacagattttacagctaattaagatgaaacttaacaccacaataaaatgaaccaatatatatgtacagcgacgacatttaaagagttataaagtagtcgcaatagaacacataaatctgaaaaatttatcatttttctacttcgtcttttataaaatttaatttaagggctatagagaccacattgtcatcactataggtgccttcaaaatacctttacctatagtaacaacaatgccaactctacaggtgtctaaattattttgagaagaaatacaacatgataattatttagtatatatttttttttttattttcctcaaattgtctagaactatgcaccaaacgattaggaaaagatcaaaatttgtgagaaattataattttaacatcctacaacgacatttcatcaaaaagaaaaaacatcctacatcgacaatgttgtcgcaataggtactgaaaatttaaggcaatagatcactccaaaaaatttggtggaactcaaaagttgtgggaaattatgatttcaaaatactatagcaacgattacaacgacaaagttgatcatcgcagtagaatgttaaatcaatagtttacttatttactaaaacaaaatcttaataaatttttccttctaaattttttgtaacctattgcaatgacaatatcatgaagctatttgcagcacgcaaaattgattacgctaatatatacgctaacattttagcgatgatatttcattgcagtagcctatagtgacgattaggcaaaaattaaaatttgtgaaaaattatagttttaacatcatataacaacaatgtcatcgcagtaggttgctgaaaatttaaggtaataaaactcacaccaaaaaatttggtggaactcaaaataaattaatgtttcatttatttaatgaaataaaatattaataatattttctttttaaattttttgtaacaatcattgtatttgttgtagcatgctaaattgagcaattaagccaatatatatgctatcattttagccacgatatttcgtcccaatagcctatagcgacaaatttttggctttcaaagagtcttcgtcgccacttgcaagcaactattggcctttctccaaagacacggaaactcgaccattcatttgtagtacccttccaattccatgttggacaatttttcttaattttatttgtaacacttctcaactcttttatttctatacgaaaataaatcaactataaatattaattttagaaatattaaattattaaattttgattaattttttatttgaacttacgttaacttaacttgtcttgattagatagttttttgttgtgttagccattataatcaataattaatgaacgtagcatctctacatatgaagtttagttaaaataaaaatgtagatttttctaattaactgaagtttttgaggtaattgttatgaatcaattatgtatgtatatataatcatattatctaattattattgtgttctaaattatatacaaatttttgtatcctgatttattttattttttaacaccaataataaataataataaaaaatgagttgttatgcttaattttgttacttaataaaaaaatatcaaaaaatatttaactcaaagtcaatttttttttagtaatttgtggtataagtacctaagtttaactttcggttgcaaataaatatttaagtttaatttttagtggtaataatacctaaattatcttctgaaactctgtaaatacatggttgttaaatgttaagtaaattaccatgtgacaatctctgattggtccaggtcataaatttttaatttattttttttaaaaaaaataatttatatataccaaaaagacaatgacacgtggataataacttgacatttaacggtcaagtacctacagagttctaaaaatataacttatgtattattaccaccaaaaattaaacttaggtagagttaaacttaaatatttatgatgcaaattactatttttttttatcttttttttttgctgaataatttttttttttaatttttctcatgaaacaatcccagtccatataatgtaaaaatattatataaatttaagggaaatttacataaactactatttttgacaaattttttacacatttatagtaacaccctactagattaggcgtgttattgtgatttcttaatgttgtgcactcctttgataatcaaagggttaatggaaaaatatggataatttaaaattttcttaaataaattttaaacttaatcaattaaatattttacataatttgggatcccgccttttagaatttttaattgttttgcaaaatgtataactacaaaatttgttacctagcgactagcaaaataaagcccgttgtcccaaaaatcgaacactcaggtctaaccgtccaaatatgtacaattttcatccgctcgtactcactgctgatcagcattagctttgcccttacctacacatgcaaataataactgtgagtcgacagactcagtaagaaaaatataatcatatcataaacataaaaacttgattataactatgcgcccatacacccaattataaccctatcccgcgtccaacgcgtactgagcctacaatattcctaagacagtactattgaccataatattagcctatactcgaaactctagtcgtatcgatgtaatagcgtcaatcagtacttttgccaaacatatatgccggtattcagtataactccatgtacactaataccgccattgctgatatgttatctaacatacattcataaatatgcacagttaaacacgtaatcatatattcatattattatactaatcttacattgactctaaattcaggtgtgccggtcaacctgagtaggaactgatgctcgacgatttacaagcccctaagtcacaacatacgtaaaattgataagtgatatgctaaatcacttttcagggacttagactcaaaactagaagttttcttatcggtaaataccatgacaatacactaaagatcaagaaaatgctaaaaaatgagttcccagaaaaacgtcacaagaaacggcaagccatttcctaaaaacaacaagccatttttctggtctctgactgccaaaaatgataagtcatttatgggaaaacgggttgtcgttttttgctgcagaaacacaagaaatcccataattcaaagaattctaccccaaatcttaccaaaagttctagatcgcctaataacaagcataaaccaactaaaaaatgcatcatccatcaacaatttcaaaatccaccattagtgacctaagtttgagctcaaaagtttaaaattagctcaaactcaaccacaaccattaaaacatccacaaaaccacctaattaactcaaatataactttataaaccaattctaagcatcttcaaagcatacaataactaaactctcaaaaataaccataaaacctaataacctctcaagaaaatcaaagagaagagggaaggtgaacttaccttaggttaattcttgaaattcctacagaattcttgctaaatcaccaagaaaaagtgaatcaaaacatggtttcttgttgagttctagagaggccaagaaagaaaaagacttggagagagaaaatgatttaggttaattctaattttttttttttttgtgtgtgtttttggctaattatcaacaaagagataaggttaatctcttgtttacaattcagctcattaagtaataaaactaaaggattattaactaatcaactaacttttaaataaagataaagctaagataaaatgattattccttatttgcttatacataaagtaatcaacttatataggggtaaaatagtcttaatctataaccccaaacattcttgatattcctaatgtctaattatattgctccactatttataaggtactaaatcatatctacgtgattatataggtcatacgtcgcatttcactattactaggcataaaatatgaaaatcataaaattctgcatacatcataattaatacacttagaattttaatatatctccatgattgcataaataataaacaaaagtctaattctgaaattaagtcttgcttgtttactaattttcatattaaagttaagcggtcattacaattatacctctgttaaaagaattttatcctcgaaatctaacctgaataacttcgaatattgagctctcatatcaaacttcaactcccaggtggctttctccacctaactgtttttccagagtaatcttttctatcaaggatctgcattggtttctcctcatatgaaaaatatgattggagttctaagttttcataactcaacacatgaatgagatccgagacatattttcgcaacatagagacatgaaatacattatgaattgctaacaatgctggaggcaaggctaggcgataagaaactaatccaaccttctcgagaatctcaaaaggccctgtaaatctagggcataacttgccctttttcccaaaatgtttaatccccttcattggagatacccataggaatacgtaattttctacctgaaactctatatttctgcattatggatctgcataactcttttgtctactctaagaggtgagcatcctggccttgatcttctctattgcctcattggtctgttgtactgatttcagacctaagtacttcctttctccattttcatcaataggagatctacacttcctgccatacaatatctcataggggtcatccctatagtactttgatagatgttgttgtatgaaaactctatcaacaacaaatacttactctaggagccttcaaaatccatcacacaagctcgtaacaaatctttcaatatctggattattctctcggattgaccatctatttggggatagaatgttgtactaaactttaactttgtacccatggctcactggagactttcccaaaactttgaagtaaactttagatccctatctgatacaatggactttagagtcccatgtaatcgtactatttcctttatgtagagttctacatactgatctactatatacgttgttttcatgggtagaaaatgtgttgtcttggtaaactgatccacaactatccatgtggaatcaaacatactcgtggttctaggtagtccaaccacaaaatctatggtgacatcctcccatttccactcgggaagggtcaaaggctgcaacaatcctgcaggtctttgatgttcaaccttgatctgttgaaaagtcagacactgagatacgtactccaccacatcctttttaataccgcaccaccagtagtaaggttttaaatcttgatacattttggtggtaccaggatgtaatgaatagggtgtagtatgagcttcatcaagaatctctcttctaagttccacactaatgggaacacaaactcgggctttgtaaagcaacatcccattacttgacactgtgaaatccttagcttgactaactagaacttcctctcgggtctttatcaattttggatccactaattgagctactctaattctttccaacaagtctaattgtagcatcaaattattgagtttaccaaccacaaactcaatatctaatttgaccatgtcgtctgccaactaaggtgaaatcaaaatcatgctggatacctgctcgggaaccttcttacttagggcatctgccactacattggccttctcgggatgataaagaatctcacaatcataatctttaactagctccaaccaccacctctatctcatattcaaatctttttgggtaataaaatatatgaggctcttgtgatcggtataaatctcacacttctctttgtagagatagtgtcaccaaattttcaagacaaacaccactgcagtaagctctaggtcatgagttgggtatcgctgctcatactctttaactggagggaggcataagcaataaccctattggtttgaattagaacgcaccccagaccttgcctggatgcatcacaataaatcacgaacttttcctggtctaacggtagtgttagcattgggactgtgatcactcattgctttagttcttggaaacttattttgcacttgtttgtccatataaaccgctgattcttcttagctaactatgttaagggagttagaattttggaaaacccctcaacaaaccgacggtaataaccagctaaacccagaaagtttctaacttcagtgactgtctttagcctcggccaatccttgacggattcaatctttcctggattaactatgatcccatccttactgacaatgtgccctaagaatgacacttgagatagctagaattcacatttcttaaacttagcatagagcttatgttcctatagcctgtgtaaaaccatatgcagatgttgctcatgctccttttctgactgagagtatacaaggatatcatcgataaatactataacacatatatcgagaaaatccttgaatatcctattcatcaggtccatgaaagcttccagagcattggttagtccaaaagatataactaagaattcataatggccatacatagtacaaaaggcagtctttggaatgtcctcctcttggattttgaactgatgatagcccgatcgaagatcaattttagagaaaactatctttctttgaagttgatcgaacaaatcgtcgatactaggtaaagggtatttattcttgatattcaatttgtttaattctcggtagtcaatacacatacaaagtgatccatctttctttttaacaaacaacactagagctccccaaggtgacacactgggttgaaaaaatcctaagtcaagcatcccctaaagttgaatctttaattctttaagttctgcaggagccattctataaggtgctttagaaactggctccactccatgtactaaagcaattacaaagtctatttctcactgtggtggtaaacccataagttctttaggaaacacatctaagaactcttgaaccactttaatatcctcagggcgaactgattcaggtctagtggtatctagcactactgctagaaaccctaagcacccttcttgtaataattccctaactttcaataaagaaattaatggaatacaggaaccttgtagtgatcccacaaacacaaacggttcttcacccactagttggaagatcaccatcttcctcttacaatcaatactagttgcatacttagacaagaaatccattcccaagataatatcaaaatccgctaaacccaattccactagatcagcactcaactctctatcctcaatcctaatcggcatagacctaacccaccttttagagataactaatgctccactaggtagtagggttccaaaccttttatcataattaccatatggcataccaaatttttttaattattatggccaccacataagaatgagtggccctagagtaaaacaaaatagagtaataagatttgatgagcgagagctgacctgtaacaactaaggggctagtttctgcatcagcctgagtaagagcaaatacccttgctggagcgagtttcacctctgacttctgttcttccttctttaactgtgggcagtctcttttataatgtccagttagaccacactggaaacatccacgacctctacacttgcccaaatgatgtttcttacagttagggtattctgggtaagtgtatcggttctcagacccaccctgacggttaccatgatcttggttccctcagaactttttattttgacttaatccaccgaacgcgtgtggaagttttctcttctgattagtggttgagtcactaccacccctaccataaccaaaggtaggaggatcagtagctccaacaataatttgagtccctcgagactcctgaatacactcaattgtgccctcagctcgtagtgcttttcccatcacatcagcataagtggtggcatcatccgttgtaatcatcaggtcgtgtgtaatcttgggattcaacccatccaaatacttctctttcttacttaagtcagttggcactattcctaagaccaacctagccagtctatcaaactgtatcgtaaactctgtaacggacatattttccttttgagtcaattgtgtaaactcctttctctttgcactacggactgcttcattgtagtattttacattaaacaactcttgaaatttttcccaagtaattttggtgacgtcgcgagtgaggggtaccatgtcccaccaaaccagggcatcaatctggaattaaaacgttgcacaagacactctgtcattgccaatgactctcataaaattcaaaatcttggtaataatagttagtcattgcttgactttcctaacgtctggacctcttagaaagattggaagtgcttgcatacggaacctttcataaagtggttccattcgattaacgacgacaaccagccccacttgcataaaaggggcatgagccatctgcaccttaggagcagacattacaggagcactctattgtctcaaacgtcagatctcttcatcttgctcattaatcctggcttgcatttcagcaaacctatattcccaatcctaggtagcatgcggtgggttaacatgaccctgaccgcgtgccctacctcttgggcctctgtctcggccacaaatatttgggggaaattatacttcctgaccgctattggatctgaccaaattaccctggcttcttgtgtgccgcctagcatccattctattagaacagtatgcgaaacagtgagctagcctagtcagatcgcgatcaaaattaaattttaattaccacttacttgagaaaataaaacatgctcttattcaactatcaggctactaacatgcttcctatcatgcttttcttatcacatactaacaaagcaaactactaaagcataagaggcttactgaaccgtgagtcgaacttatctctgattatgattgtacatattgtgatgatcttcagatcacaacctggcggctttaataccaaattgtaatacccttttgctaatcaacgggattatggaaaacgtggataatttaaaattttcttaaataaactttaaacttaatatattaaatactttacataatctgagatcccatcttttaaaatttacatctattttacaaaatatataactccaaaagtggtcgtctagcgactaccaaaataaagtctgctaccccgaagatcgaacactccaggtctaaccgtcccgatatatacaatttttatttgctcatactctctattgtttagtcttactgttgctccaaaattcgcccaaaatacgtggaccagtcaagaggggacacgtgga

SEQ ID NO: 17654 - DNA, 3025 bp, Cannabis sativa
ttggtctcttcactacatctttgtggatacggtgttcaaagatggaagagctgttttggttttgaggtatttaattaaagataaggcatccatgttacaatactaatcttttcagttatgattatattagtccataataataattctaatacgatgaccgcgttgtttgtggcctaaggtgttaaatcaaagagttgcttactactcactagggcatgtgcaattagaaaagcccccaagtggaagttattatctttgaagattattcaattgcttgatatgttaagactctttctttctgtttgttgtttaatttaatatctcttcccatgtattggctaaatgggggatcagttgctaaatcttgtgctggtttcctaagtttttggaaaatgaatcccaatgtgatcaccaacaaaatacatcaaaacaaatagataagaatataccatttatttttaaaatagcaataattaggcataccaaatactttcttatttaatcaattacatattattttacttaaaaaagaaaattactaatatttctccaaattcaaaggaatgccttcaattcttagcatctctctaaacataattacctatttaaatatttaaattatccaaatcatttcttcttcttcttcttcctttactcatttccgccattgctcaaaaccaggggaaagaacacagagagagagagagagagcaatggcgagtcttcttcctctaacatcgattcaaacattttctttcttgtgggtcacaacagttctgctaatctcacccgctcaatccctcacctgcacttctcaaacattcgccaacaaactctattcctactgtttagatctcccaactctcaacgcctaccttcattggaattacgacgctgccaattcctctctctccgtcgcattcaccgctcccccgtcaaaacctgacggatgggtctcatgggccgttaacccaacaggaaccggcatggccggagctcaagctctaatcgccgttaaacagcctaacgattccgtcaccgttcaaacctacaagatcaattcatacagctccattgttccgtctaagctttcgtttgaggtttggaatctcagcgcccatgcccaaggtgccgagatcacgatcttcgccaccgttaaagtgccggagaagacgaagaagctgaaccatctttggcaagtgggtccggggatcaacgaaggaactgggtttatcgttaagcatgatatgagtccggcgaatcttgggtcggtggggacgttgaatttggtggccgggaccaatactaatggtacggccggtgccggcgatggtggagcaagtggttctgagagtaatggaggtgggattattggtaatgtgaagactttgatgggtttttgtgttgtttggattgtgattgttgggaattatgtattggggatttagaagattgtaatatgaatttccaatgggtggtgatttgattgtgaactgtgagtttttcattgggaggaagatgaaatatgtaaaaacacagagaagaagtaaacaaaaatatttatttattttttttaagaaaagggatgaatttatgttgactataaaccgtaataatatatattttaagttgttataaaataatataccataatataaaatagatatgaaaaaaaaaaaggaaaatgaagagtgaaaggagaagaatgtaaattgaaattttattaatttgttaaatcggccaaaaaaacaattctgtaattcagtaggaatgtccttttcactgaaaagttaaaaactcaatgtggaaaaaaaatatgacgatctagtaaagctgtgcgtagtcatattaacagatcgtttaatgaaaaacaaagaaacattgtttaaaatagatagaaactttcgacagtccatcaccactcccttaagaagcgaaaccagggtgatgttacttcgaatagcttggacaattgagagacaatcggacttgagtttaatgtaataaaaaaaaatacaactaaatattaatgatgatatttgatttagtaatttggatatctataaataatatttcataaaactcctccttaaagagaaatactaaatggcaccaatggtgcctaacaccctcttatgtgtcaatatcgctattgatcaaactaagtattgtgtttcatttaatttaatataataacttttagtgagtatcgttaatcaatcgcagcgacatgtctagaaggtgttagtcactactggtgcctaatagcaataatataatggtgtttaactctcgttggtgaaatatatgtttgtcaactgagtatcctgttcgtatttgtgctgctttgttgacatattattattgattaaatgctatattctaacactctttttcggtttcttccactaaatttatacttgaagttttaattttattgagacaatttttctaaaaaagaaaagaaaaatatgtaagaattaatgaattgctattttgataactacaaactgtattccatcaaaaaagtgtttttattttttattttttatttttacactttaaactaattttattgtattttcaaaaaaattcacgtaacaatcaatagagcattgtaacctataaaaactcacatgaaaactactagaataacccaattcataaaaaaaaaaaaaaatttaaaaatggtatctacaaaattgaattcatcatataatattccttcaataaaaacaaaattgtccataatatatttataagatttttttatttttatacttcaaaataaactttttacattcttacataaatttatataataattaatagagcaatcaaaatcagcataacaactcacataaaagtcactgaagaaattaccgaaacagctcaaaatataattttttttttataaaaagttaaaaaatactatataaagtattttcttatatttatacctcatggcttctaaacaccacattaagtaaattgagtaatatctattaattgtggtttagtatga

SEQ ID NO: 17655 - DNA, 4656 bp, Cannabis sativa
aaaacacagggtccaatctgtaacttttgcaaaacacaggatccaaaatggtatttacccttaaagatatatatttaatgtataataaaaattattataacagatagcatttataaatttttggagtgcaaataaaactctcctaacttaattcctaacttaatacaccccactaatctcaattaaatctgataataccactactaaagtttgaaaagtttctaactcttatccaaaataacatatgggaaattttacaataatataccaaaaatctaaattaattacaaaatatcttcaaccaatatatataattaggaaactaagttgaattttttgcggtattgtccaatttttataatatttttatattttgattttttttttatataataagtgatataatataaaataaaatattttgatgtgtattaataaataaaataacacttctaaaaattataaacgaaatttattattgttaagtagaagattataatttttacgaaaaatattaaaaatgatagaattaacagagaaatggtatatatgtttgtttattatttaaaagattatttagactttattttccaacaacaacaaaaaaatgatgtagaacttgattttttattgtacaaatatcaatgttacatttcagaattacaataaacttcacaagtgtgctaaacagcctataagataaactacaaaggttactttatatggtacatactctattctattatttttggttgttgttgttgttattagtactatatataattcacaaagcaatatatcagcaacaataaaacttgacaaagcctcaaaggtccccaaaacattaatagacatatagtatataataaaattgatatccattgtgcacaaaccttaaggaatttgaagaatttaatatatacaaaagaatatacatgatgtcaccttttgtatcaacttgacccttattagtgggtttttcagaaaagcaaatattcatctgatcaatgtataaattaataagaagtggttgagtccaagtaatagggttgtttgaattgataatagtgagtcttaaataactgattttctgttctgaattgcttgctgcccatgttagtttggagaaagtaaagtttttatctttatcaaagattgtatccaagatgggcagagaggtgataaagtaatattttcaacttgtaaaaaaatgaaaataaaaaacaaaattttttctcccattatcccaaaaatcaaaactttgtcatggattggtagtttctattctttactcaacagaatttttctataataataataataatgaaaatgggttccttccctctcaaaggattgcttgttttgttgagcttaaagcttaggtttttgctctctctgaaatccaattcgccaatattacggcgcctgtcgctttcttccaaagtcactcagccactgccacccccaccctctctctctctctctctccccaagtgggtctccattattatgtatattatattatatatatgcatatttgtttatgaatttgtttaatacaataatgggaggttatataaaaggtatagcctctttggtgtgagggctttaagcccctttcctctttgaagattgagacaaaataattgggactaaggcccattcttcccaaatcaggaaacttctttcattagccttgctttctctgcaaatctctctctctctcccacactcatggaaggcacgaccaatgaacgtcttgattttgggaagatgggttacgggtaattttaatccataatcttttatggttattcttttttccttatttttgaatctctgttcttgttattttattcttggttttgttattttattagatgccagcactatagaaggagatgtcagattcgagctccgtgctgcaacgagatctacccatgtcgtcattgtcataacgaggctacggtatgtttttcttctttttgattcacatcccatgttttaaccttgttttagcttctccacttatttttctgatttggggttttgttaatttcttcatattcgatctatttagagcattttaaagaacccctttgatcgacatgagctggttcggaacgatgttaaagaagtaagctatggactccctgtttctctttcacattcgtttgttgtattactactgtttgtaaatttgccaatatgaatgactttaatggagatttctttctttctttccaggttgtctgttcagtttgtgatacagaacaaccggtatgtattatgtttctttcatcatatctcagaatgtttttccctctttaggttactgaaatttctacctttgttgatttttctatgttttttcaggctaatcaaacttgtaccaactgtggggtcaacatgggggagtatttctgtgatatatgcaagttttatgatgatgatgtaattatacaatcccagcttcaactactaaaaaacattggaattgtgattattagccaagtttgtagctttagatttattgaaaaacttgttctgtaatattctgttctatgtttctttagcagtttattctttttatgagactgtttgaattatctgcttgcagactgataaggctcaatttcattgtgatgattgtggaatctgcaggtttgtatgctaagtttagaaaatttgttttctatttcttttcgcttgattttttttccttcatcaaattgctaattcggtgttgtttgtggcatttgaaaacagagttggtggccgtgagaatttctttcactgcaaaaagtgtggtatgcaatttgtaccattaccactctactactactactcaacctttaaaactcactataaggatgttgaaatgaaatcttaagctttggtttattgcttttctacattttcatttttttattatatttctatcaacactagaaagaaccctcttggcttggtaccctgctaaacatttgttttgcctgttcttgccatctcttttaagcatttcagcttagtagagcttgtctctttttaaagaggtattttgcaatttttcagggtcttgctattctattggtctgctcgataatcaccggtgcgtggagaattccatgaggcaccattgccccatatgctatgaggttttagttgtgttatgatcatgtttactgtttctcttttctactttggaatgttcttctttccttacacaaccatattataaactgcagtatctttttgattccctgaaagacacaaccgtaatgaaatgtggccacacaatgcattgtgaatgttacagtgaattggtaaagcgcggaaagtaaggagcaagccatgaatttttcttcacatttgctttctcatgttacatcttcaaaagtgtaactgctttgtttctcgtttactaaaactgtttcggaaatacacagatactgttgccccatatgcttcaagtccatagttgacatgaccaaaacttggaagagaatagacgaagaggtacatgctgaattcgagctcttaactttttagacaagttaccttaccttgcaatgtttggtgctaatttcttgacatcaacagattgaagagaccatcatgcctgaagattatcgctctagaaaggtttatactttcaactttgctcatgagattgttctaacataaatttttctgatttggcataaaataaaaataaacctttctataaggagcactttcacaccttttttacataaattctgagtattggtcaacaagatgatttcccaatagaaattgacttatttttcttgttactattcaggtttggatcttatgtaatgactgcaatgacactactgaagtttacttccacatagttggccagaaatgcagccactgcaaatcatataatacccgaacaatcgctcctccggttcttccacaatgatcttgctgattggattacctgtaaaatggaagggtgattttgaaggcattcttatcttttcaaacctcaacctcaacctcagctgaatctgtactattatttgcattgcattttatacaaacactattgaaaacattaattccctcaaacctggctcctttcttttttttttttactcaatctttcttcctccaatttatggggtgaaaaacccaagtaaaagtatcttgggttgatgtaaacataatcatatacatgttgaaattaaaggggaaaagttcttccctgctatggaccaaaggaaaaaaaaaagtattgtgttgattggttcagccatttatctgagatttggatttgcatgcatatattttatcactcaaattggtgttgagtacttttgaggtgaggcacagtgtattcactgagtatggtcattttcattaacagtatcagtatgggcagaagcttatgttgtgtggtccaaagccaatatttcttgacattacagcactgccagtatctatccactcttccttttttaagaaagaaaacatgctgtttatgtactgagaattatggttttggaatcattaataatgttttgatttgacttggaaaaaaaccaataaaacttttgcaggtagaagcagttttgtttaaagtgatcctatcctggttcacccatggattaagattatgttaca

SEQ ID NO: 17656 - DNA, 3812 bp, Cannabis sativa
aatagttcatggggcatttttaacgaccttaaaagttcaggggcatgatcaagtacatatcaaagttcaaggacaaaaatcctaattaggctatacataatatataacgtgttaatatactatgttatgagataattattttttaagatatttgaaaggctgattgaaaaaagagcatatatatcttttgatattaaggaaggagaaatttaaaattaaaatttgtaaaatcactaagttatgattatgattataatcacaacataattttattagttcagaataaatatgtaattaaagagaaaatggaaattttagttcagaataaatatgtaattaatttttaactaaaaagatccatttctatatttgctaaatgtgaatataactctctatatattaataacccacttggaaaaaattgattggtatatgatgtatagtatatatagtaaatcgatattttgttgaaatttcatgtcttttattcataaataaaagggtacacttttcaaactaaaaatataaataaataaataaataaataagaaaagtacagaaactatattgaactaaaatgaaaaaaataaaataaaatacaatatggaactagttaacaaatcaaggtgtagttttgtcaagtcattctacattgtggtcattgacatcataactggactaaataacaacaacaaaccaaaaacattaatatttaattttcttgaaaagaaaacaaaaagtaaggattggattataatgaattttcgtttggaaagaattttgtatcatcaatcaaagtgagtgaagatttttcttttatccaattgtcatcatcatcttcacaaattcatcatagttaacttgaccatctccatccaaatcagcctctctaatcatctgttccacttcttcatctgttaatttctctccaagatttatcatcacatgtctcaactaaaaaaaataaaaataaaaaatagttaagaaaatatataattatataaatagagttagagattccatctagtatacaaagtatgaaaacaaagaaaagatatccctaatcaaagtatgactaaaagtacattgcattaggaaaaagtacagaggatcatgattgggatactcttaactaaaattaatataaactaaggtaaaaacatgtgaattattacccttattaaaaattagaaattatttcacgattacccatatggaaaccattttaatattgtcactaatctttataattaactctttatatttataatattttctttcccctgtccctcttggctggcaaatcttagcaatagtagataaacttgaattaatttatgcacaggtatagatcaccaacacactcctgctggctctaacacatcttgctgaagcttgttttttttttttctctatctatactattaagtactagatggggtttttcttgaactcataaacctctccttggtagaatcaaatctccactacctttttattcaaatatatatattaaattaaataatgtctcatttgaaaaacaaaactcattgataaaagtctatttctttatcaatatatttaagccttacaaagggtgtttttcctttctcaaataattaggcatgttttgtgaattgtgatagaaacaaaggaaaaatctacctcattagcagatatgtatccattttggtccttgtcaaacactttgaaagcctctcttagctcctcttcagcatcagtttcctgatcagatacatttaccaaaacaaaaaactattacaattttgactatctttcatgctctagatttatgtaaattatatatttggtatatataaaactatatattcttccatgccatgcataattgtgactctaatcacaatggaattataataatggtgtttttatattaccttcattttgttagccattaagttcaagaactctgcaaattctatggtaccatttccatcaacatcaacctcatttatcatgtcttgaagctcttcctcagttgggttttgatccagtgacctgataaccgttgctaattcttcaactgtaatgcaacctatacaaattcaaccattaatttaataaatttatattcaaaataatgtaactaaaattaaaagatcatattataaaatgatgaagaactttattaatataatttgctgcacaagtttttctcttatcgttcatcatatgttggtataatataaaactcttccaaatctgagaactattctaactttctgctatatagtcttattaaaatgtgatttttttttaagaaataaaaaaggacaaaaataaagacagccattaatactaaccaataattgaggagatagcagaaaactcaccatctccatccttgtcaaaaagacagaaagcttctttaaactcaacaatctgttcctcactcaatacatctgccatgttatttcccatgaaaacttaatccagaagaacactcaaccttttagagagagagagagagaaagacagagaggatagagagagagaaagggttgtagtaatagtataagttatgatattgttgagtatagctcaatcttagctgggtttatgtagaatttcaatatgggaacgtcaagcacatttcgtttttctcatttaataaaataaaaaaggtaataaaataatattatgttagaagagtcaaattaaacttatgtatgactagacattggtgttacagtcgtggcttttattggaagagaataaaaaaaaaaaagacccccactcccccactttggctacttttctagtttcggaaagtaggggcaaaactaaaaaatttcttcttaaattattcttacttgcatggtttttatattttataattttttttttgtagcaatttctttttattattattgttattgcaaaaatactctttaaataattactaacatgtttttcaaatacagtcattttattatggttttcttgttttgttttgttttggaattagtatgtattttaatttttaattcattcttatcttttctaaatatatttactaaaaactacagctatactaactatatgactaatattttgaaaaaaaaaagaactgtaagaataaattgttgattttgtatttatcataaggatatatattatagttaattgttaatgtgtgaaagtagaatatcatataagaatgagctattttttctgttgttaattttttgagataaaacctcattcatcttaacctatttactctaaattctaacatataaatatatatatatatatatatatatcagagttacttgtgatctattgtgagcttataaagtacagtcagtctaaaaaacgagccaaactaatttacgaatttcccgacgtgtacattgatatttggccttgtgagattcattcaaatgtcacattcgaccctgtggtctcttaaatgtcgttcgttatattcacacattttaggcccaaacgtgaagagagtgtattagagagagtgagttaagtttccacatacattgctaattaatgtgtagaaatatattgtcatgtataaaatgaatgggctactcctctaattatcaattaattttgagatagtttcacatcttaattccacacacatcctaaattctaacatgatatttgattcgttgtgagtccaaagtaccgtcggtccaaaaggacgaggaaaacaaaaaactttcagtctcccttttaacctccatttgagacatttcggccaatgtgtgccagttttcagtgttgtggtctttgacctgttttgaatt

SEQ ID NO: 17657 - DNA, 2977 bp, Cannabis sativa
  modified_base (1968)..(1974): a, c, t, g, unknown or other
  modified_base (2499)..(2504): a, c, t, g, unknown or other
tctctctctctctctctattattgcttttttggtgttttggtctcgttggcatttttctctctgtctcttccaatctcactttctctctttcacttctctatcatcgacaactaagcaggtggtagttgtggctcaataagtgatagttgtggtatatatattatatattgattgtatttttttagattggactttatctatttttttgcttgttgcaagcggtggtggctccgcgagaagcactcgtagtggttgtgtcttggggtttctatttttttttgtacggtggtgggaaatagttatttgaatactgtacttttttctcctttaatttaccttgtttgcgtgggtttaaagggacacaaccaaaaaaaaattaaattagattcctttgcatcattgttaaatgtacacaatcactttattgtgacaattttaaacatatatatgcaacaactcaattaggcaagtttaaaagggacacaatttcttttaggttttgttttgattttataactagtgtaatagatatatatgtcgatttaaaattgatgtgattaagtgtattcgttgtagtgaaattatcacattttataaatactaacatgattgttgccaactttaatgcagttgcatcacatctagcttacaaatatatagatttggtctcatcactttgtaacgtggtcacatcacactacatgccccatatactagatgttgacctgctttttcagtaacccaaaatatattagagaagaagagagattgaaacaaaataacaaaaagtacacatatattttacatggttaaagtttttaatgagactctactccataagttatctgtattacgaccgagttttacagcaatggagaaatgttaatattttgtagcggataatattacatgcaatggttggcttatttgtaggttgataggtagagcgaattggtgaacctaatatgggattaacccctaattagcttgactaaatggaagagattacatctctcacgtctttgctttccctaattaaggctcgatgggtttgccaaattaagtgtgtaatctttgttgaataatactgtatcatcaatgtgataggtgttgtggttgtgccatctgcaggtggttgagaaaggtacatgcattttgtgttgtattgaatgcatgaattccaaggtttataccaccatatggcatatctgtttcatcgactgtaaagagggatgggacagtctgtagtggaactatcttttttataaattacatgtgggtaatgtatacctatctaaaatgtgatgaaaaaaaaaaactcattttgaagttgattatgtgggcatccttgtataagatgtcctcatgggatggactttagactcttatagatccctttcttgcagtatcgtatctgagtgtctgattgagatgggattgtctgaacatgggcctatatacacgataataaggtctctgtcttatattctattctaagaggtaacaagtgtctctgaaatcatagacatagattttgttgggaaaacctattgcaattaaccacaattattccctctttgtacgtcaaaaatggtatacttatcaaacaaaacaataagtaatatcaaatatcaaccaaagcaccacaaacaatataaaatacacaaattaaacataaaactgagatattaagatttttacgtggaaacctaatacgaaaaaaaaccacaagatcgtagtccgctcaaatcatcaactatcaccaaagttcaataatgggattccaaagttcttttctagtaaaactagaggctcacagaaacatcaagattaaacaatcttggatcaccaatacaatcatcaccatcatcattatctcaaaagagggatacacaaaaagaaaatttttgggtctcaccaagtgggtattgtagaagagcaccttagagaggacaatcaccaaatcnnnnnnngtagatttgaagagcaccttgcaatgattcaccatccaaaatttgagctaaaatggatgagaatcaatcatttgattttcaaagcgaaatggcaaaatctctttctctctctagctttcttcctcttctttccctctctttttctttatttctcttggctgctcacgataccacctactgctacttcctttttttttttaatttcttttaggttttatttaatttgggccttaagcccttaattggtcgaagcccactaagaaggggctgacccaataaatctccccctccaccttagttggtggggtctactaagtccactcttcgcctacaagctttgagcttctctttaggcaaagtctttgtcaacatatcgaaatcattctcactggtatgcacatttttaagcgtaactctttcatctcaagcacaccatgaatccaatgaaatctaacaccaatatgcttggatcttgaatggaatgttgaattcttagagaggtgaatggcactctgactgtcacannnnnnaatgtatctttcttgttgcaagccaaattcttgtagaaacgttttcatccataaagcttctttacaagcttcaattacagctatgtattcagtttagtagacaaagaaatacacttttgtaacctcgattgccatgagacagctcttcctacaaatgtcatcaagaatcctgaagttgatttcgtaaaatcacaatcactagccatgtctacatctgtgtacccatcaaggataggttcacgacttccaaagtataagcgcaacctggaagtacctcgtagatatcttaatattcatttcactgcttcctagtgatccttactaggattagagaggaataggctaacaactcaaactacatgagcaatatctagcctcgtacaaaccatagcatacatcaaattaccaactgcagatgagtaaggtattaaagccatttcttgtttatccttctcaagtgtaggacattgttt

SEQ ID NO: 17658 - DNA, 8162 bp, Cannabis sativa
atatatatatatggaagtaatgaagacatatgaaaaaagcaatagcaggaaacaagttaaaaacttacgttaggatctaactattaacactatggtgttttggattctcgcaaacaaataatgaaacatcctcctacctaaaaagctactctattgagagaagcctagatatttcatcaagacgaacgaatctactctaacacattgggaatgcagaagaaaatagtttggactttaaactatttcatctattctgtcataataatgactcataggatatcttagttgtctagttcaaaaaaatatagatcaaagtctccctgatcaacgtgacctaattctttcaggcgtggagtgaaaaaatgacggtagggaaaattatctcttgaggacgtactggcatccagagcacctccacggaatgattgctttgaaacgaacttccagcttcacctcttcattcatagactccagatgtagtcgagtccagacttccagttatcgcttgtcctctcttgatggtcttcctcgcctcatctacgactatctccgcaaggatttctttaactttgggagggtctctatggacatcacatatgtggtaggcatcaatgctctggtgaggagcaattataacaacttgccactaacttctccgcctttagttcttcttgaggaaaatgtttgtacaaagtctctctctcgagcaacaaaggagtagccgctgaacaaacaatgttgtctaaaaatattgaaaagaaatcctaatcaaatgttcaaataaaaaattgaacgaaagctggaaagaaaaaatgtgacattacttacttgtaatgctaaaatacaaagacagggttggaaccctcttcaatggaaagctaatggtgaaaaactagtaatcctataagtcatgagtgtattttacagtgttggttggatagatcaacgtcctgaatcatttctcaagctggtagaaaccaatttcgctcctattattccacatgagatttgactttacttagtagaaataaaggattttctttggggatgggacttccaccttcttggctctacaaagaacgaaccaacctgccaatagcttataaacttgggggattagcttgaagggggagatgcctactttcatgaagaagcatgcaaagtaacttctaagtggaagatgggctcacatctccgtatgagcccagctccaaacgtcgaaggcatctgcgcatcgacatggtgattcctccaaaacagaaagcctattcctgcacaggctaggaatattcttgaggcctcaatcttcctcatatgttcaaagtgcctcataaattttgaaattatttttgtattgatacattaaaataaattacacaccacttttggagcttcaatttcctcttgctctagaatctacacctcgtcgatttgagcagcttcagccatgatagaaactggaaaagaacagaaaaaaaaaaagccaagtaattaaatatccacactaaagaagatagcaagggtacaaaagagtcctccccaaaaagtacttggagaggtccccactgaaccctacatccgaaagcatgatcctcagttaacattgctccaagacgatcagatttgtacacagagaattaagtaaaaattcacaagatatgtcatccaaaaccataagaatcctgaataaaagaattaaatttagtcatccttgaatgtattttgctgaggtttggctatctaatcaaaaaaattactaatggagatagaatttcacaaaatctattattgactacaagcagtataaagataaattaatgacattgttttgaaaaatgtccaaaagtacccaaatgcctaaatcttattcgtttacttcttattggaaatcatgcaaatatcaaagaggaaaaacaaaatctaaacacattttagaaatataaacgatacctacatgaggaataaagaatctatggatgaagacaaaaaatttcggtaaggaattagaatgtcacacatcggtcgtaaagagattcttactgtgggaggtcgatcaagacacacaatcctggttcaaagggagcaatttttacttataagtgcttcgatctcctcctgaagatctagtggttctgacggctttaaggaatcaatggtgagaactgacagtggtgctcctgaattttttcgtgcactaatccaaagaagaaggtgaagacactcgtcgaagtaatggttcattaaccaaaaaacaattttcaccttttccttcttagaaaattcaaattcaaagcgaaaaatgggcaaaagtggtaaacagataatttttactttatttataaaaaaaatggtaattcgcgtgcatgtttatcaatggctcagattttatccaagaaaagttgtcagttttgcatttaatgcgctccttgtaattgtgatattcaaaagatgatattctcttcaggacattcactgacatggttagctattgttttacaattcgacactgcaagcgctttttcaataaacataatctgcatgaaccaaagaaataatatcttgtgtcattccatttcaaaaaataagaaattgtcaaccacaacttgtttacttagaatttgaaaaggtcttcaccatttaagaatctacatatcctcatgccatccggaagaaagaatacaagcctctaaaaccccagagttccaaaagtttggggcttaaatattattcgtgtttccagaaggaagacatatgtaattctaagatttcttagttcagatactacatgtccaaacgtaggtccaatcaagataatagatcaaatccttattaaagtcaagtcattcagatgatggacatatgactcgtccaggcgaaataaagatgtagcaaaaaagatctttggatagcagcaagtagtgcttctaaaagagtagttaatgagcctctgaatgttgagcatattattacgttcatttattattaaatctcataatatcaagaatttatttcaaagatcttaattatccgagaatttgatattttgaattaggaagtaagataattactaatcaagtattaatgtttctttattatctacaaaagcagtataaattttgataactatcaacatgacgtggcatctacgccagctgaagatcaatgcctcatgggtcgggcttcacaagatgaacccgaagtcaataagttatttatatttaccccattagtgggcaataggagtgttcatcaaaccactcaaactgctcaaattgcccgcactgtaaaaaaatacagtttgaaattctttgcaatgcgttcgcagtttaaatttttcctaaactgcacggtgcggtgtagtttacggttttaaattgttaatatgcagttcaaaccgcacggcaccgcacattataaaaataccaattttttatatttatttaggttcaatatgtgaatgttcaactcaaagcccactaattattgtattgttaaaacttaatttttttcatatttattttcaagctttatggtatttttgacaagtgttgctcacgttttttgtatttgtgataatttaaatatttggtgatagtccaaactacaaaaattgaaaaaaccgcaccgcaccatttcttgcggtgcggtttttgcattttagttttgtagtgcgggtgcggtttgagaaattagaaaaactgtatgtgcgggttgatttgaaaaatggtcaaaaactgcaccacacccgcaccgtgaacacccctagcatgacaagatttacatgccagaaccctaagtctatacatataagaaaatatattcatgctttgctcttcaatggctcgatcgctatgttagtggttgggaataacaagtttttgtgatcgggaagatgttagtagagcagttacataccttagacaatagttgagtgctcaagctatgaggttaaacttactgcaatagtttctactgttgtgtcttttgagcagtggatgaaacataatataggtgctcttaagttaactgtgatgctgcaatcatttttatctgattttattttaatttttttgtcaaacgatctaaaaattagacgattgattaaaaaatatcctgattggattgtaagctaatattttagctaagtcctgttaataaaattccatgacatatttaaaaaaattgtccaaatttataattaaattaccatgtacatatatgtacatagtagttagggtcattcggatattggacaatattatctcacatcagattaaatgtaaaaatattaagtgatacataaaaacataaaatacttactcattaccagttaaaattcaaagtggataaaactagttacttttgctataggagtatgtagagtcgtacgtaatgggcaataataataacatgcatatatatggtataattgaatgtataattgaatgtgttatatattgtgttatatataaatatatatatatatatacacagcaatataattgaattaattgtctggttttcttcgatcaaatgatcagtcaagaagaaagacatattataaattaaggttgaaagtgttgttgttgttgttgtttgttgtagtatttgttacagcattaatttattaatttttgatgataaattaaaaaactcgtcgagacaaaattgaaaaacttgcttttcaactgcaaaccaaatttagaattgacagcccaacctttttttttcttcttcttcttcttcttagtttaatttctctatgtgtcgtctttttttgggtcatcatctcacgtgaatcccaccctacctttctcacacgcttcaaaaagttgtaaattaattcatcaattaataataatatataactcatcttccactcacgtgtgacttgcacgtgtcctcttattataaatatatatacatatatgaggataattaattcaggaaaatctaattggaacgtaatgttctacttttgccatacatatatatattactctactatttatctatatcgtttaaagttttcacgttcttctttagttatatgtaaggacgttccttaagattaaatatataaaaatatatggttataatttgtaactaaccaacaacctatatagctcaaaaataccttctttcaccaatcttttttcttagaatattatatatatatatatgaaacaaattaatatatacatcaaccaaatatatatataaatttatacgttgtcccctctgtaagtattaagaacataaatatataaacatatagatacactacatattataattaattcttctagttatactgcatatatattatgtatgaaaatatatattaatttagatatgcactctgaaatgtgtgtgaatcattttaggtatgcacattttttcatggaatatgtacatattatgtataaaaatatatattaatttatacattaatcaaaaataaaataattatatgtatataatcatgcatgcagaataaatataaataattaactatatgtatatgtgtatttaaaatatatatagtttaatcgattcttaaatgagaatgacactaaatcaaattaaaaaaacaagttgttgatgaggatgttagttatatcatatatataaataaaataaaaatatatatatgggcttgataatattgtttacaagatattaataaggtggctgcatctatgatttgtcttatatatacatatataatacattcatgttggcctgtgggctctcacacttcattattgacaagtatatgtgatatgtaccaatcacattaataaacctgtccaataagaaaatgtgtatgatatatatataatcagtaatttattgttctcatatatataaatatacatatgtcattaataaacatattcatatatactgcgataatattacacatttgaaatatatataatattgctcataactaataattatgcatataatatttataatatatagttgtttagatatgtgtcaatataatcagtaattatttacatatttcaattgtcatgtttaaggagatatattgattgcatgcatttaaaaatgtacaattaagttttatctacatgtttgaatatttgtcatttccatgcaaataaaaatttaaatatataataactgtgatcattaaatataaattaaagaaaatcaacaaatactaaatattttattttgttctttgattgaaattatgttttcggtaagataaaaataatattacagtaaacataaaattaataaataataaataaaccatataaagacctccaacaatattatagaaattaacaatgtaaaaaatatatatatatttgtcaagatcatttatgtaatagaaatattatatgatcttcatcaaagatttcccacttgaatgtgtaccacaatgcatttagtatcgatagaaaaccaatacaaatagtatatatgtcatgtgaaaaactaatgcaaaggatttggattggaaaaataggtgtcatacaccattagtatttttgcttctatatatttaaatcgatataaaggatagactatttaatgatgtagtgaaatttttaatttggacaatgtaattctataaactgaatcataatctcattttttttttttttttgagaaatgagcaaaatttcattgtacaactaacaatttacaactagccaaacttcttagcaagtccaattaatctctattcactctacttatttcctttttcttttaaaaatgagaaaatctattaatctttttgactatagtatttacaacatacactttttgttccccaaaacaaacattccttgcttcccatatatactctatacacggaattgtattaatagcagccacaccataactttctgaatcctgatacaaattcactacaaaaaatagttacttttagtgacaattttttagtcacaacatgaattttttgtgactcaatgtgacttttaatcacaataaaatgttatttgtgacaaaaaaatgtatttagacacaaattgtcactaatttagttttagtcacattaataatttgtaatttttatgattaatacttttagttacagacattttagtcacaatataggaataatgatttgtaattagtcacaattattttatttttaaccacaaattttgttgtgactaaaagtaagatttttttatagtggaagctgacacctattttggaaattctaactataacacatccgttctaagtttgtattggccatagtactcctacagattaatagctcttatacacgagtacttcactttgattacttcttgaaatgacgactaacttgtaaatcaacacaagtatttctagcatattttatcttcactcgcatgcttcttaggaaaattttccaagagattactcatcttaagattactccaagtcaagcacgcttaattttggtgttcttaagtaatgagctctcgaaaacaagatgcaatatgttgatataggtagtacccatcaattcatttaagttctcttaaactgtagtctcattccaacacagttttaaaatgatcatcacacttgaccttctctaaataatgtgatatcgcatagcttacataatatttctctttactgatcacagaacttactattgactgtcacacaaaccctacaagcccttgcattggttttgcagagacactaacatactatttgcatccattttctacctacacaagtgggttgcggtagacattcaagatcaatatcactccttttattttattttatttttatattttttcaatttaattgaatagtcatttgtaattttataataaatataataattatttgtgttttttagaaatggaataattatgtattttcaaattattatcattactattttaattaaaaattagataaattccaccaaataaattggactccaacaccgaatactattaattattgggggcctacgtacttctacatgtacaaaatctagaatcgttctagctatctaaaattaattattacttgttcagtacatatagtcaatacaactcatcattttatttatttatttattgttgagagaaacaactcatcattttatttagttagtatttatatatatatat

SEQ ID NO: 17659 - DNA, 2701 bp, Cannabis sativa
aaagttttgtactgttattaatacatcactggaggacctacgcaccatttgatgttgcttatgttgacacctgagtttaaacagattgcatttgtgttttgagaatttgcatcaacctcttctgctagaggctagaaagactagagcaacttcttattttctgtgttatgcgttggcattttctttttagaaatttatcacaatacatggagtgtatcaaattatcaattcttagatgggtatgtttcctattatgttgtgttatggaagtaatggcacatattgagatattttctttataagtctactgagggggaaaaatgggggtagaaatgagacttttcaagtctaattataactttgttgtcaggacattccttgcaaaccatcttggaacatggtgaaaagcttgctggaatgattcaactgagggagttgcagaatgttattagccagagccgttctacagctgttggttcatcccactccactcaagaaattcaaacatcgggtgctctttgggatcttattcaattcgttggggaaagagcccggcgaagtattgttcttctaatggacagagataatgctgaagtattctatagtaaggtttcagatcttgaagaagtattttattgcttggacagacaactagaatatgtaataagtgcagaacagccatttggaattcagattcagagggcttgtgagttgtccaacgcgtgtgttactatagtccgggctgccatgcactacaaaaatgagcaccatttatggtatccaccacctgagggattaacaccatggtattgtaaacacgtggtacgtaatgggatgtggggcattgcttcctttatgctccagctgctgaaggaggcatctagacttgatgtatctgcaaaatcagatttatatactcatctagaagcactggctgaagttctacttgaggcatatgctggtgctgtcaatactaaagttgagcttggagaggatcacaaaggtctggtagaagagtattggaatagaagggatatgctgctcgattcactctatcaacaggtcaaagaatttgtggaagccaagcaccaggttaactctcttgtctttactcaaaaatcagtatatcgattctgttttcatggtagtggttacctaaacattcttgaattacttttcttttcagaatttaagtgatggaggtgaggaagaaatactgaggaagtttttctcacagatattatcaattgcaaaacgtcatgaatgctacaatactttgtggaaagtttgctgtgatctcaatgattctgacttgattagaaatctaatggtaagtatatggttatttattgttttctagtatctaatggcaataaagtggattaaaaaaaaaaagaaaaagaaaaggaccaagtcctgtatgcttctgaaacattggcagttaatgagtcctcagaaattctgctacttttatctctaatttatctaccaaatggtcactataaactataaagaacaaaaatgtatttctctctgtgcaaaaggcgaatttgtgctgcctacaattatacaacttcacgaaatgcaaggggatttcattatagtaaacatttctttattttaaccatcaaaatacatccaatctttttaatgtctataggtagttttgttctgttatggtgtctgtgagtatgtatttagatatttgttttgctagatagaaaaaaaattcatttatttcattgttcttactcttctaacacttgatacagttgtccaactttccaaaatgtaaggggattttgtcatagtaaaatttctttctttttgccattaaaatacatcaatcattttttttttaaaaaaaaaggaaaattgtctattgctggctttattctgttatggtgtctgagtgtatatatctatttctacatacacacacacatatgtaaaatatttgtgtattatttagaacaaacagttcattcttttattgttcttactcatctaacacgtaatccagttttactaataccctgtaatagtgactgattagttgtgtttatttttagtacttaattgctgaaaagtttttcaatgatttgttttatagcgggagagcatgggacccaatggaggtttcagttattttgtattcaaacaattgtacataagccggcagttttctaaacttctaaggcttggggaagagtttccagaagagctatctatatttctgaagcgtcatcaggatcttctttggcttcatgaactgtttcttaatcaattttccttggcttcggaaacacttcactcgttagcccttactcaacaagaaagcacaatgtccgaagctgaagaggagacagaccccagctatgcaaatgtggtaaccaatttacaggacagaaagcgtcttttgaatctctcaaagatagctgcaatagcaggtaattgcctctatggtcttctttgttcctatgagttggtattggttcttgcagcaattcaaattcagaatggtttttctgtgtgattttgttttctacataatgaagaaatgtattaatttgttggaagcagtgttgcttgtataagaagtcttcaaaaagaaacgttaatctaagttttacttcttatctatatttttcttttataatgttagattcaaaagatctatgcttcttacttcttgtgttta

SEQ ID NO: 17660 - DNA, 2463 bp, Cannabis sativa
tagtataattacatcttatataattattggtattttaaataaagtgcacacacgtggcgtccctgttggacagggcgttacatgcaatgtgtgactactcaaaaattttctttgatgttcgatggatctcttcacggattcttctcaacaaagcgtggcttaaggcaaggggacccaatgtcccctcttttattattttggagatggaatacctatctcgtatcatgaaaagaattggccagaaagtagacttcaaatttcattagagatgtgaagatttacaattaaaccacttgagttttgcagatgatgtgcttcttttttgccatgaagattttagatccatgtactatttgctgtagggactgaaactattctcaagaacgtctggtctccatccaaatgaatataaatcagttgtatactttagtggcatgcctgaacatgaagttaaaaaagttctggaagcttcaggtttttgtagaggagacttgcctttcaaatatttggggatttctatatgtgctaaaagaatttcagctaaggattgtgaaagcttacttgaaaaaatagtagctagaattcaaatttagagtacacgcaatctgtcatatgttggaagaataacattgatcaactcagtggtcatttcaattcactcccattggtctcagatcatgatcattcctaaggagattttgaaaaggattaattccatttgtggatcctttctttgaaaaggtacatctaattatatgggattgggaaatgtggcttgggatgtgctctgcaaaccacaaagtgagggtggaatgagatttcaaaacatccttaattgaaatgttgctttaattgggaaatacatctaggctgtggctagtaaaaaagacaatttatgggtgaaattagtgcacaatttatacactaaagatgaggattagtgggcatatattgcccctacacaaagtagtttgtattggaagaaggttgtagctgtcaaggagcaatttaaaagctacattgatgctcgacgatttgttcaaatgaattacagtattaagaaaagagtatttgatgttttgccctcctcaagctcatatatcctggagtaatgaggtttggaggaggcttaacttaccaaaacacagtgttattttgtggttgactagacttgacagattaaaaataaaatagaggcttcacaaagtttcacataataacagatgatatatgtgtattatgtgggcaaattaagtgaagaacatattaagcacttattcttcgagtacccattcaacaataagtgacttagaagccttaaagaaaagctgaaatggagagctaaaactaagtcatcatataacctgctaagatggattttgagatctcgattgagcagattcaagaagcaagtttttgcagcctttacaactactgttgtgtgtggaaggctaggaatgaggcgttttggcttcaacaagtcaaaagagtagaagtggtgatacagggtatacttgatgaagttaggagtagaatacatagcattcaggggaaaaaaaattacatgtacatattgagagtagtttgatgcattgtacttgtacatataagatttatttgtaatgagttgatatatccagtccttttaggtgcttttaattgtaaggttactttggttgcaatgaaattttgaattatcaaaaaaaaaaaaaaacaattaaatttgaatcaatccttaaaataattatttttcttttaaaataaactcatagcgcaaaaatcccttctaaggtagaaatataataaagggagaattgaatattttgaattttatctataccttgttagttttacagctcatgaatttattttattgaatattttttttttgcgcgcagcaaaaagatgtcttccaataatgactcagcttcaatcaaagagagtgaatgtaaatcctatttgtccggtctgttctatggctcctgaaaccattgagcactctctcttatcttgtccagttgcagcagcggtatgggatcgggtgggtattggtacggtaatgcagcaggacgtctcgtttatggactggtgtatgcaccaatttgttttgcttgattcggataactcaagcttgctggtggccttgtgttgggcaatttggaatgctagaaatgataaagtttggcaaaacaaagtgatgggggtcgaaagcattgtggcgtctactaccttaatcaatggcgggttgctcaaaattcgaacaatgtgctactgttcactagtttcatttccggggatggggcggagcaatggtgtgttccaagcggtaatagtattatggttaatgtagatgcggctgtgtttaatgataactttgcctatggggtgttggatttgtggcgagagattccaacaacttttttgtagagggtgggtcaaagttcttccatggttcgatttctc

SEQ ID NO: 17661 - DNA, 5517 bp, Cannabis sativa
  modified_base (3946)..(3946): a, c, t, g, unknown or other
  modified_base (5300)..(5303): a, c, t, g, unknown or other
  modified_base (5459)..(5464): a, c, t, g, unknown or other
acacaaagatctgtacatgtattgtttatttttgactatgaggaggtggatttctttattgcttcaatctgtacaagcagacatgtggaggctaaaggtggaaccttttcagttttctaaacaaaattaactatcaaagatagcttttatttattttcgatttaggatctgacgtggctttgcttcgttgatttgtgaggtattcgttgaattaataaggcatgtgtggcaacttaagcgttttgatgactatttacttatgcataagctttgaggggcataacactgtgcactttttcatcgattccaagcgagacaataaatgttggatgaaagacttttttaatcgtcggatctgccttgtgttttcagagggttcacttttttattgatttagaattcacacgaatcgtgctttgcaactaaataccgcttgtgatgatttttctttctatttccaactttcccatctacacacttataatctatgaaagcgaaaataaagatctagaacttataataagccaaaccagcctaaagcgtgatatcgatttctgtatacaccttcttttaaaaattatgaagaattcaaaaatattctacccctagtgattgagactccactaccaagagaaattaaaattatggaatatatttaattctgaaattaactctttgattgaccataccaatgccattgcagtaaggcttgagtatctgagtcatccaactgtggagagagtttaactgagactctcaattgatgttagtgtgtggtctcctaggccacatttctgttcaaatttagaatcaccatatccaactcctcaacaagtaaaatttcatccttgttattttttgaatcatgttgcatgttaaagattcaagggtagaatgcaaatcgcatgttgtttaagaatcatgattttgaacttgtgattaggatattattttggattaatgtagaattttttggtcagctctttaggttgccctgaatgttgataaaagttaacattttttaccatatcgtacccattttctgctgaaatgatgaaaataatttcttttcctatattcaagtcccttatggtcttaattaacctgttgaccctttcatttctaactcttgtgtttccaatttttttacctgtaacaaatgctccctagagattttgaatctagatagtaaatcaggtggggacctcttccaagcagttatggagaaggatttccccttgcccttactatcttagttagtttgggtaactaactgcttcgaatattcctttccgcttccattatgtcgagacaagcttagaggagagtaatgaaagtcatcgaagaagtcgaagaggtggcaaaagttcctaccccaaatattgtgtttgattcatctttgtgggagatggaccagtacaagaataagttctgaccttatgacaaccaacaaaaatactagacacaaagaggacttgaacctattccaggactattctagaatagaatgtctattttaaaagagaaaccaagccagtgctctgaaggaggcttcggtcttggagttggggtatgttaaaatgggagctcaccttcctttgagatgttacttcgtggagttttggcagtagttggagtggccccttaaaaattcattccctaagtatatgattttctcgctggatggtatgttttttgtttctaaaagaagaaatttgttccaaccctggaagagatcttatatttttataaggccaaagcccaaaatatgagaaacaattgagagaaggctagtttctataggttgaaaaggcattccaaggacttggtgtatccagttagttctgcgaagtatacatatgacaattgggactattggttttatacttcttccttcccactaaaaagagtcccaaatattagtctctactttagtatagcaagtaagcactattgccaatttggcctccttttttccttattttgttttacttttgatttggtcttagttttcattcctttcagattctcttccgcaatcatcgctaactccaaaaattgaagcaaggtaggcattctagaaatatttaccagtagaagagttacatattggagagcttgcgacttctaaaaatctgtaggaggctagtttgatagctcctcaccaaagcattgatagtttagtggtgaaggatttagttagggatcttttcaatggtgattctagtaaagtgaaggaagtcattactgtcattactatggaggaaaccttaaagtctattaagtatgatgagaagtggtaagcagattggaatcgttaattctcaaagaagctgagagaagctgaagaactttctatctgctttaagggtgctatccagaacaaaggtactatgggagcgagtacttttgagagtggtaagatgccatttcgtgtagtcaaggctccgtctttggtaaacgttgatagttttgaccaaagcgggtttgactcttattttttgcatttagattactgtagatatctcatcaatgacgatttagatagggtagatgactgttgacactaaaagatggccaacatgagctcactagattggcgaggtaattaataagtttaagtaaataatttagagagacacaaaaaatttatagtagttcactccccatgtcgcgatattaatggagctacatctactttgagtttttatttcccacgagaactacagaaaaaggctaagtgtttaagctctagtttcttgagaaagatgctctaaccttgtgggtagttttctgaatgtaaaaaatgagctaagggagctctccttttataggtgaaggaggtccagaaaagtaaggaaaaatacaaattagacatttttttaccttagatgaagatctaatggttaaaattagcattcggtggagatagccattttttggtgcctgatgtaatgtgcgtgccaagatggcacgttacaagctaggttatgcccacaagttggccaagtggtgatcaagtggtggcagatgctagtgtgcatgctggcggcatgttgatgcttagtttgtatgacagtggcattttcgtaaatatcttcaatattgtctggattgggacgggacttggtattcaccatttatttggttctacaaatacaatggtacaattggattggaaaaactctttgatttggtatgtggttttgccatatgtctacagagccaaactcatgtatattcttggtagaaggctaaaagcttagaatgctctttaaggggggagtacctagtgttagctctccaccacccttggaaccttggggctaagtgagctactattggtcaatgggactagtaggccggtcatatgaggaccacgaggggactcatatgtctccatgagttggaatactcataaacactatcgggccgacctggtagtgagtctaagaatgctgccagaggttaacgggtatgtttccattggcttgccggtatgacacttgcacgggacgtcgcctaaacctccaagagatgttgtggtgtgccttgaccacgagtcttaacacgagatgccacgggtagtcattcgtgggctagtttgcatgcgcgcatgggatgtttgcaccatgctggaaagagatagaggtttgatgtatgcaaatagtttggtggcttgtctcgagggcctgccaacatgcgtggaggcatggtgcctttaggatcggtccatggacgtatgggaatcattggaaaatgagggagactgtttggacaatatcgaatggggcatgagaaatgtgtggcacgttggcttggtgttaacatcttgccacacttactacctttgtcacgagtgactaggtgagcgccggtgttaatgtttgccttatcatagtgggaacctatggacagtgtgagtatcttggctaaagagcctcgntgcatggatgcactcatggatgcttgcaagcataactcgacgggagttattcgagagatggaagtgtgcacgaggcacatggtcgcgtgaaaaatgagcaaaaatgagcccattaaaatgagcccattgttactcagatggatggaaggctgaccttggcttagagaagtcaaggtaccacacgggtgtttcgctgcctaaaaaggtgagcctgtgacacccggcaagacctgctgcaggtaacccgaaacttacttttataactcccttaggagtgaattttgaggtcaatagcttcaaaattataatcagagtgtgagacatgacttggcagagcattgaaatatattctagatgcaagttgaattgcatcaatcagatcaatattatgtgagttatggtcattttactgtagcaagttcatgacccagcacccaagttgacatccaacgcccaggttgacatatgacgtcaacctggacctggatcaccaagactttctagtatagatggaaatttggtggttaatgtacggggaatgcaatccccgcccccattccttctaattacaaacaaatttggggtaggagaatacctatcagttatggggaatccatcgcgtatccattaagacaaaatagataaaaaaaaattaaataattaaaaaaatcgaaaaaaaataaatttaaattaaattaatattcgcacaaatatttattatgccttcataattcatagaagatgaaacacaaatctgcctcaaaattaaaaatattgagaaaataaatagcataacccaatagaaaataaaaaataaatctatctcaaagtttgaaaaaaaaaacaaaaaaatcataacccaagtatagtatcatagtctcatacctctcaagtctcccaacaagttaaaaagtaaacaaagacgaaactaaaaattgagaagaaaatatctttacgcttgtaatccacaatgatcaacagttcactatcgtcattagatcttcataatttaagcacatgatatataattttgattatggatgataatcaaaataactttgattatcaatgatatatatattatatatacgctaagaataaataggaaattatatatatatctatctatatcggggttggatggatatagtacggatagtattatccccgccctttctcaatttctgctttgggtattgaaaatgtcctcgcccaccgccccccacagttatccatcactgtggtataaatttccatctctactttcttgtggacctcagattgcaagttgttgaattcctcgagttttttgttgagggtatatgtgatatcaatatctgagtgtatgtatatnnnntgtgtatatgcatgcttaaagtgttagttgcactaccaacacttgtatagttaaggtatagagtgcattggtatagtgaatgttatttaagagtacattacagtgatacctgcacaagtacagaaatgtattgagtgtgtgtggtatatcactcannnnnnctcagggtacgaaacaaaccctaccaacactcgtacagtgaggtacgtagtgt

SEQ ID NO: 17662 - DNA, 2665 bp, Cannabis sativa
ttcccaaaaggcctcattccaataaggctaaaaaaacttatttcaacagttaaaatcatctctaaacccctacatcaaaaaccaccattgtggagtcaagtttgagtttttgaactcaaacttgctcaacacaaggtataaccaattaataaagctcaaaccaactccaaataatcaccaaatcaagcttattctacaatgttatttttaaggtctttttatggcttccacctatttgtttgcttgtggtctagccacagctaagaagcttttttcacgattccgtgttgaacacataagtcagtgaagtctacactatcaaatttttttccattatcagaggaaatcttgtgtggaagtctgaaacaacgcacaatcttcttaaggacaaagtttaaggctttcttgtaggttactgtgttcataggttcagcttctacccattttcgtgaagtagtcaacaactattgcatattttaccctcctttctacgtggttagtgatcccaccaggtcaattccctaaactacataaggccaagaactgctcatgagtgtgatatcagtttgcggtgctcacagaaatttggcgtatgtttgagattgttcacatttccatacatattccaaacaatctttcttcattggttgccaaaagtagccttgatgaagaatcttcttggaaaggcttagtttagaagtgtgatctccataaaaacctctataaacctcatggatggccgcacttatctcggttctagctatgaacctcagatatggtatagacaaatccctgtcataaagcttcccacctaagatcacatatcagggagatcaaacacggatgcactgttacgacacttacaacatgattaaacactactaaatacaaatataactcttcttcttccactggcttcgatagtattagagctttggccaaatgctctttcaagttttgaaaggcttcttcgcattcatcagtccattcaaactttttgttcccgcgcaacacattgaaaaatgggatgcacttatttatggattttgacatgaattgactaagggttacaactttcacatccttatgcttcttgggggaattcatgtcaataaatgctttgatcttctttgggtatgcttcgattccttaaggactgacaataaaacctaggaacttcctagatgacacctcaaacatacacttcttcaggttgagtttcatcccttacctccaaatgatcgagaatgcttcttcaaggttattgcttggttttgtggaagttttggattttacaagcatgtcatccacatacacctccatgttcctcccaagttagttcttaaacatcttgttaactaaccgctaataagtggctccaggaaattttcccaaatggcatcaccttgtagcaatacactcccttttttatttggaaacttgtgtgttcctagaccacaatgtgcattttgatttggttgtagttggagtaggcatccatgaagcttagaaattcatactcagatgtggcatccaccttttgatctatttgtgggagtgaaaaatagtcgttagggcaagccttgttgaggtccgtgaagtctatgcacgttctccacgtgccatttggcttggggaccaaaataggatttgccagccatactgggtacaatgactcctagaggaaatcattagcagttaacttgttaactttcgtcttgacaacttgtacccttactgggtctagaggtcttctcttctggcagatgggagttgcattctcgttgatgttcaagacatggtagatagtgttggggttgatccccatcatattagaatggccatgctagcacatcctggttcttcttgatagtattcacaattttctctttcaccactggatgtagattccatcccaccttgatggtcttggtgggatcgaattcacagattttgacttactttacatcctctagtggttcaatcattctctctatcccaattttgggatccatttcatcttcataatccttctggacagcttcacccttcgcttgaacgtccattttgggagcaaaatccatctcttcccaaataatgaacacagtccaaacagagacattgtaacaacttctggcacttatttggtcacctctgaccacttcgatgcttccattatcacaaggaaacttcatgcacaggtgcctaatagaatccatagccctaaaatcgaccaacactagtcgtcctagtatggcattgtatgttgtaaggccgtccacaactacaaatgtgcagtgcttgaaggcacaaatgttgttctccccttttatcatgactagaagctagatttttcctatcgacataagagcatctccattaaatccttggagctagatgatacacggtgatatattggcctctataagcccaatcgtttgaaatgaaaaatttaacagaatgttcactgagcttctattgtctaccaagaccctgaaaacgctcttattggcaatatcgacttccatgaccaaaggctcattatgggggaaatgaacatgcctagctttttaaatatattttatcaagacctagatttactaacaagtatatttttaacatcctaaatatgaatctctaaaacgatgaaaattaaacacatata

SEQ ID NO: 17663 - DNA, 3930 bp, Cannabis sativa
gacaaaggtcaaatgtgttagactgaccttctcccaaatttattagggagctcacttatgacaacttatatgggaggaaaaccgaggtaacaaaatagacattagaatttaaagcacaaatcataacgataatacattcagtacaagcccctagacatttagaactatatcttatgccccaacattgagataatttagatgaagataaccccctcttgccccaagcaaaacaacacaaactcaagcctaaaaatgtagttcatattctcctagcctgttatagtggctaacgaatatgggtcagataccactttcttctgagcaagtaatctaaattcacagaagctacagatcggtaaatactcaaatctttctcagtaataattagcttgttatttgatcaaaacgaaagataattagcttgtaaactatccactgtaaatgagacgggtaacaattatgttgttcatgatttgtatctgttacatctttttcttttacaatgtaagattgttcatgtacattgtcgtggatatgttaagagaaagggagggcttagtacagccaagcataagcaccccaatgatctttgtgaaaattcaactagcaaaaaatggacattttttcttatcaccaacagacacacacataagtgcgaaattcaaatcagaaacagacaatctctgaaatcttgaccctccgttttgaatacaaatttgatgagggaaaggggaaaacaaagggacattttgtgttttgcttgaaattatggagtaaaagaaatttgttctagagaatcatcttggaacaagcataaaataagcttggacgacttgaaattaagagttaaaaaaaatgatgatgagttggggaaaatgttttctaggtcctttcgctcatatccctcccccaaaataaataaataaataaataaaagcagtccaatacacgtacaaagaaaagaaataggccatgaatacaaatgtttaacctgatcaaatgacagacatgagaccccttttgtttcaacaatcacaaataaaataataataatcaaaagggagcaagacttaccattgttcgagttagaatgtccatcaagaataagctttacatcttgagattttaaggatgccatgacatactccataaactcagaccaagaccctcctattccaatatcatccctctgtatataacaccaactctctattaaatttgttttagaaagaaaaagaaaaaggtgttacagaaacacaagtaataaaaaatcttcaattgaacaaaagatttcattcgaaaatctaaaatgtaagaagaatacgtaaagagaatatattacattcagccattgcaatattcatttgtatcggttaaaaaacaaaaattaagagaaaatttataaagtaaggccctttacacttggtagctaaaagaaaattcgggttcttacgacgcaaatttaagtaatcaaaataagttcattcaacggtactggattcgagctacacagatgatcattgcgtggaaatgaaaatgaagaaaatataatggtaaaaaaggtaaccatgtcctccagctgcagaaccgatcgtacggcctcccaagtgttggagtggaaatcagtaacatggattgtgagacgagaagtatcggcagcgctagcatgaacatgaaacaaaaatcgatccaactcttcggacgattgcttagtcgcccactccactttcaactccccgaagatgggttccaactcttcaaaccccatttagctctgtttggataattccatggaagggggtgtattggtgtaatgatggcggagccagccaacatttgtacttttctagaagagcccaaaaaaaaaaaaagaattacctaggtttgggcttctaaagtggttttagcactaattgttttagttgcagcgctagttgcaatagggttttctatgtagaattctaattgtgttgcacagaaggatctactactgtggggacttgattgattggccctccttaggggatgttgtaaattttgaaaagatatgggttggctggccataccctgggagagtgtatggtgaagatcagccatgccttgtagaccctggccagccattcccaagtacgggagttggcccaagccggccaggcttatgctcggttgttgtgcttggccggccagacttgcattaggcagggtctggctgcccattgctcctctatggctggccagacctataaaggcaggctctggccacccatgacactgcagttaactggtgttggcttcatcttgattaggtggtagatcacaccaatacctggagtttagtggatctagatgtctaaagcgatcggtttcactcattgaattgtcgttttgggtgtttccacccactcctagtccttgtcggttgaaaatcgacgtgtgggcacctcgctccctttggggaggaggtgttgtactctggctggcgatgggtgctcctattgatggctagctagcagttggctgtggagtgggggtgttgctgagctagagatccttgctcggccccttgtgttgttggttgatctgtcctagtttctgaggactaggttaaggtctccttcaagtggatctctatggagatcctggcctcttctatcaattctctagttgaacagcattataagattgctagcctctcggttatcgcgatctaactctgcttgatgagatcgaaagatatactcctgttcatccatccatctcagaaatttgcatctctgttgagcaaaaacatcgcaatcagtagcgcatggttcttaatttaggcttgcaaggcttacaaattccctgagtttggctaactcaagatctttcctaagtccagattggtctcgcctatgataggattgccaattctcgggcttgtctcgaaatcatagaaaccagagattagacccatttgttgttctaggggactgtcacccctgggtcctccctttagtattaggtgccaatggtggatctactcttgttggcaagggcctaccacttggatccactaggtgctggtattagtttgtccaactataatggccagacttgtggtgttgtggtgacaagattcaccacatttatagtgttcatggggattctagttgtgactggaatctgtgtacctggatctgcagtctatgggtcttgagggagaccagaagatgtagaggtgcaacatgtgttgttcttgtgttcaccatggcgtttgattagatatgatgtccacgctctcaatgaaagcaccaaactgttgacctcaaaaagtgatcaaccgatagcggggtcgtatagatttgatgcttgctacatgttagaacaaacaacaatgaaaagtaataaacacaagatttgttatagatgtttttgctcccttgtgatagttggaaatgacctactccccttttagttgtattaataccgagggttaatactatccaaatcactataggtggaatcggctatagtacccttagtaatacaatgattgaatcaagaatgacagaactcaagtgttgagatgaagcctgtataggtgtgtgagagagagagaagttgtcagacttagacttagagtttggaggcaagtgttaggtttaactaagcttaggttttctaggttagagttaaggactttataaaggaggcctaaaccctagaatacaatatgaaaccctagatatttgtatatcttattctttagttacaaaagaccaaagttcccttgaacctagatattattcagctattatattgggcttttagggcccaatttgtagccgagagagtgttgtccacctgtagaagtgcacaagaaaccctataggacacctcttagccaaccaagcccctatggaggcaggggggccgaccatggtgcag

SEQ ID NO: 17664 - DNA, 3428 bp, Cannabis sativa
gcggaagacggtggtaaccaacccgaaggagagaaagagatccaggctcagattttgtattactctgtgacagaaaggaacaagggttaaagatcttagcggaatgagtcattattattatgttgcatcaatgtaaggttttctaaactcttatgtgtttaatttcatcgaattagaaattcatatttagggtgttaatgaaacatacatgttagtaaatctagatcctgttaaaataaattgcaacaccacatcctctaccttacgataaatgtatccttggcagaagcccctcatgggagccaaagctgcactaattagtggaagatcgacttggcctcttctgttaggtcccacgtgttacacttacaaaaaactggacaacaatcatgtatatctcatgctcattgtagaaagaatacccccttaggtaaagcattcaatattttgtgagtagaaacattaagaccattgtggaaagtttccatttgaatagaatgtggaataccaggtggaagcactttttcaacaactttttgaatcttttccaagcctcacagaaagactaatccccaattgctaaaaatacataatctcattccgaaccatggcattcttggttggaagaaaatacttcatcaagaaattttcaacttgttcattccatgtgaacaccgagtcgacaagaaatgtattgagccaagccatagtttcattccttaccgagaaagggaacaatttcaatctcaaggcttcttcgagcacctcttgtaacatgaacaaatcattcacctccaaaaaatgattgtaggtggaggtgaggatctttcgtggacaatccactaaatcgatccatcatttgcaacatttaaaatatcacgagcttcaactcgaatttgggtgcttgaatttcaggcccaataatactcggattaagctcattgaacaatgaggcatcatactccattgtagctctctcaatatatatatcacccatagcaataatattagcgacattgttagcacactcaagtccttcaactaagctcatacttctggtcaatggaagaaatttctggtgagctttggtgtcgtttcttaataacaatttggtagggtaatttttttattaggtctaaccttccttgaaaaatggaccgaaatatttgagttcaacacaaataatgcaaataaaaaaaaaaaaaaaaaaaaaactttttatcttaggaaaaagggaaatttcattccacaaaaccagctgaaataaaatatatgaagtaaaatagatataaaatattatacttaaaagattaatctatatatataaataaagaaaaatatcaaagagtttaagtggcaatctatataaacttttcttcttaatctcttttttctcatttttttctgatttagtttatttttattctatcgattattaattattaagtaatgctaataatgtatggagcgtgtttataaattttcctatgcaaacattaaaatttaatgtcagttattgaaaacttttgattttttatattcctcaattaagtggttgttaattatgaattgattgttaatatgtagaaacaatttttcttcataagaaaaatgaataatgatttaatgcttttaaaacgtttcttcttattatttttaaaaaataagcatttcttgagtataaaatatgctttatagcagacacatgactgccaaaatgagggaggaatggagacaaataattcttttataattattcacttgaatccttgattacttttttaagttggaaaaggcttatcaaagaatgttatagcttaaaaacttaaaaaggcttgaatgggtaagttgatttatattggattaagattacaaattgtcttatttgtctctttataaaccattagtattagaattagttgtactttagtttgttttggtatgagttttgctgttgtttttgttgctcccttgctactgttgtttttgtttgctttctcttttttgttttttttatttgattttgtatttttctcttagcaggttgttgctcggagtgttactcttttctctggtttttgaggtctgttgtgcaacgcctattctatttatgattttttacactatatttattattctttcttgaccttatagctcacccttaccataattcttataatactatatatctataaaaatggcattttcaatacaccacaacaaaatttcatatcacaaatttagtatatatgaacacttatacatatatatagtttatattttatagatattttaaagatattgttctgtcacatttatatatgccatgaaaaatatctcttgctaatattcactttatggttgttgcaatgttttgaggcttatttgcagaaataaaaagtagagatgtgaccattgttattgttagattaacaatcatcttattgtgtttgtcaatagttgagtttcaaaatgtgttaattgtaacaattatttttttctctattaattcctattcacattaattaattcttaacccttccactttaacttttcattttttataactcataatttaatattattttgtctttttcatttcttttttattaattatttattttattttcttattattcaaatatatatatatatatatttttctggcattttttctttaattttctactttctcctatttttatctttttttttttcaaattttaaaataataataatagcattccctatttaaatagttttaagcattataaatatatattattttccaacatatgaatatagaagaggataaatctatatgaaacacttcttaatgggtattaccatgaatggttactaagcaaatttaactataaatattaattttaaaaaaatgaaaccatcgaatttcgatctaataacaaataatgaaatcacaaatttgaatttttatgcttaatttaactacttaattaaaaaaaaaaatatcaaaaactatctctttttacactatatcaaaaatatattcatacaaaaatatttaactcaaactatctttttttacactatatcaaaaatatgttcataaaaacttaaaattttctatttttatccattcataggtaatacccattaagagtgcacccaaatctatatatctataaatatacatttatatatataatcttaatgctaatgaagatgacatgacatcctatgtgtatatttatttatattttatttgctctctcatttttttaattttcttttgttaattttttttcttccatttacccatttatgttcaataataatgtagttttatttaattgaaaaaattagtggccattcatttttataactctaattttaatactattttattattataactccttttatattaattatattattattaactc

SEQ ID NO: 17665 - DNA, 8731 bp, Cannabis sativa
  modified_base (8673)..(8681): a, c, t, g, unknown or other
taagtaaatctgattatattgatatgggttttatttagggcacaaaacccaacagttagcttgtctactttcgtcttcactgcttccgctcgaactggatctaatggtctctcttcttacagactggttccactgcgagatctgtgtttagagcatgacaaatcacatgagggctgattgcagtcatgtttaaatgaatctaggctaacacatcactgttctcttttactatagagatgatttttccctaatagcttgaggtagattatttcccacttcaatgaccttagtggaatcctcattactgatacatacttctttatttcctccataggttgaatttttctttccactcctaaacgtggatctagttcatcttcgtcctggaccacccccagtgctggctgggtgaatgttccaggttcttcatgatttcttctcaaaccatcaaaatagttttggttgagatattataacagcttcttaaactttttttatttcctctgattgatccaatgcttccggtatcgcttacgaacttcaagcataagtgacgaattgacattacaactctaaagtaaactaagacaggtcatcctaggatgagattgtaggttgttgagcaatccactaccatatataaaagtacagtatttgaaagttgataccatgttgctgacaggaactgctctgttaaatgtaactgaaagttgtatctttcccattgacacaagtgtatctccattgaagccttggagttgaactagataggatgttacgtttgtttccactagacctatggctttaaaggcttcttttgaagagaatgttgactgagctttcgttatctccgagaactccagacactctttgatttttaatttgggcttctatcaccaatagatcattatgtggaaaatgtacatgcttaacatcgtccctctatgaatgttattgggagattcatcatccgtgggcattgggtaggtgattgtcttagattacatgctttatcctgttctagctcatttaggtacctcttttgtgtatttctggtgcttccaaaaatatggggtcctgtagatatggttgttacatggccatctaatgctagcggagtagctccaggtgggtatggatttccaggttagggagtgactacagatcttgccacttgggcattttctaccccctgaggggcctatatagtcagagcttgtattttaggggcttgctggagacctactccctgaggaggatttatagttctaggttgtccaggaataaaaagtcatccgtgtgatactccttgtccgggatagataaccggtatcctcacctagttggataaatggctgtttcagactaaccctttgatttcgtccttcaagtagtcacattcatttattgtatgcgtgatatcaccgtggtactcacaccttttattcgagtcctttttttgttttccacctttgtacatatgtggaggtcttttttcatgaaccatattacaagtagccttataaacatttcacgagtatccactaagttggtatacttagaatatcttagttctcgagttcttccttctttgcagattcgctttgccttggagcttcagaacttcttttgttctgggaatgacttacgttcaattctggaacttccattttttggttcacttgtcgaggagtggcactgtatccaattagtgccactctgtaataggagaaacttgtctgtgcaatcagctgtacgaaagtactaggtctataaacagtgggttttgtgaatgtagatatcagaggcaagatatttagagcattcatatgcgaagtttgtgctgtggaagtgtttgttgatggtgctggaagtactccataagcctgagcataagcatcttctatgtttatgaatcattgggctctggatgtgaagttagataaagaatctgcccttttccttagaagttttccctatagcaaggatttagtggttattcttgatgttaaagccaccatcttcatatcattagtaacctttatttttgcatcagtatccatcatacactggatatacttcttaaggttttctcctagttgtttcttaatgttagtcaaagaaatattggttttatggtactaaatcaaatacagaaggatttcatattgccgattatcattgtaccatatcccaaaggatatctagatgtgtgtacattaaatcaaaacataaaataacaagtttagaatatatactttttgaagcctattagggtatcctcaaaacttatcgtatgttgtatccattaatacagatgatgaggataatgcaattggactcacactattgtcttccaaatcgatccaccacacacaaggaatagtatgggctattaggataaagtgtatatgtttgttcttgttgagttatcaacacatgagcaagaataattgagagaaaaaactattttctttttctctctgtaatttgaaaatactatctcaaaaagactgttttgatttctcaaattaggcttccatttatagtagttaaaacccactaattaaatcatatttaattatttaaataaataaatatctataattgaatttggttactgatatttatgagggaatctcttaactacttgagagaatatctcaacaactttgaaatatctataatcacttttcaaattcagatatttatataattgaattaattaattgattaacctaaaaagacaagctccatagggacaacatttatgctaggtgcctactcttgtttgtttaggacaagaatggtatcttttgtcctaacaacttttatctcaacaaatattgtcttgataaattttgtcttaataatttttatcttttccctatttaattaatttgaattttttttatttattacaaaaataaataattacaattttaccaatttaaaatagattttttacgaacgacattatactactctttatctctacccttgatagtgtttcaagatggcaatttggggaccacagacctataattctaagctctaataaactaaattatttattgagtctcatcaaccaaataatcgttgcctattaattccatgattactccactgagaatacggaattgaactcttagtaattatagaattatctttactaagttttactacagtgtccattgatataatcaatttcagtgattaccccttcacgtgttggtttgtaattagttttggtcaaattaccattttatccttctaattacttctttatcctttagttacattaattcactagtagaagtataatttagatcccatctaaatatatgcacaactttccaattctagaattaacacttaaaggaaacaagtattcagtccgttaggaaagtcaggattttataattgtaaattatgttcccagccgtccacattattagtttcccaaaacaaaagtcgtaagaattattttctttgagaaactttaacgtgtgaatcaaggaaactaataacatgaacatgagttcatgattactcaggatttaggtctatctactattgattatcattatgatatgaattacgtttttttatagtaaatgacatgttaataaaaatggctccattcatatcagtccttgtcatttatgatttctattatatacaacacctttacttttatgtcaaactacattcataattcaaaccgagattacttgcactgaagaatgggcatcagtgaaccgtaccaacaacaattgattaaagattctataactttaatatgttgttgactgttttattcatgactaagtggtcttagttctctgaacaattacaagccacaacctcatatatgaataaggaatgatctgctatttacatacaaattattcaataataaatataaataatttaacattcaagcatatatcaaaatgttcaactttttattaaataatcagaaatatctttacaggattttcagggcataaaccctactaagaattaacttccaggtcaaaatcctttgttgctatgaattttttcttgaacattgcctgcaaatccttctagttacgaaccgatcctggagataaccttttccactagtcctccgcggactttgacagagttaatgaaaattaaagcactttgcttcgtcattagctttttgacttgcatcttccaactgtatttggataaatggtccattgggtccattcttccttcatacaattctatttgaggcattctaaagtgctccgacagttgtgcatctataattcttttcacacatggttccatgtcctcttctctaagtcagacacagttccatttttcttttgggttatcttttctgtgagctttgttaactcttcaattttacgctacaaacattgagttttatcatctcgagattttcttccacgaacacggtcgtgaatataatttcttaggttatccccgcgaggtctggcttactcagttctaaccttttcttttttggcatttagtttcctctgaagatcactcgtagaaagacttctgttttagtcatctaatggcggacacaactcttcaacatcaacactttgactaatagaatcatcacagtaatttgtatcctcctggaaagtaggatttttggcttttgcatcagaagtatttttctgtgtagctctgcctctagaatcagtttggtcaccttgctctgaggcatgatttccttttctttttcttttgaggttggttagaagatttggatttcttttgctattcaacatgagtagcctttttgaagtttcacctacctttcctttccctctatccttattaggatcataagttacaggatttttaggatcaaccttcttggtggtgttattctttggagccatttgagtagttctacatgcatcagttaatgcttttattacgacctccattctcgccattttcttgtgtatcaataaagaaaattgctcttgcaactataatttatcttcaactatttttaacttcctagccatgatgactacaggatctgactcgtctggatcgtcctcctttttggcatcaccatcaacaggcatgtcttggtggtaatcctcaagcatatcttagtaatcatcccaaggcacatcttggtgatcatccccaacattatcagaatcattctcccctaattcatcgtcttcatcaataggatctttagggatatggttcttactgtatgatccttcttgtggcgactggcacctcatttagatcttctacatctcccattttagtagttggatcaacatcaccctttttggggttagtatagtgaagaccagactaggttcgagtgagtaccataattactgaatgtcatcttggatggtatcactgctttcttcaactctcaatgaaagcacaaaaatgtttaccgagatttttaaaaaataaattatttaatatttagaactaaataaaattcaattaaaagaatcaaatatgagtaaaatactcagagtttttacgtgattggggcatcaatgagtcttagtctacgagtcagtatcattatcaaataggctagaaaagcataagggattacaatgaatatgaacactctattctctcctcaagcttgtgagttaagaaagtctcaccctttgcatgaaggattcaatgcatatttatagagtgatagaggtcatacttagttaccctttccctctaatggggtgttacagataatacatttctttgggcttatcaagcaaaacccaacccagcccagcctatgaggcagtgactgtatgctgacttgacatgttgatcacggtcacaactgttgctacagtgtcctattattacatgtaattaattatatattagttacttgaccttcaattatgtagttttctattttaacttgatattattctctgtccgagatttgaggagagtgacttccttcttctgcacgaaacagtaaatggggaaactatagctagcttctatagacagactggagggttactaaaaaaagtcattaatcggtcatggccaaaccaaagacaaagtaaaaaaaatacatacacttacaccgaaaactcaaataatcaagacacagataaaatggctgtaatatcaactgttagatattattatataaaaataataaagcatatataattgatatgaaattcagaataatataaatatatcgaacatatatgcaaactatgaaagagatcaaaatacttacagccattgattctttgaccttcaatcccatacgagctttagatctacaaaagaaaagaaaatgagttagtgtgggtaatcatgcttctaagctctctctactctctttagatataatttgttgttaatatagaatgagtggggatcttaaggaccgataccttatatttataggtgagatactccatcagtattcgtgtcacatttattgtcaaaatattttgacaatgaattcgaaaaatcaaattgggaaataaattaagtggtgagtcgaaaattggccatatatagaatatttatgtttatcaaataattgatttggaatcaattataacgaatattttatattcatacacgtaaaattattttatgattttatatttaatatataaaaatattctaataaaatagaaaaatgagttatgagttaggagtaataataatttggtagattagctctctattctattttcccagttgctcaattacttctgacacaaatataagactagacggttcctttgtaagttacaaaaaagaagatggtcgtgggatccatggatcaacatacgcccttgtattaacacaattatgtattgttcttctcaatcttttaatttctccaccccaaataatagcatgccatgtttgagatggatgaagcctttagtggctaaaaaagctatattgtaaaaaatatttggccttcagcactttgccagaatggatggtgaatatatttatttttgccaagcctatttcgctagtatagcttgattgtactaaacaaatctcctaaatcttagtcctcctcttttctttggtaaacaaagcttttgccaagtccgccaacatattttcttcttagattgaaaagaccccaccaatatctagttatttatcgttctatttcctcaaaaagttcttcaagaattctgatacatgacattaagtacatatgtatagactagatgcctgcttttagtaaaatctccttgcttacttgaaagaataattttgtacgccacaaatttagttttaaccaaatcttatatttaattggtcaaaatatagattttttgtttcttccacccaccataggcaaccaaaaataagtctcaatttcttctctcgtattcatttcaagagagaaaacatattgtactctaatttcttttggggtattaggaaaaataaaagaagagattcattgaaattaatcatatgtagtattaatatgattgactaaagataatttatatataaattcataaagatattcatatattcattttatacttgtccagaacagtcaggatacacattgaaattttttatacagacactagtgatctcttaaaagctttaatagagcaagctgtcatccacaaagaacagatgaccgattggtggagtttgtctatctattttgagacctaatatatctctcttctcttttgcatgtcacagaaatgttggaaaaccttctacaaatataagaaaaaaatatggcaaaagtggatctctttctcttatgtctcttaacagtattacttcaccataaatctgatcatttatatggaatgaataacgaactgtatggatacttctcatcaatttacccacccatttttgttcaaaacctaactttagaagcattttctctacaaaaatccactccacccgatcacatgctttactcattgtttatcgagatattcaaaaactgattaataagaacttaaggaaatgcaaatattaaataatagacaaatgaattttttatgtggttcaggcataaatgattcttagtcctcgagtcagttgtattagccttcgtcggcaagtgtttgagtattacaagtgtttataacaataatctctgtattcttttggtttctcttaaagaagaaagccctctaggaattttagtagagattttgtaagtaagaattgttcacccctttgcacataaaaaatagaggtatttatagatacacatgtgggtaagggcatacccacaaccctaatagggtttgttactcaacatacaagaaaggctgaaaacacctcaagaccatctgactgttggtttggtaggtagttttttttatcaagtggcattccttcgatgcaagatatcacgtaaagatctggacacgtgtcattcaaaggtttctcctttaaaagtaattgtctagacaagccattagacaataagcacaacagaggcacgtacgcgcacaaccacagtctaacacaagggacatgatctgatctggtgtcagacgaggtgaaaccatcaggtgtagttccagattaagtcttaaggagcttctgggaagtttgtgttggaattattttaccaggatcttggatctactcacaagtatnnnnnnnnncaacctaaatatgaacttctaaagcgataataaataaacacatataaagt

SEQ ID NO: 17666 - DNA, 2837 bp, Cannabis sativa
agagagagagagagagagattattctgcatcagtcagaggtaagaaaaatttaaatcataaacctggtcagtctccatcctcctgataatgatgctgatcatctgagtcaacattgccttagacgttgcttgatttacaggactcttgctacaaattcaaactagacttcatgagtactacttaaagtcgacaccctaaaagttaatacaagtaccctgtgatcatatgaaaaatacctgtgaagagcaatattgtagcatactctgataactccaagtaaaggttccccatggactgcataatcacatgtcactcttaacagcctttcagggtcaaatatcaaaacgatggagaaatagaagacaccttttataagtgtgaacataaatcctctcaagtaacatacctctgaattttgtggatgctacagcagtaaggaggactttcaacacttggagaacagtgctgcatatttacttttgtaagtaaacaagcgtaacacaagacataaacagggtttaaaaaattgtaatagtacctatcaggtgatgaattgtcaacacagctgcaaaccatgttcaggatgtctgtaaacattggtacattcttaccaccatctaaaccaggatctccctctagatgatcatatgcaatgagtttctgtgcttatatgatttgagaatcaattagcagttacaaaatgtattcaaatggagatcaactgacgaaaagtaattaaaaaactgtggaaaagtttagttaaggagattctaaaatcgaatatgatttcacaatactttttgcaccttatcaaggatcacatattatcgacacactagtagatcaaactacagaatatttattataagaaagtgaatttgaatagcatgccttagttcttctaactcaaaacaatttattcaaacaacagcatcaaactcactaatagaactcaaatgtaaatccttcaataccccataaccttgcagatatcctaaaatgtaaattctaaaaaatcaaatatttccctctcaaaagtcccttttctcaatccgaccactttcaacataatgctaatattcttaccttttctattgcaaataacttaatgaaacaacttgaaatttgtatctctttctctagtaaaatagaatttcatatatttttatttccatgatcatgcatatcaaaaaccaataattcaagcttgtcttgcaaatttactgttcccatattacatctctcaatcaaactcaaaattcacttcccatctattaatctcctcaatcttacgcaactgacatcaagaaccgaagggaaaatcttaaacaaagaaccaataaattgagagcgtgaaaataaaaaactaagaaataaaataaacatgacaaatacatacatgaagacaatccaatgcagattctaagattttcaagttctttgtctcaaatgcaagtcgaagaggactcaacacaagttccgccacagacccctccaaagtattcccagcacttgccaagacagttgaaatagttgcacttatgctcactggcttagcaacaggaatagcctgggcatcatgaggaactgtttgtgactggctttgctccttttctgtttttgaagctccatcttcaagtgaactgcaaccgaaagggataccaagacacaaaaattaaaggacatcacggtgttacagagaatttgataggtaacgttttgcatgttaaagaagtgttaattgacataattgcatcaaaaaaaaatatattatattaatcttagaagtacaaactacaaacctctcatcaccagccacagatgcagcttggtttgtctcactggaagcgggaggctgaacctgattgacctccttcgtaccatctgagaaacaacattacaacaaaacaaactagtgagttacaccatgaattttctcatctcaagcttgatggacaattgatataataagcggatgattgtgatgaaggtgcaacgtacaaaccaaaacaaaactgttcattgctaattttagtcaataacagccacctctaatttcaatcacaaacaaacgaaaagtaatcgaaaaatcgacattatcaatttcaaattaagaagaagcataacctatataattctggatagctttctgaagttctggatgttttttccccgaacattctttgagcatcgactcaaatgctcgtgtaacaaaaccaccagctgcaccacccgacatttttactttcttcaatcaaaattctccccgttctacaattctccccaatcttgaaccaaaaaaagaaaaaaaaaatgttaatcaaaaaggacgcctaacatcaattagcatcaaccaaaagaaacacaataaagaaacaaatgccgagaactcggatcggaagccattgagccaagatccgataaagaaatgagctactattgatgagcaattgcagagaaatggagagaaagacacgtaccttaaatttctgcaagttgcgaaagagagatctgaaaagaaggagatgagagtatattagatctggtgatctatagagtaagcttcactcttcttctcctactggctaggctactggtcttctctcacggagctcggaacgaagcctcagacattgccaattgccactgctgcctgagatttttattttattgtcaaaaacgacaatattgcgaatgagtcttctatgcaagcttaaaggccaatcaaaaaaaaaaagagtgaaaatttgggttagatttaaaaatatgataacagttaagaaaattaattaatagtgatacgatcgcataccatattcttcaaaaaaaaaaaaaa

SEQ ID NO: 17667 - DNA, 3047 bp, Cannabis sativa
  modified_base (1595)..(1601): a, c, t, g, unknown or other
  modified_base (1747)..(1758): a, c, t, g, unknown or other
  modified_base (2731)..(2737): a, c, t, g, unknown or other
  modified_base (2763)..(2763): a, c, t, g, unknown or other
gtaatgggttttatttagggcacaaaacccaacagtaacaagatctaaaaattttatgttgagctcaaagtccaaatcctcttctaagggtgtcaaaatttgcaattaaattctatcttgtaaaaccgagcttaccgatttctactattttctactaaaatatgctaacatccctccaattgaatctaaatacatgattagtctttataatctttaaaacaattaaaatcacactaatcaataatttaaagaattaatttaagaatattaatacataaattgatcatacttatgagataaacatggactcattaggagtcatgggttgggcttttatctttgcttgtcattttcaagaggcacaatcgtgtttaaaaggtgttagggtggtccaactaggttgtcctatacaaggttgagtgccaatgccttggtgttccctgccagagggatagttcaaaatcaatatggatgttggtctacaaagtatagatcgttgtatgggatacagagtcttcattagagatcatgattgtaggtgtattgcttcggcagcatacccaatagtggggctattgtctccttaggtggtggaagcgatggctatattggttggacttcaattgtctaaccgtctaggataccacaatattgaggtagagtcagattgttaagttgtgacgatacttttaagtaaaaaaaattcttgtttagcaacctatggttcagtcttagtgatattttattacttagcaaaaagtttaatgtttctaaattttaattttgtaatcgctctgcgaatgttattattcatgatttggccaaaatgactctcttcttagagaaaacaagagtttggtggtcgggacggtttttgtataagcctttaaattattttggcattaacttaataatcattactttaactatcaaaatatgaaattattgcacttttactactcaaataattttaaaaaataataaaaaagaaatattttaacttatataaatcattaaaattattgaaaaaatatataaaattaaattagtcttaaaatacaaaaaaatagtaaatgaatttgttttatttattcattttttaaattaaaaataatatatttctatcaaataaatatttctttaattttattatttagtttagatattacttttatatttttcaataatttataggattttttaacataaaatatattttaattaactatttttaaattatttaggtagtgaatatacaatattttaaaacgttagtatttttacttaaaaaatatttgcaaaaaaaactctctaaaaaatacaatttgtaacactcaaccccacaaactgatttttatggtggtaaaaacctaccaaacctcacatatgttatgatatttacacttccattaaaatagtaatgttaaataccaacatgtactgttagtgtacacaagtatacacatcacatattttaattagtcacatcattttttctttttttttcttcttatttcttcttctttcttcttctctaaaccatcaagagtcgaccatcactgtaaagactgcttagttttaatttggaaattagnnnnnnnttagggtttaattatgaaaattagctattaattctaaattattaatttatgatgatttattgaattcaggatgcattttgtatgtcatatatagaaatttcataattttgcatgttcagtgcctggcaacattggaacgcggtgtnnnnnnnnnnnnaatcacatcttagtattttagtttagcggggcagtatagttagatatttttaatgtcgagaatgttcgggattttagaattttccaaattacccgttagtggcttttagtgatttttagtgtttaaggggcaaaatggtcaatttgctaagttgtattttgtctttttgtgggatgaattaaatcaggtttttaattgatttttaagctgaattattttgataaaaccaatgtaatttcattattttgcaaaaaaatagaaaattatcaaaaagtcacattttcactctcatctctctctctctctctcttttcgaaccccagctacggtttttattttctcaccttcatttcagtgttttcagcagttcaaagtataatccaagccaaggtataagttctagtaatctccttttcgttttcttgaattgtaagaaaaaggaaattttgcatgagttgttattttggttgttgttcttgctgctagtgttggttattgttgtctatggattaattatgcttagatatgctattttaggcttgtggtggtggctgatttagtgtttgagcaagctttgagttttagaactcaagcttggctcattaatggtaaattttgttttagtgcttgtagctctgttttgttgcttggaaaataatctttaagatgcttagaacaggtctggtaggttttatgtggattgggattgatttgaatgagttatgaattttttgactcattcctgcactgaaccggaattctggttggctcccaggaaaccccacagaaccaaaattccagttggggaaccggtctactagttggggcaattttgggaaccctagtttttcccatgtttgtgttgtttagggtattgccatgttatttatcgatagagaaacttttagtttcaattttaagaccccagaaagttatttagcgtgtcactcacctatgttatgattgatgtgannnnnnngcctataattcgccgagcagttgttncactcaggttggccggcacacctaaattcgaaatcaaggtaagattagtattatgtcatgcatatattgatacatgtttagcgtacattttagttgccgtcagaataacatatcaaatatatgttaggcaaatctatagccatcagattttcatatcagggcaatagtgaggtgtatatagatttgcaacaagatgacatcagatatatgttaggctatcagatagtatgatttaactgctaccacatcagtacgattagagtactgagtataggctggattcg

SEQ ID NO: 17668 - DNA, 2793 bp, Cannabis sativa
  modified_base (1450)..(1453): a, c, t, g, unknown or other
aagttcactctcaaaaccctaattcaaagagaattctaacaatgagctaaaataataaacttgtttggaataaaggagtacaaagaagaaaatgacatcatcaagggctagaaggaaaggacacacacgcccactgacatctcctattgtcagtagttacatgccataaagaaacttgaaggaaagtaactcaaacatgtaccaaaggcttaaccctaaagtcaaatggttgcataggaaagggtaaaaaaagctatccacgaccactgacactccctagtctcagtggccatatatgtggtccaagtgagaagtggcacacagtgtcattggttgcatctttcaaaggaattaaggaaaacatgcgactaatgaatcctttcaatgtcagtgctcacatagtacatgggagaagtctcttagaagatattttgggggaggaataatcaggctcatgcgagcactgacattccctagtgtcagtgctcgtgtggctcattcaaaagattgttcttaggcattttggaagtttaaaaccctaaatggtgtcaactaacttccaagatgttgttaagaaaactctaaatggtcaacaaagaagggttacacgatcgctaacacttccttagtgtcagtggtcgaagggtaagactccttcaagtgtagtttcaacaagtttctcgaaagtcgaaacttctagaaggttttcgaaagattaaccagctcttcaagtgaagagatattttattttatgtattttttttattattacttaaatataaatgcagaacaaaaagaagattttgtaaccattctcccggattgtggagagtgtgagtgaaacccaagcctatataaggttgttatctaaacctaagaaagggaccttgatttgattcaactttgatcatccgcctctttacttagtgagatgcattttatctctcatccatctttgagaacgattgaacacttctttagagtttacccgaaaaacttagccaccaataatatagaagaagttaagttctatcgttgacaatctttggagataacatttagagaaaatccaaaaaggtctcctgcaagagatctcgctgttgtaattactcaaacacattattgaaaacatagctctggtgcatttgaacgatgtaataaaacaacaagtagactaacctattatcgccaaataaaaggagttgagcttctataaattctgtgttctttttctacaattattaaattgatttattttttgcaaccattaaagtcgtagtttaatctgctcgtttaccctcatcttttgacgaaaaactgccaacagttgtcaaatctttaaacattgaagtaaataataactattaaatgatttggtagatattaaagttcgggaaatataatttagtatataaacaatcactaaaataataaaattgaatgaaattannnnaaagtccttaaatttaacaatctattcaagggaatttttaacgttcagaaggcatgatttaatacatgttaaaatttaaagggcaaaatcctaattacccaattaaaatcaaacccaaatatctggaaaggaacaaactaaagatacatttatttatttccatcaaattaagcagaaaaataattcttcacctatttcaaagaatcaataatgagtcttctaaatcaaattcaacgcgttgtttcaaaattaatattgattttttttttccatgttacagaaaattatttcagtaattccaatttccaactaacacgaaagggcaattttgtgacttccgccccctcacacaacggggccggcgaactgaaccaaaacgcaacatccaaaaagaaaatgaagaacaaaagaagaaagataatcgtttgttgccaaagttaataagtagaaaatgagtattaagtaccttgtaaaccgggccgaagcctccgtgcccgagtttattcagctcggaaaagaaattggtagcgatttggagagaattgagttcaaagaagagatcaaatgattcaaggccttcatcgccgtcatcaggggcggttgaaccggcggtccgggcaggtcttatagaatccaagcaggagcgaaaagcggagaaaaatcccataaaagcattcaaccccggcttaactagatcgtaatcctctgtacccagaaaaaagtaaacgcgggtattgaccaattaatttcaaatatacaaaatactgattcaaagactaatggagaaagagattgagaagaaagagattattgcttttttttttttttaatattaaatgagcttattgctgttattcttgtcttctttctacacttaccaatcatgaagaaaaattcctagacagaaaagtgcaggtacttaggcttttgagcttcttattttttattttttttgaaagttagcttcttattttttcagtatctatccatatttttttttctgttagaaaagctatttaattgattagcgtatagcttggtctataatttttttttttttttgtctaaattttactttttgcgatttgtcgttgtggtatgtttttcttcttgtatttttaagtgtaaaaataataaaaaaagaaaatctttttttaatgagatggacgtattaaaactacccctttttatatctatttcaaaaaataaataataaataaaaaaaccccttttttattgttaaaaaaaaaaaacaaaaacaaaaagcaaaatacacacgtttgtttaatgagagaggagttgaattatcattgaatcaaacaacactgttatattattta

SEQ ID NO: 17669 - DNA, 4741 bp, Cannabis sativa
  modified_base (45)..(68): a, c, t, g, unknown or other
  modified_base (2151)..(2170): a, c, t, g, unknown or other
  modified_base (2255)..(2266): a, c, t, g, unknown or other
  modified_base (4111)..(4111): a, c, t, g, unknown or other
aacataaaatgttatttctgatatttattaataagtaaatctgannnnnnnnnnnnnnnnnnnnnnnngggcacaaaacccaacagtctatatggtacaaccaccggggtttgaagaccctaccaaaccaacacatgtttgcaagttacacaagtggttgtacaggttaaagcaagtgcctcgtgcttggttcgacaagctaaaagaaacattgatcagatggaactttcagaactcaaaggctgacacttccttgtttttctacaagaaaggccagtcaataatcatagtgctaatctacgtagatgatattattctcacgggaaataatgcagagaaacttaatcacttcataaatgaactgaacaagaactttgctctcaaagatctcgggtccctacattacttcctcggtatagaagcacacagggacaacacgagcttgtaactaactcagagcaaatacatctcagagttgctggaaaaatatgagatgcagaatgtgaagacctatcctactccaatggtctcgggaaaaccattgtctaagtcagatggtaagcctctgaccgacgcaacagtctatagaagcttgataggagccctgcaatatctctgtcacacaacaacggacattacctttgtcgttaacaaactcagccagtttttgcaatctcctacaaccagccattggagtggtgtcaaacgggttctgcggtacttgaaagggactatgtaccatggtttacacatcagttacagtgaaaggttggccttggtaggatactctgatgcggattgggcttgttgtcccgatgatagaaggtctattgctggatattatgtatactttggagatacacttgtgtcatggtcgtcgaaaaaacaagttgttgtgtcacgctctagcatagagtctaaatatagagctctggcccatgttgcctctgagataacttggattgaaacacttctcaaggagttacaatttacttcttctcacaaaccaatcacatggtgtgacaacttgagagccatctctctagcaaccaatcttgtctaccatgcccgtactaaacacatcaaaattgatgctcattttgtctgagataaagtgttgaagcaagaattggagatcagatatgtgccatcctctgaccagatcgcagattgcctcaccaagggactgtcacacagtcagtttcggtttcttgttgacaaactcagagtgagaccctcaccccatcgtttgaggggaggtgttaagacaattacaagtagcagcccctaaggtgcatctctgtatggtgtactgctttgctgtcaatgaatgttataatgattgtgtgtacgaattcttttattttgggatattccctctcctttctattgtgccacttggcatcttgtaattggtctccattgtttcattctctctgtaaatgaattcctttggctcaaaatcaattgagctgagttttacaatttcctttcttctaaaatcattctggtactagacactgctggtaccttttaacatttctcttgtatctatcacacatttttaactctaagggattatggtctaataggaccaattagtttaattaatggtagactataatttagtagaccaattaagtatagttataagggtactttcatgtgcctttaatacatttagtgactattaaccatcccataatgattattgaataacattagacacatagttaatgattgtggttatgaaattatatttatgattatattagtccataatagtaattctaatattctctcacctgaacaagataatcaactatcataacaatatccaactcataaaacaatcagctataacactaacaatatcatatccataggatagtcatatatactcatattacatatgacttgactttgaaaatgtttaatacaataataaccattataaccactactacaaatatcagaattcatgacactactcctaacaatgattttttacgaggaccgtcgctaaaacaattaagtaactatttgaaaccgtcaggaaaaatttagtattctcgacggtttaaaatcgtagtaaacaattcatagtattcccacatgcctatctacttttttctatttcccacatgcccnnnnnnnnnnnnnnnnnnnnccacaccctaaaacgaaaaatcttaattctccaaaaccccacacacacctctgcactatcgccctcctctctcgccgtcttcctnnnnnnnnnnnnctccctttcttctcgtctctctcgtccatcaatctccacccacccttcctcccgtcggtctccctctactctccgtcgcatacttcagaccaccaccacctcccgtcggtgtccctctcatctccgtctcatacgtcggaccaccacgacctcctgtccgtctccctctctctctttctctctctccaatttcgacataaatacatttatttatttatatacttatttatttattatatatatttattttgttattgtataaatttaacgtattttaaagttagttgttattgtagcaaaatttattagttgttttattttaatttaggtagaatgataaagctaatgcaggaaaaaatgggagaaaaatctgtatttttttctcttttttttacattcctgatggtttaaaatcgtcgcctataccctgttataggcgacagttttaaaccatcgggaagtctaaattagcgacggtttttaacagttgcctattttgcccattttacgacggtcgtataggtgactgttatagaaaccgacgagaatactttaaacgactgtttaaaaacgtcaagaaaaaccatttttgtagtagtgaacaatcaaactaaaacatgcatgaaatataataaaattgagactatgtgcattcatctcttttagtacctgtcactttagtaaacaacctgtatatataaatattgtgagggtttacgccataaaaataagtatttaatggaaaatatataagaaaaaatatgaaatataaatataagataaatgaatatgttaattatagaagtatcatcaatatatatctaaaattttatattcatatagggaaggtatgttcttgtaaggtagtacaagagaatgaagaatatgcaatatgaataaaataagtcggtagtgtattaaagtacgaaatctttaatatagaattaccaagtttggtttactatgcactatactctagtgcgtgtgattttgattcagatcacatatggagatgaatgtaatgtgtataatttgattatacatgattagaccgatatgaaataatggctttcattaacgtgtcatttatcataaaagagttatctatattacaatgatgattattagtagattagtttgaatcctaagtatacatgaatttctgtttgtattcattgagttctttattcactcgttaaagtttctcagagaatatgattcctacaacttttgttttgagaacttaataacatgagtggttgggaatatattataaaataatggaatctaagcttaccatgaggatctaatattagttttcttagagtgttaatttgtggagtgctaacagttggatcaaaatctataatcggattatagattaattgtccatgttgaattaatggtacataaggaattcaagagacaattaaaagggtaaaaaaatatttttgcccaactttaattatgaaataataatttgaaagcgaactacttatattaattatatcaatagactataagtaaaaaattctgtgtatataattatatatattgtcaaagagtacaattctatatttatagtggagtaataatggaattagtaaaccagattactctattgaagaatttaataataatcaagtatttattggagcttcaatatataggttcatggtctccaaattacctctatacaacactgtacagaaaaatatttaatttgacgaatgaattgagaaagaattctttaggattattttggatgattatatcaattctgaattgaataattaaaatgatatttaactatttagttttatttgataaaactatattaattanttaaatataatattattcttaaatgatatttaaagagagaaatatattattttagtgtaaaataatatttatctaatcctaattaaataagagattaatgagaattaatcaattattatttattacaaaataaatattagattttattagtgacaaaattgagaaattaatttttaattttaaaatatggttcacagtgtagagcttaggcccagaggtgtaaggtgacatataaaagcccaatttatttgttttgattattttattaaataaattaaatcaaataaaattaaattatcttttaattatttaaaattaaaaatatattatcagataatttatttaaaaaaaatataaaataataagatataactgaatcttgttattcacttataaggtattattttttaattttgattttaaatttcaaattaaaaataacattatctttttattttaaaggattaaaaaggattttaataattatatatagattatagctaaaggtatatatgaaaaataatatataagatatatgatatacaatttttgggagataaaaaaatatacaatatattttctcaacccaaaaacctagtgacaaaatacactctttctctctctctctct

SEQ ID NO: 17670 - DNA, 4711 bp, Cannabis sativa
agacaaactacattttcccttgtacataatcttacgatggacttatttttctaaattttcttgcaacattttgttaggcatgggttgtaggaagacagctgtcatgaatgggaatggctggattctcagtgagggttatttggtggttagactattatttaaatgtggaggtggggtgagaaaaggggcaagaaatgtgtgggtgaattgtggttagctttgagctctagggaagttccaggtccctcaaaagcacctgggttattcattgtattttcccctcagttctgcaacagaatttctatctttggcctattgtttctctgttaatgtgtttgttttgggtttggtttcttcacatttttaaccttatagagcaatagcctaacttggacacacctcttaattttctggagattgaacattatacatttccttcttcttgtaactcatcctctgatattcaggtggagcgatctcttcttgtaactgggtttggttatgagcacgatgaagcatgggccaccaacattgaattatttaaagaattcactgacatcagcagggtatgaattgatattcaacctttttgtttgtcagaaatgaaaatatatgttttcgttgcttctcctactttcttatgctgttctctaacatttgatatcagttcttttcggtgttcaacttatagggtgtaagaagacttggtgctgctgcagtagacatgtgccatgtagctctaggaattgtggaagcatactgggaatatcgtctgaagccatgggatatggctgctggtgttttggtagttactacatatttatattctgttttacctttcgtatccataaatggacttttgattcccatgacatattatttcgtgcctttgggatcttgctagtaagctcaagtttctttcctgcagcctacattgttcttaatatggaataaattaggacttctggtgaccactgttgggcttttcaattgctcattttgtttatatgtgttggagcagatagttgaagaagctggaggagcagtaacttgtatggatggtggaaagtttagcgtatttgatagatctgttttggtatccaacggtgcattgcatggcaaggtttgtcataacatctaatttttgttcttttaaataccatcattatttcaaggtattaaactagatcttgcagtttaaggtcttggcaacgcatacacgccattcatttttctggcggtagtggaagattccaaaatacttttgatttgtattatggggtgtttggtgtactcggtgggttttagttgagtaagggaatctcaaactctagtgtttaaagagtttgagattactccaaaatgatgggcctgcaaacataaattctctactaaaatcataccaaacataggtttggttttacattcccattgccaagatcccaaacccccataaaatagtatcttcctttgattgatcaacttgtctattatgaattttcatcaaactgtgtctgatatctacccgaattccaacagtgaggtttattcatgtatccaaaacaccagtacaagcccagtgacatttttttcaagcagacttcactgaattccaatcatttcaagccatattgagaataatgccggtgtgttgaatatagacgcctgatagatggctgtctaacctaagatttctctctatctagacctgcccaccattttatacttgtttttgcacaggcactgcagcagtaatgctagggttgttcttgttcatgttgacggtcgtcttaaacataaccgatcacatctgctgacatatgctctaaatttaatgttgtaattggacgaattaaagtttacatggagctagtagtttgaccttaccttagcaatgttggtgaggttttggtttgatgcagagattagacagtgagaattgtggcgagtgagggaatgagagtgaggaacccaccttgtaggctaatagcacagatcatgtggactttcattatgggtttagtgtcagtctattaagtatatttgcttttttctttctaaaaatgatagtgagagtggtttagacggctgtatgtttcctcttgttcatttttctttctgaagtgaaaacaattaactagttgacttgattgatcaagtattatttgtttgtgaaatgcagcttctggaaaggattgccccagctacagagaaactcaagagtaaaaatatcgatttctccttgtggtacaagcctgataactacctcacagaactttgatgtggctgagagcacggtagtagttttcccggcacgatgggttttcttttgacaaataactggagccaatggctgttttcttagcgttcacttcacaatgccctcaaattctcaagagccaatgtatatttattacaatgtaacctgtaattgtgctgtatatatatatataatacaatgtatatatattaatcatattctcttgttttcaatgtaacagatgatggcgactctagaatcaaaatgtgaacattcatgatgactagacaaaataaggaagacctcgttagaccaggtttagacctcgttcggactaaataaggaccttgttcggagtaaatcaattcggatataattcgtacctttttttttttttaatatataattcgtacctcattgagactaaattcacactctggccatattttcacatcttattcatactaaattcacactaaattttgaccaaatttacatctcattaggaccaaattgacacttaattcctaccgaattcacacctcattcaagctaaatttacacatgattcaaattaaattcactccatttcaaattgaattcacacctaattcaggccaaatgatatgtgaatatagtctgaatgaggtataaacttcaatgctttgaattaggtataaacgaattcacaattaatttagaccaaataaggtgtgaatatggtctgaatgaggtctaaatctcatttgttttgaattatgtgtaaatttggttctaacaaggtcgaagcttggtgtgaacaaggttcgaacctagcccgaggtctaaacatgattcgaatgaaaattctagtatcttgaaattatagttaaaattaagatctcaacataaatttattttttgccaaattttttgtccaaatcagttcaaaaattcaatctacattgttgtataagaaacccataacttttgattaacaagaatacatactcgtaataataaaaaaattatttgaagatgagaatttgacatgaaagtatctaagagtttctatgaccagcggatcatggtacaaaaagtgcattggttttgtgtcttctttagttaattttatagcttgatcaatgagtttgggtcgttgtgtaggtagttaatttagctcccacacttcatcatcacgatccaacacttggacataccgcttcagcttcccgcgattcgttcctcctaggtggggacccccagagatcacgaccactctcccatttggtctaggagggtgctgtggttgactgttttggttgtctaggatttagagctaatggcacatcgacttgaaggtcaggaactccatgagcttattctacccctgtgagaggtacttggcctccgaccggtctttactgcatgcgcgacaaatgatttttgagccactcgtatagatggcctaattatatcaaattctcaattttgtctcttgaagacttccagtcattcgtatcatgtccaatgtcattgtggtacatgcatctcttgttagggtcccttttgaagcggtcttggaacatgggtagagacttgcggtagtgtatgttttggcgagtcgccaagtatacttgttcctaagttcccactagtttagtacgttgggtgtatagttgttcatctttgggagccttcctcccttttttatcatcaattcgtgtgcttcctttgcttgacctcttactcctccttgtctgttgcgtgggtgttgtactggcagctagagatgctgcaggagcggagtactaaacgaatatacagggagtagcactgcaagttgtgggcgtgccatactcggagtaggttggcgccacagaggaaccttgggaatatgccactggggcttggaattgtacactggagggggcatccctcctgttaattgcgacgatgtcaggtgacttactcccggatattgctttccgtaagcatagtttggacctcccactgggtaatacccctctgaaagtagtaatgctctcttcaatgttaatgtacttcttggcccatttttgaatgttctttaaactatccatgctttcttgttggacttcattttaaaaaaaaggtacctgtttcgattcctgcttgtaacagggccaactgctgcctgtcgtctactttttttgttttatttttgaagcctcttctttggatgttttaatgaggggttttaaggtctctgtaggcaatttctcaatgtaggttagggcactaagttcgaggttgaccatcctggcgggacaaaatgtctctggatgttcatctgcaacttgttccagcaacctatggagcttggttctaactttttgaacctttctttagcatattttcctaaagtcagagggaagcacaaacacttggtgtcattactgactcgtaaatactatcatgaccctatttaat

SEQ ID NO: 17671 - DNA, 3232 bp, Cannabis sativa
atttcataaaaatataaaaaaaatgacaaaaaaattacatgaaagtaacaaaaaaatatcaaaacaacacaaaaaataaaaaataatatataaatataaaaataaaaagagtgcaatataacattaaaaaatcgtatttcatgtaaataaaatttaaaaaatcatcaaaatattaaaagtttcgtagacctatattttgattttccacttgctacttcggtaaaattctatttatcattttgttcactatttatctttgtggtggcaatgggcagcattagaatttgaatattatcatgaatgattactccaaacaataaaaaaggccccggctagtgtatttttatcaaaccacatgctagagattcatatccaataattggggtgtaaatcagagccccctaaatttttcttctcctattttcatcttttattttttttaaaaaaagaataatataaattcatattggagccatttataagggttgtacattatatattattagtataattttttttattaaaataaattagagttagtttttcttttggcacatatttaacatcttccaagttccaacttatcgtccaagtggaaatgaattgttggaatcatttatcacactactggtaagaagaagatgatgattcagaataatattcttgtaaacaacaaagcagtggaatatgaaggtcatgtaccccaacttttcccattccatatatatataaaccatcctaccatagagcagcatatcactacaaacaaagccccagacacaaaggtaaggagaaatatagcgcacacagcttcagttcatagccaggtcacagaaaaagaaagaagatgcatacggtgttctcatctattctagggaatttggtggccaaacctaattttacaaggagggccgagggcattattcataattgttattataccaaatgtggttgccttcaatactagtagaattacaaagacaatctattccctctaaaactcttaccaattctacttgactttatctaataacgagtattgcattggtttattgggtaatttagacactgacccgaaaaaaaaaatagtaaattgaacttgatcaaaactgtgtctttcaaataataatggtgaacatcaaatgactaaaaaatatatttggtaaactgattttccatagtcttaagtcttaattttaggtctgtaactcattctgaaatggtaaccaaagaaagctgattcaaacaaaacccctacttgtataggttgtgagcagcaaaaatcaagtgaacatgtcaatacaaatcaattaaactaaattaaagtagcagtagaagtaaatgtttaaaagcaacaagaacaatcaaaagggcaaagccgggtacctcccgcatcagctttgttaagacctaattcctcttcagtgtacacagcaatcccatcctgagttttctttctgggacgagaatccgattcccaaaacccacgtgatttatcatcttcctccttcctcctcggtctcttcttctccttcatcttagctcctccggcgtccttgcccttgacgggcttttgggtcttttcatgatcgatcttcttccgctttttggcggcgaaaatttcgtcaatttcggatgtgggcttcttggaggaaggtttattttccaatagctttacatcattctctggagaagaagttgttttggatttgctcttctttcccatggagtatgtgaagaagaaggaaaaattgcagtccttaatttgatcgattgaggagaaagagagagagagtatggagatagaaggctagggctgaggtagtgaacccagtcgttcgtttatagtaatttaccccaatattattaaggcttaattatgtaatcgctcatttaattatgtatttttggtatcctacggtttgaatgaactcatttgtaaactaagggtaaatagtaaattaaaactggcaaccggatagcttttaagtatttttttgtgcactgtttcaataaaataagttaaaattagtaaaataaggggtcatttggttgaagaaactcaaaagtgttttatatacaatacagcataaagaagtccaaatattgcattatttcgatttacagtctaaaagaatagttgttgggtttataaataagtgattatgatgtttttaaattagttttatatcaaaagaaaaactagaattttttttaactatcaatgttattaatcaatataatatctatagagtaggatataaaagtgaatttgttgtaaatatttttagagtttataactttttttttaaaaaaaaaaattgtcttatttgaatataaatagttaagggtattcatccaatctaatttgtattattttgctcatagtatatccgattcgcactaagtgcagattttatactttgaatctaatccaatcctcacaatagcgctcaaattcaattatccaatccccaaatgtgcggattgaatcgattattttggattggttactttatgaaattctatattttaatattctcaattttattatttaattaaatgcgaaataataaaactagtactgaaatagtttttttgtagctacagaagataatcctgtaactccagaagaaacaaaaaaaacaaacagtgcagaaaagtaaaacacacaagatttttgtacatggtttcaacaatcctttcaaattgttaatagtccacgggaccacacccaaagataagattcattagatagatctcaaaaatacaaagtaattgacttatacataaatagactcaatcttattatatgccgcaagcttgttgtattctatcttctaattgaatcttgctgaaacttcaagtgctcgaactcccttcgatctccttgaagagtgcttgcttcctcccgaggcaagacttgaaaatcaatctcccgaaagctttgtaaaaccttctcccgaaggtagtactgttgttcgtcttctttgtaggcttgaatacaaactcaagacaatacaaactacaaataaacagagtaagagttgaacaagctcttctctacaaaacaaagactctcttctctaaagatatgagtgaaaattaaagatgcaaaagagatacaagacctagctgctataagatgtatttataatcaatatacaccttattgacaactcatacacggtctgaacaagaccacaaaccactagaaaattccataaaatag

SEQ ID NO: 17672 - DNA, 5833 bp, Cannabis sativa
gaatcaatgacttactagatacaataaataccatagaagagagagattggcttaattctttatatttgtaattagagtattattcaagccttgttggcgctgattaagttgtaaatatgtttgtttcaagcaatacaaattatctgattcagcaaaaaaaaaatattgtgttaaatttaacttacaattactttactttacttattataaaatattatttaccatattaccataattttgacaatattgtttcatatattattttttaactttttattttaatttgggttgctctagtagtttctcaggtggtttctatgtaggttgcgatttaagttgctctgttagttgctatagtgaactctgtgtggaattctataaaaatattaaaaaaaaaaaaaaattatttgaagtgtaaaaataaaaaaaaaaaaacatctaaataatattattttgtatattcttactaaaatattaaataaccatcaataataattaatattttttcttaatttacatcttgtatattaaaaaacaattataaatattgaatcaaatatatcacaaacttattattttgtattgaatttagcacaaaatttatatcttccatccaaaatggtataataatcctataatattgtactatctcatttattctttaaaagcactcacaataatttttttattattttttttaaaatatatcactaaaattatcatttttttattgtagattatatgtatttgtagggttatgcacatttttatattttacaatacatcaatttctctaactattataatatattcttatttaaaaaagaataagcatataatgaaagaaaaataagaaaagaaagaggagctagaaattaatttataaaaaatatttaaataaactatagtgtattttccacatctagagatgcaatgttgcttctctaaattaatatatcttcattttactcatgcaagaatttttatatttttaaaagatcatatataaataaaaatcaataataattaaaacaaattatctaaaactaactttttttatggaatttttttttcttatatggaatttttttaactaatttaatcatcaaataaaacattaattaattttattttataatttaattaaattagtgcttgtttaaaaagtcaaagggtcttattaataactattaatacgatattgtctttaattaaatatagcaataaagaataagaaattaaaggacatgcaagagaagattaattaatggttcttaacaagttattataataaattaaatactttaaaactgttatgtccgttaatttcatggcattactaaataaagaatatgaacactattcagatcatgcaaagcccttcattcaattaacatattaaacaaaaaaattaatgaaaaaactaaaacatccttattatagaacaataacatcgaacattcaataaccaaataaaccaaaaaaaaaaaagtattaaaaatcatttgcttcaaaaaaaacaagtcttttttctttctgctcaaacctcctctcccgggaggaaggaatggagatagaaaagagaccaacaaaaaaacacaaacactattctgaaaatctttttctatcttcttcatcgccatcatcatcatcttcttcttcattttcattattactattaccattatcattaccattctggatggctttcctcctggtcctaatcctcctaccctttaatgtcttgatccctgcagtctcagctgcggcgcccgccgctgccttcatcccacaagataattttcttatcgattgtggggcaaccacagcaattacttcaccagatggaagacttttcaagacagaaccacaagctgctcagttcatacaggcggcggatgacttcaaaatctctgtccctgccgctgatgtcccttctccaatttatctaacggccaggatcttcatccaagaagcctcttactcattccacttgacccaaccaggatggcattgggttcgaatccatctattcccaatgaacaacaccatttttgacctccaaaaagcaactttcaccgttaccaccgacaaatacgtccttctccatagctttaatgtcaacaatacaaatcaagcttttgttaaggagtatttggtcaatgctacagacccgcgtttcacaatcaaattctctccacaaaaaaattcagcagcttttgtcaacgcaattgaggttgtttcggccccagatgacatcataaacgatgttgcatcgaaccttttaccggttggaaactatcccggattatcaaacttcgctttccaaccagtttaccgactcaatgtcgggggcccgctgataacatcttcaaatgacactcttggtcgaacttgggcgaaagacgatgtttatttaaaatccccaaatttagccaaaaatgtcgtagtttcagcttctatcgttaaatacccacaaggaggtgctttaacaccgttaatagctccccaaatggtctacgcatccgcagttgaaatggctgacgcaggcgttaacaacccaaaattcaacgtgacatggaattttgacgttgatggagctttcacttaccttctccgtctacacttttgtgatatcgttagtaaagcgttaaataatctttatttcaacgtttatattaacggtcaaatagctatatctgacttggacttgtcccatacattgggagctttagctgtcccatacttcaaggacattgtggtaaattcatcttttgtatctaacggattactaacggttcaaattggtccatcaaatttagggtcgggtgaccttaatgcaatattaaatggtttggaggttatgaaaatgagtaacacggttgagagtttggatggagaatttggggtggatggacgtcaagagacgtcgggttcaaggcgggggacagtggcggcagtcgggttcgcgatgatgttcggagcttttgtagggttaggggcaatggtgataaagtggcataaaaggcctcaagattggcaaaagaggaatagtttctcttcttggcttcttccagtacatgctggtgacactagttttatgtctagtaaaaattcaggctctcataagacagcaaatttctactcttccactcttggccttggaaggtatttattattctttaattatattaattttttaaattaaaaactagattaattgtttttaaagctactaaattagattatataatcgaataattttttttttcttataattcaaattcaataatataagaaaaaaaacaaaaatgtatattaatatattaatgagatgttgtcgatattctcaaaaattatattaatgaatcagcttttattttatgagagcaaaccaattttatgaataattaataaataagtgatatataagtgtataagtattaatttcatttaagcacgatttattggatttattttttaatcattctttaattaattatataatttatagatgattagtcctaattaaaaattgataaatttttattatacttttcctttatataatattaatgtattgcaacaatattttatttctaacagatacttctcctttgctgagcttcaagaagccaccaaaaattttgatgccaatgcgataattggtgttggagggttcggaaatgtctacatagctgagatcgacgatggaacaaaagttgctgtcaaaagaggaaaccctcaatctgagcaaggcataactgaattccaaaccgaaattcaaatgctctcgaaactccgccaccgccaccttgtctccctaattggctactgcgacgagaattctgagatgattctcgtctatgagtacatgtccaatggccccttccgcgaccacctctatgggaaatccctcactaccccactaacatggaaacaacgcctcgagatctgtatcggggcagcgcgtggccttcattacctccacactggcacagcccaaggaatcatccatcgcgacgtgaagacgacaaatattctcttggacgacaacttcactgccaaggttgctgattttgggctctccaaagacgtggcattaggacaaggccacgtcagtacagctgtgaagggtagtttcgggtatttagatccagaatattttcgacgtcagcaacttacagataaatctgacgtgtattcatttggtgtcgttttgctcgaggcgctttgtgctcgaccagctataaatcctcagctaccacgcgagcaagtcaatttggctgattgggctatgcaatggaagagaaaagggttgcttgataagatcattgacccgcttttggttggagctataaatccagaatccatgaagaagtttgccgaggcagccgaaaaatgcctcgctgagcacggtgttgataggcccactatgggagatgtgttgtggaatttagagtatgctttgcaactccaagaggctttttcgcaaggaaaagccaatgaaaacgagcaaggaggaggagagagtactccggcgacagataatcgaccagtgtcattaccagaggagagtaacaagagtccggctgaagttcaagcgaccattgatgaacactctggaactgcgatgtttgcccaatttgctaatctcaatggtaggtgatgatgaaaatgaaaggggaaaaaataagcaaaagtttattattattactccaaaatgatcccttttttcttaatttcttaatggggttatgtatttgatatatttatagttaattagggtttcaatgtataacatttgtttgggtctagggttcatatactctagtatttgtttgtttgtttctattatatatttagactcactttggatttaaatttccatatcataagaccttatgtgtgtgctttggattttatggtcttattaaaagaataatctttaaatgaaagcatataataataattatgttatatgtactggtgtttattaatttgatgtaataattttgtacgtagtggagagattaaattgattaatgcaatttagagagatgaacaattaatgagcaatatttaacttcaaaagaaaatatttgctagtttaaatcattagcttctctatacatagaattataaaaaatgatatctcatatttcttcttttaagcaatttggggttcttatactatttattttattttattttcaccaaaaaaaaaaaaagactagaatataaataagcaaaacaaacattacttattcaaatattaggtaaacatgatattgtccattttggtagctaattaggattttgtcttctaaattttgatacgtattaaattgtgttttttaaattttttcaggctgttaaaaattccagcaaattattgacattattgtattgaagaacttttgtccaattatactaacgaaaatctgacataaataaaaattcagggggcacaatttcgtacatgtcaaagtttgggggtacaattcggtagatatcaaatttgggggcacgatttagtagatatcaaattttagggttacaatttagtacatgggcaataaacgcgtttgtaaaattgaataaaattgaacagaaatcctcaaatccaacaatctcaatagttcagaagaattttaactgcctgaaaaatttaaggggcatgatttggtacatttcaaagtttgaaaggtaaaaatcctcattagctttttttatatgcaaaagtattaattaaacttatataatcaagttttccagctagatacactataaaattatgtattttaaaattatcaatttattatttaattaa

SEQ ID NO: 17673 - DNA, 3775 bp, Cannabis sativa
ttattgagtcttgtagcataaccaaatacaaaattagtagccaaacaagccctacgtatatactataggggtggagaagaagaaattaagggatggaattgagacttgagaaaaataaagaatgaaaagtgtgaattgaaatgaaattataacaaaataaaccacatgattgcagccaaacgggcgtggtcgctttacatgagaaagaaagctacttttatcacatggcccccttagcctaagcttttgggacttggacaaatccctatctccatatgctcaaaccccaattcaatttaataccaataatttctatacatatatatttgagcgagattttatggtgcgggatgcactccctagtgttttccacattctaatcattttaatatatatatttgtatgtaatactgtatattttttaaaaaaaagttcaaaattatttggtgtctttaaaacaagattaaaataatttgttacatgtacagaatgtgagataaatagtttcaaccttactttctgtcaatattattaaaatattttaaaacactttagaaaaggatttacactactgtatttaacatatgtgtatatattcacttacacatattgacaaatatttcaacagtataataagaagaaagctatcagagaattgccagatcatgtgcccttggaaaacaaaacagcattttctttattatttaatttggatacccttttacttgtattgatttgtttcaagttgcacactaatttttatttcattttatttttctctaattactttcatacctcttctttacacttatatactgacaagagttaatgtttttcttttattgtgtttacgtatttattattagtgacaattgcagtcccgttagattgaagcaatcatcttttctcttaaaattcttcagatatttaattctgacaaatatcatgatttttttatttttttatttaatacaagcgtgtgaactcaaatcgatagcttgcttaaaagaaactataactattaattacgaagataccaaaacaaaatatatgaaaagtgtgctggtttgttctggcttaaatttattaataataatattttttaaatttggtgtctgaagttatttcggtacaattgtctaaattcatgtatacatacaaaatgagtttcttcacaatatattatatggagattttgtatggtttttgtccttagagttagaagctaatgattttttaaatgactgctaagtggccatctttgagaaatttatatttgttctttgacaagtttagatataacaagcaaatttatcattcattaaaatttgtaattgttgattttttttctttaaaatgtgcatagcctaaagaaaacacgaagaaaaatgttacaatatataaaatcatttaacattattttaaattgaagaagtatcacaattattgattaccttccaattccatcaatacaatgatgatagagcataatgtgtgtttgcctgttcaaaataaataagaaaacagctatgatgtatagttatatgcaaagaatataatgttataaaaatactatagcatgacttaaaaaaaacaatgtttggtgcagagtaacatatttatgtgttttgtacatgtagggcacaccccctctacattgtcatgctctataatccctgtgacttttgtctcccttgactaatctagggtggttgacaccaccataacactctatatgatcctccaacccaatggtgagctagctagagtattttcatattttcaaaatgaacaattattagccctaagagtttaatactttgaattaaaataaaaaatgaaaagagtctagccaggtgattgttttccaatatgaaatttaatattgtacccttataacttttaaagtttgaatctttggagaaaaattcttggttggtcaaatggtggaatgtgttagacaaacatagacaaaagcatgttattggtttgaacattgtcctaagaactgtatgtgaagtttataaggtggggatgaaagcgagctagagaaaatgacattgttctaataactatagtacaagtatgacaaatatagacaaagcatgttacttgttataacttgtttcgttcaacttatttgaagtttacaaagtgggggaccaaattataaaaggttttatcattggactcattaatattgtccaaattctcatcaagaaaagttaattaataatatatgcatctttaaaaaaaaaaaaaaaaaaaaaacccaaaacaatctccttattatgatctagcgtggtaaaggtttagcacgctaggctcaattgaagtgagtgggaaaatattgatcatgctaagtcaacctatgatggacaataatttcttaagctacatgtattgatttgaaattgcatgaattaggtgattatatatgtacatatatgtgagtcttttatatgtatcagagaaagtcatcataaaactcatcaaactcactttgcttaaatccagtctcaatgatgggaatgcaattctaggaacatccttaatgaaaaaagggcaatagaacttttcttcatcttaattgctaatactatatgcataatttgggtaatttattgaagattttgcttaaagagatttcagaaatagctttttctttatccttagcaatgattaaagttccaaaacggtactaactttttccaaatgttgttgaagatgaaaataactgattttttttttttttgaacaatgaggcacctccactacttttttgggtacttaagagacatgagattggaaatctacatttgacaatgaattgaaattcaattacaaggtgtgggtccattggtctttctacttctcaattttttttttttttttcaataatggtcaactgcatttggaaatacaacatactatataaaaaatatataaattaagggttgcaagatgttttttattttaagaaacaatataatgttcacttacctttatggcctccttatgtagagccttctcaaggaccaacgtgtcatatctttaatgaatgaaaatgtgtttatctttagtaccctttatgtaacacattaaaagctgtcaattggaaaataacaaatcagaaaataaataaataaaaagtggtaaaaaagaaaaagaaaactgttggggcttgtctcacttttttttttttttttgctgttttgaagaatattaatcccccctttactgtgtttgaaaatgactttgtttgttgtgagtgtggcagtggggggatcctcgttagaattaggtgaaatgaaatgacctaattttgtcttctctcacacttgattaactcttttatccttttgcaaagatcatatgtcactattagatgatacattaaagggcctctttatacatactttttttttgctcaataggctctttatacatacttgttaatccttcattcatctatgtccatccaagcctaaagtaaaattaattttggcacataattatacatctgccgtgatagtgctttgtggttttgaaaaccaaaaaggttatgttaagaagaattattgtgaaaactagaatgagttatagcattagattttgaacccatatcctttaaaaacacaattatgattaaatggaaaagaaaataaggaaactaataaaaataatgatgattttgtttagcagttatagtttgttagagtatcttgacactcaaaaatagtgctaaaaataattctaccatcaataacaacca

SEQ ID NO: 17674 - DNA, 2150 bp, Cannabis sativa
tgttattcttcttaataaagtttcttctcatggctgcgataacaggaaacagaggagctgggagaacggagttagactgggaatccagagtaaagatagcccttggaactgcaaagggaatcgctcacattcattctatgggtggtcctaagttcactcatgggaatatcaaggcttcaaatgtgctcctcaaccaagattttgatggatgtatctctgattttggcctgacacctcttatgaatgtccatgccactccttctaggggtgcagggtaccgtgctcctgaagtaattgaaacccgtaaatatacacacaaatccgacgtatatagctttggtgttctgttactagaaatgttgactggaaaagctccacttcaatcacccggtcgtgatgacacggttgatcttccaaggtgggtccattccgtcgtaagagaggaatggacagcagaggtatttgatgttgagctaatgaggtaccaaaatattgaagaagaaatggtgcaaatgttgcaaattgcaatggcttgtgtgacaaaggttccagatatgcggcctagcatggatgaagttgttagaatgatcgaagacatccggcaatctgactcagagaaccggccctcgtccgaagagaacaaatccaaggactcaaatgtgcaaactccatgattgcttgctgtaacttcttcttagtttctatgagcatgaaaattcttttcatctcattacaaatatcattctatttttaacttgtctggagaaaactttttccaaccataatttaaactttattttacatccttgtattgtttgatagattgtattttgtccaatttttccaccatcttaggaattttatagtgccacaaagttatttatttatttttcattgatttagatatggagtttttcatttcatgatttgatttaatgatgtattctgcacataacgaattaatcgaaggtcttctctttaatcatggacttccaatattgtttctttgcataccttttttgttttcctttgaaatttgaaaaatatggcctttaaacatgaatgattctctcttaattatataaaaattttggaaaaaatattctaaatttgtaaaaactattaaaaaatattatacatggccttggattaaaattaccttcttaaaggtattttaatctttcttaatccacaaatacgttttcttaagactatgttatagattgagaataaatttggattagttcaatttataatagataggtagagagtattaagtatttaaaagatgttgaggtaaaataacaaggccaaataataaagtagtgtagtgatgattagttgttggtttagtaaatgagtatagttttgtttagaagagaaatgtatgtaagtatgtagtttttgatttttgggtgttatattgatgatgagttgatacttgataattgattgagataagatagaaaatagttgtatataggccattagaagagtaggtaatatgtttgaaagtagtaggacacttgatttagttttcaagcttggttacaatatgcaatcttgatggggtatttataattgcatgtacatttgtggctagaataatttatcttgattaattattctaaatttaaattcacaatcttgattaatatgcaattttgattgttctggttctatatgattcacaattattctaaatttttcttgattaattatttctaagctcttctaaatattctagacttttctaatttattaaacttttttatataaatgtgagaaagtctagagtaattagtaatgtaaaaatgtgcagaaacttcaaataggaacataaacatttttcttatttttttcccatcaaaatctaatttctttactttacggtaaatactattttatactatgtgttttgtgaaaattaccgattgtacactttattttatcaaatgacaaattaaaccctgtattaattttttcaaatggtacaaaataataaactcgagctcaagtttcggtatttttttttaaagtaaatggcaacaaaaccccaaaaactttcattttggtttcacttaaccccaaaactcaaatttgggcggtaaaactcccaatactcgtattctgttagcaatttaccattt

SEQ ID NO: 17675 - DNA, 1755 bp, Cannabis sativa
ttttatgcagtatggtacggtgcaggtagtttgatgaacacccctaggtatgtacgactaacaaccctcaagagcatgtcgcacctctccaacctgcaaccattgcaggacggttagatgtgattgttggaggcccacatatagctggaaacttgagaaaagcattggagaagtacgcacggtcgatgcgccatgagcattgtgtcaacatgttggaagttgaggagagacctcccaagactaaatgcttgtgtgaacatatcacattcgcagagtctgacactactcatgtatggtaccctcacaacgaccccttggtcgtggagatacaaattgccaacatgatggtagcaagagtgatggttgacgatggagagtcatccaacatcatgttcgaataaaccctggaacgaatgagtttgtctttgaaggacttggagccatgcaagtagctaatgtatgatttcagtgaagcgagcattgctccgtgtggcaagatcaaattgccactgactgtgggaaaatccccacatactaacactataatggtcactttaatagtggtcgatacaaaatctttgtataatgcgatgacagggaggcctagtctttatgaccttcgagccatctcatccattttttacttcttcatcaagttctcaatgtcgacaagcattggatgctcgttgggtaactagcgtgcagctcgtgagtgttataatactttgctagttgtggcaaaaaagacctcattgactgcaaaagcatctaatgagaagaagaagacttttgaggtgttgaatctcgctaaggagaagacggagactgcacccgcaactgcctaagggtgcaccctgggcttggaagatatctgcccatgctttggagataatgacttaggagttggtttgaccgaagaactagaagaggtccctctcaacgaagcatactcgactaagactgtcaaaatcggcaaaaacctggggccaaccttgagaacacttctcgtggcttgtctctggcgaaaccaagatgtatccgtctggtcgcataaggaagtgactggaatcgacctcacggtcatctgtcatgactttaacattgacaaaaataactttaagcttgtggaacagaaatgcaaactactttgacgatcgttgatgtctacatcgtgaattcttaaagtgatctatatcacttttacaaaataataataataataataactaaaataaaaatttataatttaatacaataattaaaaataattttttaggtttttacatcacatattgaaatttttaattttttacttttttcttatggagaagaatttttttcaaaaatactatatttttttaaaaaaaaaaaataatgtgcaaggtttatactatgtattatattaagttttcatagttgctctataattattttttagttgttccactgttgttttaattgttctgttgtgttattttacggttgttttataaaaagatagtatttttttaaaaaaaaatccgcatgacaataaaattataaatttttacttaaaatctaatatttttgtaaaaacctcataattatttgtccagtcaaaagacatacttaagattttattgtaatttgtaacaattggctattaagtatcagacttctacaataagggaagcaagaaaacatctcctaacagcataagaggccggccaaacaacatcaattaacaatttttcttttgcaaaaaaaaaaaaaaaa

SEQ ID NO: 17676 - DNA, 4978 bp, Cannabis sativa
aatttcgtttacttttgaatgaatggcttagagtccttatttgactttttctctggttagaaagttctatccaattagtttttgtatttgaaagttcgagtctttgtttcattttctagtagggcctacaaggtttgatctttctagattttgattttgtttgccgccaaaattatccgttgcaggtgtaatctgttgtaattttttaattctagggtttttgattgagttctgcatttatcccctttttcttatttgtgaagtttttgataaaaaacaagaattgggttcttcttgtttttctcactttttccaattttcacatctttggtatatatgtttgaaataaatttggtaattagagtccgctttctgtagaagaaaagtacgtatttttatatggggaaggttaaccgagcaagtaaacttttgaggcggttacgaaaaacagtcgtgtttgaagctatctctttggtctttgtttgtatagaaagaaaatatttttgctttcattcatgtaaataacagaggaaaacacctatatatctttacagaaagtaatctcttttttcttcgttaccgccattgaacaaaatatattaaagatttattttttgggtttattggcatttttgttgtaggtttcgatttgcataggtttggttgatttttgtgaattgctaattgtgatcaagagagatttggtttgatgggtggcaagagttcaaaagaagatagtagttataggacgaggtcattaggttcaagggctagttcttcttcttggaatgagtatcctgaatctacttatgaacaagggattccaaactatgcatctcaacaatactatgcacctcaacaccaaccccaacaatcttatgcgccgccagaatcctttgtgcaaccggagtattatgcttccccgccgcccccacctcaggccgccccttctggtgtaaggagattggacaggaggtattcaagaattgctgataactacaattctttggatgaagtgagtataataatatgcattatctatgctctttttttatatatattctctggatgtgtgttaaatatttaaaaattgctgatagtttgctttagtaggtaacattttgatatcttttgttttgataagaaatagaattacctttttttttagtttattttcaagtggtaatggattgggtggagtaggaaagtatgaattttttctactaaaaaattgtaatggggtcttagtgattggttgataatatgcacatgggcttatatgtaagtattttctaatgggctgaatgctgatgcttgctcaatgatttgacgcgaaagcgagtcttcttgtcttgatgaaacagttgctataaagtgaagtttatttcttttttgcaggtgactgcggctcttgccaatgctggcctcgagtcttccaatcttattgttggtattgattttacgaagagcaatgagtggacaggttagtctggaacttatcaaatacattaagtatgttttatgatgccttgtacttgtttggggacatgctgagttttgttttgtggataataggtgcgaagtcgttcaacagaaaaagcttgcatcacattggagatactttgaatccctatgaacaagcaatatccattattgggaaaaccttggctgcatttgatgaagataacatgattccttgttttgggtttggagatggtaattttaaaccacttctttgctctgttatgtcctttaagacttctttttttgaaatttctttagagttataaccttgttttgtttggcagcatctacgcatgatcgggatgtgtttagcttttatcctgatgagaggttttgcaacggctttgaggaagtcttgagtcgatacagagaagttgttccccatctaaaacttgcaggttcgatcattactcttttacttcagtatcaggttgtcatttatttaaatacctataacattttaccaaacctctgtaacacgcttttcctatcattttacaacaggccctacttcatttgcaccagtagttgagatggccatgaccattgtagagcagagtggtggccaataccatgttctagtgataatcgcagatggccaggtaatctttctccatgtggatatgttagtctgcttgtacaaatatgacattgacaagacatgtttagaaaacagtctgatgctaacagtgtcttttaacattggtttgttaggtgactagaagtgttaataccgagcacggccagctaagtccccaggagcggaagactgttgaagccattgttgaagctaggtgtgtatggttgatttgatgttgcatcatgattattgattgcatcggttttctgattggctttctcattgcagcaaattccctctttcaataattttagtcggtgttggagatggtccatgggacatgatgaaggaattcgatgataatatccctgctcgggcctttgataattttcaggtgtgtgctctgaattcttcattttatgtttgcaacttctgcatataatcaaaaggcgcattatgacgacactatttcctttttcttttatgttttttcagtttgtgaacttcacggaaataatgtcgaagaaagttcccccattacgaaaagagactgaatttgctctgtcagcattaatggaaattcctgctcagtataaagcaacaatggatctcaacttattggggtaactgttttctctctgttttacttcatattctttcatcatacaattttaatagattttgattcatcactatttcgtcttccaggaatctacagggtagatcaccccaaagggttcctctccctcctcctgtatatggcgcgtcatcttttcctagctctaaaccctcttatgctagcttcagcaagcctactgtgcctagtgttccatcttatcctgtagaaagcacctcctccgtcagctcggctccccctgctcccagtacaacttatgataaccaggtgcgttgaatcttgaaactttctataaggatcatatgaactcttaatcttaacaagtaaactacaaacaatattcaaagccaaaccttatgatgatttgatatgtttaaacttgttttaattctgttgaaagaaccaacctttggttagtcttgagttatctttacatgtttttcttgaacaggtttgccccatctgcttaactgatccaaaggacatggccttcggttgtgggcatcaggtacacacacacacactcactatggtttattttcatttgtataatctcgaagaagatgagtgattggaaatactaactttgttgtgtgaacattcagacgtgttgcgaatgcggaaaagatcttgagacatgcccaatatgtcgaagcacgatcagtacaagaataaaactctactaagcagctgctgcttctgtctgacctgagtcgagcttcttttccttgcccaactggattggtgttttagtctattttctagtaccaacattcttttaattctttatttaaattttgttcagaatgttatgttagtattaggtaaggttgtcattgtacaaaggtgtttgctctgtgttcaattggttttttcacactacaagttttttattgttgatatgatatgtgacttgatcatggaaagaagaagaagaagggtacatacaagctaatgctaaaattccatttatgttaaaacgagtcttgttgataatgtcacttttgaattactacaatttaacatcttctttattctaagtatgaatgaatgaactcacaagtcacaacttagtctcatggttggttgggatactcatactttacttgcatatttgccaatgtggaatgtgaattaatagatttttgacatgattacattaccaatgtaaaggacaccatgttgggtactgcaactgcaagattggcctctatttgcttctgatcatgatcatgaaaaattcaatgccattgaattaaaaatgggtgaatattatcttgaagttttgcataagttactgattagattttttgtcttgataaatgataatttaaattttatattttttaaaatggtataaaataatactttgtattaaactatttatatatttttttgcaactcttcatgttaaaaactgtctttaaattgtttatattaaaaaaaatgattaaaattgaactcaaggtattattttagaatttttttaacaaaatagagggataactttgataaaatataagatctaaaatagtatctactcattacaaatagaatggtagttaatagttataatcaagatttactctttgctcaattgctcttctattaatgttactgtatacaagtatataaaaccatatgattgatcattcatattgagacttttatagagtaggataggattttggtactaatcttgttttgcttatacagaatcagaacaactttgatcaatctatttctcatttatggtgtaggtttggccacttatggttgggttgggactttaattaggatttattaataataatctcagcttcctttgtagactacagacaaaataaataaccttaatacactagatctttttgtattataaataaatctaaaacaaaaataggtgtaactgtatttgtgggcagaaagagttattgtctaatggagttggttgtgtatatttatgtatataatcacacaaggacagtacgtacgtagctctatttattttgacttgaggtagttttcttactaatttagaacattataatataaacaccattattggtcctttgaagaggttagactagatcaaatgaaaactggttggtagtagtacacttgagtttatttttatatatagatataagggggtcaaacacaaatcaatatatcatctattttttcacttcacaagcaaaagtttttgagagagacccaacacaacactataatat

SEQ ID NO: 17677 - DNA, 4266 bp, Cannabis sativa
ggggatatgattttgagacctatgtaaaacgattagtacaaatatgttatgtttatgaatctatgaccactttttttttaccttcacttttcctataaaattgtaaacaacgtgtacaattgaaaaagcaaatacaataattgtcaaaaataaaaaatacagtaaatattttctcattaaattttgttacaccattttatttctctaacatttttctttgaatttttgagatggagaggaagaatatttcctggctaaaaaagtttcaatcgttttttgaatttgcaaaacgtttctggattttattttaccagtaaaaaattcaatctttagtatgagttatttttgtatgaacagcaaaggtttgttttttatgaataaaaaaatatcttctttgatttaaagagtaaaattaaactccttggacagttggaccttaccataaggattaaaggctttatgtgcctccaacgacaaaaccaaaccattctttctcccccactccttatcctctttccctctctctcttctttctctctctaaacatgccttctgcaaccaatgcattatccatggccgaaagctgtttagcttcagttcccaccctctttaccccaaaaaaccaatacccatttcacccaattccctcaaaatccataaagctctcatctttaccttctctcccttcatgggcatctctaaaacacaagtctttaccttccagactagtcccactgcttgtggctcagacctcagactgggctcaaggagaggagaaagaaagtgaagaaggcgaagatggtgccacttgggaaaatcaaggtgatttgccttggactggtcaagatagtgagacagagcaggaagaaagctctggtgtgcaagccttttctgatggtgttgatgaggttaaagatggaggagaggaagaagcttcttctggggatgacagcttgttgggtggtggtggtggtgaattctaccctgacccacctgaagaggccaagctttatgtaggtaatttgccttttgatgttgatagtgagaaacttgctgacctctttaaccaagctgggattgttgaaattgctgaggtaaagttcttattttttttctttgatataattgggttatgttttaatttgaagtatggaaattgtgtgtttctgattggtatttttgtgttgttattaggtaatttacaatagagaaacagatcaaagtagagggtttggttttgttacaatgagtactgttgaagaagctgagaaagctgtggagcagtttcaccaatatgtgagttttgtgttgctttgttaccaattcttagactctatttttcaataagtagaattatttcaattcccacttgcattgttttataatgctaaaataaattgcactgttatgattcattgcttcttattttataatccttactccatttgtctagaactgaaactacttcaattcctacttgcatcgtttgtacttatctgtaaacatagcttacaatgttatgaatcattgttttttattttgtagccacttaccaatccttacttcaatttccacttgcattgtttgtaagatttatctgtaaaacataacttacattgttatgattcattgttgcttattatgtaacctcttaccaatccttactttttgtctagaagtgaaattacttcaattccaacttgcattgtttcgtaacagttatcagttttttttattattattattttgtaaccacttttactgaagtaaccatgtatctgtcaaggcttttatataggggccatgtctcagtgttttaagcgttccatatgttgtgcaaacaggatttaagtgggagacttttgactgtaaacaaggccgctccaagagggactcggccagaaagaacaagagtgaacgaatcttctttcagaatctatgtcggtaacctgccatggcaagtggatgatgttcgtttggagcaagttttcagtgaacatggaaaggtggtaaatgcaagagtagtatacgaccgtgaaacaggacgttcacgtggcttcggctttgtcacaatgtcaactgagatagaagtgaacgatgccattgctgctcttgatggacaggtgaagatttcatctgggcttttattgaaaacttactctgttaacatttgagttcatataagataaaaccaaaaccgagtcgtgtctctatagcatttctttgcctgatttactttctatgtggttttcagagtttggatggcagatcaatcagagtaaatgttgctgaacagaggccgaggcgcacctcgttttcatattaaaaagattgttgatccaggattcatatgaactctgcgaattgaattaagagaaagagagagagagaggttctacatttttctacctatttgattgttgttctagtaactggaaagcttgatgtagagggatgaaaatctcttctgtttagtttccaaaacctgcataaggttgttgatgaggctagccataattaaatcccatatatttttctttcattgttatagtttaatccctcaaatgcagccaactttttcattatgtacttgtactactcatctttcatggatggtatgctttttttataattaattgttaaccaaacttttttattgtcttctttgtgagtaaaattaataattatttcttttgttaacactgtgcatttgttactatatatatatttatgaagttaagattcagtctttcctatatttaaaactttactgcatttggaatgaagtcaaattctagtgtaagtttatcatcattttgttggtatttgaacttggtcatttttttctattattaaaatagtaaagaaatgaggaagagcattttgcccaatactaattggggtataaatggtatgagttttaaaatgtttaggcaccttagaatctaatagcaatgctcaaaatagtatttttatgttactttgacttatcaatgcagtgtcttataacttttcttactgaagatataaatttgttcaattcatttgctgtgacaataaaaaaaacagaatcagactgaattgaaacatccctgttaaaatttcactctaagtgaaaattgtactttacaatagaagatatgaacttgtgataacctttatccaaaaatctgtacagcgcaaagcatgactgccaagcacatatgaaaagtcatcagaagtctatacactaaactcagtaggtacttcccaaaataatgtactcttttggcttgtgttcaagccaaaaatcatcaaaactatagactcatttttctaacttcactattcctaaaaaaaatgttggcactaccacccaaccaaagcttagttctaagtcttttacaattagtaactattttcatcggttttcgtagcgacgtgcaatgctgatatctactgcgagagcaacctagctttctcaactgcttgaacatagtaatacaatctccaaagtgttatgttactctgcaaaagcaagatacaactaagaattaaaatctaggtaattcattaaatgtatccatgtgctctcttttctcttcctttacctccttttcaagatctactttaatttcatcagcaggttttttctctgcatgttctacaagctccacaacacggtcaagatttttaggtggcaaccccttaatcatcttttgaagttgtttcttctcaggaatggtcattggcctgcacatcacagctaaattcacatgacggactgtaatgatagaaagcgttctgtttaagctgcagattttgatacaaatattttttaatcacaatgatgtgtaattgatctcaactatatagttaaaagtgaagtagttccactatggtttggaaaagcagtatcgggaactcaggcgttttcccttagccccacaaggtgtaagcattgaggtgtatcaagacgcacgcctcaattcagaaagaggttccatttcaaacggaaaatggtaaaagttctaagcatataaagaagaaatatagacatatgtatagagagagagggagatgaggagggctatgcaatcgtggagagatggagagtgttgtcgtgtaagagggttttagggttatgttttcctatctttgctatgaaaatttgtttaaaaaagaccaaaataaagtccatcatagtcatttaaaagtctgaaaattgcaaggagaaaagcttgtaagaaaaagcccagttaccccccaaaagaaaaaaaaaaaaaa

SEQ ID NO: 17678 - DNA, 2271 bp, Cannabis sativa
accggagccactgcgccccaaaagtagattgtcgtcgttgagttgttgccttcaattccaaactgtaaggcttttcatgaaggtgtagcggcttttcataaattatgttacttaaaattacttaaaactacataaaaatccgtttatattggatttacaaatttaacattaataaattatcacatcttatttttttagaggcgtattaattaagttatcaattcaaattgtgtccccctcccccaaaaaaatcatgtgattatatttaaaaataaaactatatttttgaaagattatataaaatacttgagaagtacaaagaaaattgcactatatatttatatttgttaatcaaattaaaataaaataaaacacaagatctaaacttgaaaacttaaacaagtaattgagaattgaattacaagaattggcaaaaataaatgaataatcaaaattaagaacatgggcaataattgctgaaagtagttttccattaattccaagtatttgacttgtgtactgtgtttgtttaccgagaaaatgtgtattattttaatgagaaagagttcagatttatattcctcgaatctcaatggaagaactctttgatctttctttttctgctccttataatttcccagtcagtttggtcacttaattacttgtttttaatttatttttaatctcatatataaagtcccaattatttgattttaatttattgtatgagttgttttatgtgcttaataaaatatagtaatatatagagtagctttaattgttatcatgtgcatgcattggtttataattattgacacttgtagattctatataaatatatgtgattatataaaaatgtatatacatatttttgtctgtactctttagagtgcaatatatatatatatatatatagctttgtatctgctgtgatttttcattattttttcataataaaaaataatgttgtcataataattataataataatcaattaggggcttttatatggtgtgagtgtgcttttttgcttagggagcttctccattttggtatttgaataaattttaatttttgtatatatgtatataaattttattttgctcttaattttttattaaaaaaaaaatacaaatataaacacttataatcttttaaactaaaactttgaggaccaactaattggaaaaaaaaaaaaaaaacagtagaaaaaaaatggtaaattttaatgaccaatagccctaaacatagttgttttaatgttaatttatttccaacactagtatttttagcttgatgataatggttgtaataaaatttgtatttggtagtttggtcaaaagatttatgaccatcttttaatattaatattcaaaaatttatatatatatatatataaatatatatctttttttttaaaaaaaagagagatcaaaattcataattagaagaaaaatgagagtctaaagagatttagagtcaaaacatttgaaacaattacttaattagcactgatgacctaactgtgtaatctaagtcttctactaaagaatttctcttaaggctttatttataaatttgatagattatatatgactacatgaaagatatattacacatttagacaaattcaaacaaattcatataagaaaggggaaataatatttgttcacatataattaacatcataataattatcaaaattgccttatactactagtctttgaaattgaaacattgcatgttcataattaattcatcttcaactatgcacaatacttttgtataatatatattatatattaaatacatttatggtaccactaccacacacacattatatccaacatcaacatcatagccaactaacacaacatctttttcttacattataaattctaaaaatagaaaatgtatacaatttgcatttgaaaataacattccaacacttcataaaatctagcattattagattattagaggaagaaaatagcatcattagaaaaaaagaaaagaaagtacaataaatgaattccaatgaaagaattatgaaaatgtttcctacctcacaaatagggatggagatgaggtaggaaatgtctctcctatccccatacccgctcccatttaaaccctcttatttgcctcactgagtcacaaatgagggtggtactcggaattttcatcaaggttaaaaatctcaataaaaactcatttattcataaaaaaccataaataaagattatcacacattcaaaatatacacactat

SEQ ID NO: 17679 - DNA, 2247 bp, Cannabis sativa
ctaagctcatcgatattctttcctttattgggaaattgtggcctttggatacttgtttatatttaattactttaaatatgtaacgaggcctttaggatgctcgttagatatttatctttcaaaggataaatggaagaaaaataaatgagagacagaacgaagtatctaacttttcatccatctctttctagtttatttacctaaaattcttctatatgtaacatatactacttgacgcgattatatatgacttaactaatatgtcttccgtttcacaggatcgaaggagcagactccaaaagttgtaggtaatactttcatgattgtatatatcaattctacatcacatcactgctttgtgtcttaataaagaaaaaaaaaaatatctgagcaatctttctgtttcaactgcaggcctttcaatagctggtgcatgcatccttgggatatttattggaggttttgcttattacttcatacaaagaaggaagagacaaggggctataaccaagagcaaagacatttccgaaaccccatcaagcaagaaccttataaattcctcaactaatttctctcgaagcacccccactgattcttattccttctctaaatctgacattgaaaagggcagtacgtacttcggaactcaggtctttagttacactgaactggaggaagccactgataactttgacccttccaaagaacttggagaaggaggctttggcactgtttactatggtatttaagatataacactcaataagcccaatgcctgcctacttttgaataataattattatccaaaatactaattgtaattattattttaaatattaattggtaactgcatttttttttctctctttttttttttttttttttgtaataatcttgtagagtttttcaatttttacaggaaagctcggtgatggccgtgaggttgcggtaaagcgcctttatgaaaacaatttcaagcgtgtagagcagttcatgaatgaagttgagatcctgactcgtttagaacacaagaaccttgtgaagttgtacggatgcacttcaagacgaagcagagaactcctcttggtttacgaatttatcccaaatggtacagttgctgatcatcttcatgggaaacaatcaacatctagtgtgatgagttggccagttcggcttagcgtagccatagagacagccgatgctctagcctacctccatcgctcagacattatacaccgcgatgttaaaaccaacaacattctcctcgacaacgaattccgagtgaaagtggccgattttggtctctcaagattgttccccactgatgtgactcatgtctcaactgctccacaaggtactcctggctatgtagaccctgaatactaccaatgctaccaactaacagacaagagtgatgtctatagctttggagttgtgttggctgagcttatttcatcattacaagcagtggacaccaaccgacacaggcatgatatcaatttggctagcatggctattacaaggattcaaaatcatgcagtgaatgagttgattgatccttcactcgggttcgacaaagacttcaccgtaaggaaaatgacaacagcagtggcagaattggcctttcggtgtttgcagcaggacaaagatatgaggccatccatggatgaagtggtggctgctctgaaagcaatcaagaatgaagcgtttgtaatacaaagggcagaagttgtggacattagatctgatgatatcgggcttttgaagaacttgcctcccccgctttcaccagattcggttggtaatgacaaatatggtagcaactctacaacaccaaattcctattaagatttccatcggtaatgcctttctttcttttattttctttttaaaatttctctgtgggtgggcttcaatcagtagtagattgtaaaagtattgtatattataatcacagatcagatgtcctttcactatattggtctagataagcttcgttgtcttctggttgttattaagttttgttcactagttggttgtgcaaatgaagtagtgtatatagtaaatatagcttccagatatttcttcttgtatttgctttttattcatgcacgagctttggcattggacaatgtatacggaataaattttaggctgattaggatttttgcacttttatatgtatcaaatcattctccctgaactttgaaggtcattgaaaatgtcccctaaactattgagattgtt

SEQ ID NO: 17680 - DNA, 3850 bp, Cannabis sativa
aataaaaagatatttgcagcataacataatataataactgtaaattataaaaaaaaaaaaaaatcaaaaaaatatttattaattagtataatgcgcagttatgttgcctagttttacataaaatattgcaagctattttcgatatcacaaattctctttagtgaagtcgtcgctgaggtggagaaatttatcccaataacattaactaatcttttatctgttgtaacagttcttaaataaacacttgcactgtagtctgaattctcaactggttttattgttttgttggattgtaacttctctcaattctcagtccttttccaagtacaatattttgcagatatttctctggaggatggaattgacatgctataatatctttatgacacatacaaataaaatgaaatttgacaaaatatttaacctacgcgaagaatttgcacaaatgtaaagttgtgactgaaaactttgaaaccttggattctacccttaattcaatcttcatccacgccatttattttaggccagtcttgatttgcttgtaatttgacaaactcggctaacagtttgatttcttcatcctttaaacgagctccaaatgtacattgacccctaggcgtgcaattttctccaaaaccctgcaaattatataaaaattacctttatgacttcttgctggtaatacattttgtcagagtaactgaatcttaaatttgattattttcaaagaaaaaagagcaaaaattaccggcattctccccttcccgtaatatgtaacacggtaaatttcatcttctgagtctattccatttctgtgaaacaaaaaggttaaagagtaattttagtactatcagaattttctgtcacaccaaaactgcagtgacaaccctgaacaaaatatttatgttaaaatttcatcaattcaaaacaattacagagataatcaaactgctagttttgtattccatgttcactaacagatatcagaattttactggggtgtgaatggaaatgactgagagcgatcccagttacctttgtaggtctttcaagaagagtgttgcaccctgcgcacaagaagaaatatcttagaatgagtagaatgttggaaaaagaaagctagctctcaatagtgctcaccggttggattatgtttccacctccagtatgacatccaatgcaagcgttgcgaaacaacgtagctcctctttgtacatcaatcgtttgtcctagtgaatctgcacaacaaaagcagctaaagaccaagtaaaacataaatctattttgctgtaggaaaaaaaaaaagactagtgatatgtcagttgtgtttagggcaatctataatcagaaatgccaaacaatcattatcctagagagcaatacataattatcacggtagcttatattgtcatagaagaaagcagatgaattatcgatagggcacagctcaaaatttacttgtaaaaaatatgttatggttgccagtatgtgagactattgtcaatgagctatcctctctgctaatgatttacatagaaaaagtattcatacataagaaaactaaccaaaaacaaagacaaaaatgttaggaatgaaaggaaccagacaagtgttagcatgttatgaaacctcacaatcctagaccaaaaatgattgcttggggagaaaatttaacagaaccatgataggggttaccagcaacactaaaagtatcgaaggctctaaacatagcataccagtgttaaagagtctacatcgataatgtgtgtaaactaaataccataaataacatcatatcataggctactcatctcaatcaattaattttgagatagaacccttacaccttaccatatagtcacctaatcctaatttattttacttcggttaaactaatagattttattttggagtttttaaaggtggtggtcaaaattgatattagacaaaataaatgggtagaaaattgtataacccaaaactcattatattctttgtaaaaaaaaaaaaaaaagaatttgtatctcttagaaggtgggctttgataaagaaaggaaaatctagaagaaaaatcctgatggtgattaacgacaactacactcaagtagaacagtgctagaaatggcaagattgacctggattaaccaccaatgattgttaagttatcactaaaaaatgttaaaccagtggcagtgacattcaattggcatgaaaacattataagttgttttcttctgtccatgtaacattctatgtaggactacatatatgaattacaaagctgaagatagcagccataaggttttttttttctttcttttaaagtgtgctagtcataaaatctggataaatttcttcaaaaagatagattaaattagccctttcaggtatgaatacgagcaaaaagcgtacagtatgtatacattaaaaaaaaaagtgggttacggtacctggcgcattaaccattggagagaaagctaggaaagcagccattaaaggtggagctaaactcttgagaaacttaactttatcatgacatttaggaacggaaactggatttggctcctttcccacattaaaattcgaagaaattcaaattatagtccaagagagatgaagtgatggagagaggaatagagagataccttggggagacagcagaggcccttaagagaattggacgtgacgtgcagaagctgcatcactctttcccttcccactctcagactggaaacgataagacctgacggggggctataaagtataaagggcctctgttgtcttcccagggatatatgtgaaatttataaatttaattatattatacaataattttattacattatataattaataaattaaatataaattaataattatataataaattttcttataaaactatatattaaattaataattaataatattatacatataaaatataataataatatttgtacataatatcacattttgttatagttttattttcttaaaacacatttctaaagaaagatttcatttaatatacttaaaaaaatcaatttcaaaaaatactctcttaaatattttatataatactattctattaactttctactttacccgaatatctttactatttattttttttcaaaacctacaagaacctaaaaaaatccaatctctctctacagccccaacagcaggcccccataccttctagcccccttcgcccccccgagcaaagaacgaccaccgtccgaccccacttcgcccacccgcgcaaagaacaaaggacccattcgcacgaaggtcccatccgtccaagattctccatccttctccttcgaaaatctttcttcgtccttcgctaatccttctccttgtacaaaagactcgtccacccacgcgaaggacccctccaagcccgttccttcaccgtcagagcctgtctcccgtccgattcgcctctcatctcattggattcgtctcattctttaaaaagattgttcaaaaaaagaaagattgtggttgattcacagcgattatatattatttgtgttgaaatacacttcattttgatgaatttttcttaatttgtggtcgattttatatggtggttatgttgtgttccgatctagtatggtggtggttgaggaataaaaatgatatgttctcgattatttatcgaaagattctcaataggttatcgataagatttagcttttggtgatggtcatcaaggttagttgttgtcgacaggttctctattaataaaggattgaaaaaaaaatgtaattttgttttttaattgattatggcatgaatatcgattgattatcgataagggtgatagtcattatgt

SEQ ID NO: 17681 - DNA, 8750 bp, Cannabis sativa
  modified_base (8698)..(8723): a, c, t, g, unknown or other
ttggagtaaaaccctagatgctgtaagagtaaaggatcatccacaagggcaaagtatttagttgcccaaatttcggttattccctaataagggttactccccgaagtgagatatttcattgttggagtaaaaccctagatgatgtcagagtaaaggatcgtcaacaagggcaagagtatttatttgcccgaatttcggttattccctaataagggctactccccagagtgagatatttcattgttggagtaaaaccctagatgctgtcagagtagaggatcgtcaacaagggcaagagtatttagatgcctaaatttcggttattccctgataagggttactcccagagtgagacatttcattgttggagtaaaaccctagatgctgttggagtaaaggatcatcaacaagggcaagagcatttagttctgcccaactttcggtttcataaaacgaaacggatgaagcaacttatgaacatgattatgaaccctaagcatggatttatctcatgtattctgatcatgttaacaataaaaaagactggttttttttccaatatttgtaacaagaacacaatcatttccatgaacaaacctcacttaataaatttgtttaaactcatgaacatcatcatcatcatcatcatcttaataatcactatatcaaacccatctttgtttcaaagaaagcattgaatctcaaaacaaaaattaggttaagaaaagaaaaagaacaaacaaacaaacttctgaatttcctttactcaaaagcaaaatttcaaagcttaacaatctcacaaaacctaatgtacaaataaactcacttcactatttcattcaaccaataatccaaaatccccacaatatacttatcaaattaaattcaatcaacaaaagattcaagctttttcttctaaacaaccaaacagaatcaaataatcaaacatcggaattgaaattagaagaagaaatgagcttaccatcgcctttggtctgtgaagatccagcacaacccatttccagatgaagaagaaaaatctcaaagcttttcactttctgagtaaccaaacacaaaaaagaaaatctccggtgagattctctgcaaattttccggtcagttttaagcttaaaaatttaaactttaaattaaaaattgaatttttatttattaattttttttttttttaaaaaaaaaaccaaagaaatttaaaaaaaaaaccaaagaaagataaaaaaaaaaccaaagaaagaaacagcaaagacccaaaaaagaaacagcaaagacccaaaaatggggaaattagattcttcttcttcttattcctttttttatttatttatttaattaattaattatttttctatttttgtttattattttagtaatcattgttcaattatgctaaactttttatttatttatttatttatttattctgcttttaaaatttaattattgggaaaagaaagagaaagtagtaatagtagttggctgtcatgttcttgagggttggtcttttttattttctttaatttgaaaaataaaaatataccattttaatcttatctagttagctaaataccaaaattgatatttttatttgtctataaaaagtgtataaaaattaactatatatattatggttgattttttatttattttataaagtagaaagttgttcttataattctctaaaataatggttagttagttattaatttatataaatacttacccaaaatgatattttgtatattaatttttgttgtatttatatatttgtttaacaaaattggaatgagaaaatgaacaaatataaaatgttgattatatgttataacaaattattaaaattagatggccaatgttttctatgggtaggagaattatttaagtaataattacaatagtaattattattttttttatttagaagaatacttcaagtaaattaaataataaataaataaaaaaatcaatggttggagatttgatgtacctttctttagtagataaaaattattaataacaaaaattaattaattggccactatccaattttaccataataattacataatttattattattattatttagtgaaaatgagcaactttgcatttattatataacctaaaataaatctttaaataataacaagacaatgcataattggacataaaagttgtgtggttggatggtgtttgcccacaaattttctttctttattatcattatatttaaaaaaataacaacatgaaattattttttttcaataggataatatagtaaaaattaaaataacagtataaatacttaaatttaattttttaatgcagataactattaaagtttaatttttatagtaataatatttaagttatatttttaaaactttcgtaaataatgtgaaatgtcgaactaatgactatgtgacaatctgattggttaaaatcattaaatttttatttaaaaatactaataaaaaatattacttagataatgacttgacacttaatatttaagtacaaaatttcaaaaatataacttagtattattgttgttaaatttatctgcaatcgagatttaaatttaagtatttatgtcgtaaattaattatttaaagaataataatacgataatattttattagaagaaaaaaatattagtaaaattaactatatattttaaaaataaactaaaaaaaaaatgtatgtgagagagggagagcaagatacccgtgatagagacatatacatgtcatatatatatatatatacaccaaccaccaaagattaatataaacatgaatgaacttcactttttttgtccaaaaatcattatccttacccaaaaatgattttgacatatcaactcaaaaaaaaaaaattaaaaatcaaatatggatatgatagaacaagaaaattatgacaatgaagaagcaaagttgccctttttgttatctactttttacaatcataaatgaaaatgacttcatcatcaactaaaacaaaaactcattttttaatcatccacccactttgttaatacttatctctaacaacatttgctttaccctctaatttgttaaaggtttgatctttgcaatgtttttggtaaagaaaaggaaaaaattagaattgaagaaaagaaaattagtagaaaaatacttattttacaaataaattcatatataattaaacgctttgttattgagtttaattgtcaagttttaatcaatcttttccgtaataatttttcatcttatatatttcctttttaatcttattattctgatggcaaaaaactctttctttttgtcaaacgatctgtaaataagacagtcaattatttaactcaatcaacttatttatcctcaaatcgtaattatagtagaaggcatgttcctactaatttgcaaactattcttgtcgctaatttgcaataataaaatttacaaatttttctaaatatgtatatgaaaaataaaaaagatgactttattctcttcatttccatttcttgccaaacaagtatggaaaaaaagaagtgattttcctatttatatttgtttagcgatatctttatgtacctaaaaacttccatttaccaaaaaagtacagaagaaaagtgattttctttcttcttactttccctccaactttctctactctctaccaaacacagccttaatcttttgctttaagaaatttcaattcaacccattcaagcaaaaatcatacaaaagagaagaacttcagtacattttgagcttaccaacaacttttagtacataaaaatggctttcaatcttctacaacaacatggtcaaaagcttctctcaacaactaaaatcatcagttaattgttgttgatttttcaatcctatcagtatttcttttttttctttttctttctaaaacatacatcattagttacagacagacagattttaaagaacttgatcttcggaaaagctcgaaaatgaatggcatttttcgaaaatccaatccaacatagctgtagagttactcaaaatcggaaggaaccatcaggtgcataccttgccctcatgttgtaatgatcgaatttcgggttgtcataattcaccggcttaacctcagaagcaggtttcggctctccaaaaactacctcgccactcttctcacgctgctgacgatgtcttgttctttccttttggctcttagaccttccactaggaggcggggccacttcacccgaaccataaaattcagcatactcctgtcttttcgaggatcggtgtttgcttgacaatgatggatccttaaaactgctcgatttaatcttagcgggcttcaaatctgaatacttattattatcacttacattgggtggtgcatggacatggcgagtttcggtaataggcacaggagcactttgtctctgcatagatggaggaggaggcttgactatgtcttcgggcatcttgagagtatctttcaatggcgtgaggcctttcttagcgccattaatggatctcaaacgagagggaacaaagtaaagaaacaatccacccaacatttcaagcccgagcttcgatagatcaatgatgagttgtccaaaagatggccatcccggttcatctttcgtgccttccatgacgggaatgagtttctcctcgcttggtttcccgttaatatcattctctaatggctgctgaaacattaaattgcattagatgaacctatttgctagcgaaaaattaaccatacttaaagagagttcggtgggatggttaaggtaccattttcgggaagaaagatggtccgaatccctgctgaagcaagcatgtagcgtatcctaccaagacagcaccgataaccataagaacatctgcccaaaaaccaaaatcgatagtcagataaaagaccccttcactaagcaatcaaactgtcattaaaaagaataatacagaaatggacaagcctacagattcatctaactgttagcaggttgcttcattgacgataattcgataaaacagctgtaatgaaagaaggcatttttgcttatattgatagagcccaaagaaggcattaccgatattgatagagctcgagagttagtatcaagaaaagcttttaggctgatttttgctaccttgaactttttttccagcagacaaacaaacacaaggaaaatgttctttcattggaatgagacactaagcttacaattcacacaactgaaattcatatatttagctcttcgtagcgaatatgctagcaaagtacaattatatttagcaccaattcattatgtgaacctcatagtgattagcaaaaatcttctttgcacatagttcactagtctagtgttttcttcttctttttacgaaatctttagtataagatcgccacgtcactattcttttgctttgaacttccttccgagatcctccatagtgtgcaatcaaaaccgacttaataatcataattaagcctagcaatgaaagaaaggaatgaaccaacataccgtaaacttagctcttagtagcgaatatgctagcaaaatacaataatttatagcatggagtcaccattatatgaacctcatagtgattagcaaagatcttctttgcacatagctcacttgtctagtctagtcttttcttcttcttttctacagaatcttttctgagtatttaagatcgtcgtgtaactataattttgctttaaactaccttccgaggatcctctatggtgttcaatccaaacctacttaataatcaaaataaagcctaacaatgaaagaaagcaatgaaccaacatatcaagtgctttgcattctaaaattggattaaaaagaggatttttttgggggctataaattgtggatgcacggaatttaagaggtgtttgttaaagcacagccaatatcaaaggagaagggtgtgcctaaaaatccagcaaaacaaagaattttcggttttaaaccgaccaaccattgtatcgggattaccaagaagagggacagcttataaggtatacattctaaccagcattgtctcaatttcaagaactacaaaatcttggctctgtggttaattttttattcgattatactaaaggaatgttagctaatgtcacttataaatttatgacaagctaagttgatttccattagaaatgagaaactaagctcgaaatataacaaaaagaaacgaattccattgcagtagataaactaaaacactgaatgagatccaaacctgtgggagaaatcgaactgtattgataatcacaatcctcctcgttgagagagatttgacgcagagcagcatttcctctatcgataactaacaacgaacaagtaggccgaatgtataccacatcaaaatcattcgagaatttggcatcttcactcggtccatctctgtatcccacaacatttgattttcctcccgcaatcgttgtaacacctgccaaagtttccatcatgttatcagttattttaaagagctttcatcagttattgttcaaagtgaagaagaaatttacataccggcatcactgatctttctaatggcgagattcaaagtatcagcaacataaacattccccttatcatccattgtaacacctttgggatgattaaaacgagcatcgctcggttttccatccacatgccctttgtaaccttggaatgacccagcaaccaatcttgccctactatctgcaaccgaaaaaatatcgataagtagaacagtatgaagtaaaatctacactaagctaaatccaaagaaacaaactacattaattttcgaaatctcgctttttcagattccgaaatttataagaacaagtcttcataacacaaccatcatcatcactacaagatcttactaatgctaacataaatgaatagagattatataagtatgaagtaaaatctacactaagctaaatccaaggaagcaaactacattcattttcgaaatcaatctttttcagaacaaaacatcatcaccatcataagtaagagttacattacattgggacaatggtggagtgatcttgacaacattgctattaacagaatcaacagcaaacaattcaccatcttccgaaacccgaattctgtaaggttcaactccaatatcattcccttgaagaacagtttcaactaagtacccatcttcaaactgaagaaaattcccatctgtaaaaaaatgtctaaaactttatgaaaattaccaaacaaagtgaaatgaatgaacagtaattagctcaactcaaatttacctgattgggttgttttagaggatgacctggtccatttaacaagagtagacaaatgctttatcaatggccctgaaattgttatataaatacataaatatagaatatacccattacgaaaacagatcagaaaaagctgaaattaaaagggtttgtccttttgatgattaaaaacataatgagaataacaaattaagcaagattcaagtgaaaccctcaaatgggtattattatactacaaaacccaacatacccattaagaaaaagagatcaaagattcaaactttggaatatgaaaaaagttataaaaagcttaccagctggagcagcatcaacaagagattgaaagtgaagagtgtaagcaaaaacaagtgttgtgagagccaacaagaaaagggaacttctcatagctctctttctctctctttataatttaaactctagaaaatggaaagagaaatagaaagaagaaagatcaaaagggttgagagtgaaaatgataatgatgatgaaagtgagtttcttctctgattttggttgggtttttcatcaaagtggtgaatgaatgggagaaggctttgtttgtgttcttagcttagctcaccaccatcaaactctagtggaacagaactcacttcactgcaattttcacacatcttttttgttggaaatataaaataaaaaatacttttttatttctactttactcttgttttttaaaaaaaataaaaaaataaattaataataataataaaattaaaagagtttttttagaaaggaaatgacttttgaaaaaataaaataggaggatgaaatatatactaaaataaattaggactcttttcattcctttttcttttcaattttgacactttcatctttacttttttagtcacttttttaaagataatactttcactcacttttgatctctctttccatggggtaattaaaaactaaaaatagtatatggataatatttaagatggaataaatagattttttgtcattttattagtgttataaatttgtgtgtaccttttgaagggtaagttcagcaccatacatacctaggtccaataattttgtatcgtgttttatttggatcaacatattaagactctaattcgtatattatttccataatttttttttacactaagtatatgtactttttgtagcttcaattaattttatataatttttaataattttttgtatacaatcaaataaaaaaaaaaaatcatagacattatacttaaatttttaagtcacactctataaatatatttatatataattttagtttgactaattagtaattttcccctccgaactttgacatatttcaaatcatgctctctgaattttgttggccgttaaaattccctttgaactattgagattgttnnnnnnnnnnnnnnnnnnnnnnnnnnattcaattttactgtttcagtgattgt

SEQ ID NO: 17682 - DNA, 1645 bp, Cannabis sativa
ttaattgactatatcggattatttttgttacggtagaagatgatggaagtctcgaattttagacttatacgtgagcctacatgtcaagccttaaaattgaaacacaaaatctattaagagggcatattacacgtgggttaacaattaaaattaatggaacaaaccttatgataaacatataaatcaaaccaccaaatttaaaatcaaccgctataaaaatattctttatgtaagagcaaaattgatattcttagatagatttgtatcatctcttttgttcccctagagactatatttggagaccaaattgctaaatcttcttgagccagctgtgtacctttttttccactctaattaaaggaaaggccctcttcatctgatggttctaatgcttgccaatcagaatttttgattaccaaaaactttaaccaccaccagtaaactttatatgattttttagtactcaaatatgatgtaattcattccaagtaatagttccatgccaattttgagatattatagtaaatatcttggcgacgtaaacaaagccaatggtaactcagttaatagcatatttagttcctttcaaagattgatgctattccactctcgtttataccatactagattggtatatctctatctacctatctaaataatggcagctaaaactttcataagcaaagcatcgggtgctctgtccttcagtacaagtgatcatgtcagttattctgctcacctgaaaaacagccattcccctcttatcgtcactgtaacttgtgattccaaacccctttgtcacaactgagcaaaacccactataaatatgttatgttggaaatgaataaagtaacccaagccagtgtcatatatagtttttaacccttaaaactatctgttttttctcttcccttctagttaaaacagtttcaatttcagtagttatggcaagcatgaaggctgaaaaaccagttggcactcagctctttggccaagccaagaaggagcctgtcaaggctggtgagagttcagcaaaggctacggctttaaagccgggttccttaaagccgggttccttaaagccgagtttaaagaaagctgctgcacaaaagcctcaggaaaccaagaagaaggtatcccacaaatcccatttacagaatataaaatacatagatacttttctgcaaaaaaaaaatatacatatatacttgtttaatgatataattacaagaagtaacgaaaatcatgtttgtctatgttttgcttgcagggcaaaggaggcaaaggtagcaaagccacggcaaagtagtaactttacttcattggctgaacatggtttgcaagataaggaagctagaccaatatgtatttatgtttctttaacttgtgtgtttttattctgtcttgaactttcctggtgatcagtgcaactctgtgtatgttatgctgatgaaataaaaataagatttgataatctgggctcaagtataatcctgaaaccattttctttttctttcttgtccatacaagtgtggttatactgaggaaaagattaagaagagcataagagcttttcttttttctttttttgagaatagaagagaagaggtgacacaaaattgaagagaatagctattgccactga

SEQ ID NO: 17683 - DNA, 4259 bp, Cannabis sativa
  modified_base (4194)..(4215): a, c, t, g, unknown or other
aaagtgtaccatttcagcttcaacacgagtcattcgattgacttagaagttagaagagttaaagatcattgtttcatggcaactgtaagaacatttcttatgttggtagctcttgaagttgctatcatttttttgttttagcataatatcatcttatccatttgcttaatctttacacagctcactctttctctcaccaccacaacacttttgaataagactcaacttttgtccacatggttacatacaagattctcctgatatctacaagcaggagataatgataatgatatgagatagtaaccaatctcaagaagttaataaaatcttaaaaatggttaccagatttcgccgcagtttattgcagtactgatccaatatcaggaaggtcaggggccacacagaatcttaaccatctcttcttctcagtgtacttgagacaaggatgcataacaagcccaactatcacagccaagaggcttagcaccataaccttcaaagaagcaagggctaagaccacaaaaatcagcagggttggggggatgcacaacataattgcacctgctgtaccgacggggatcttataaggccgagatgcagctggatatttcatccttaacttgacaaatgctatgaactccattatcattccaaaacagtataaatagttctctgctgctacaatctcttgaaaactcatccacgaaagtaaaatcacaccagatgcggagaatagaattcctataataggagttccatgctgagactttttgccaaagaatgctggaagcatccctcggtatgccatcccctgaagctgataggcatcgctgctcatttcagctacaaacatccccatgtttgacaaagcagatgcagcttggacccaaaatcttaaccatacaccgcctagtattttagcgatttcggagaagtaaccatcagaccagagttcacgatcaaccgggatagctccagttcctaccagaagtggaaatatgtatcctgatacaaccaaaataagagcataaaagagagctcttggaagtgttctgctcgggttgtctacttcccctgctagagtactaattgaatcccagtaattgagattccagaacaaaacattcaagtacaatgcccagttcacattttccatatccaccacaagccaccttgagggctgtattttcggaattgcaataagtcccatgaatatgaaaggaagtagagaaaatgttcctagtaaaatggcaacccaacctactatagttaagcctctatagttcaagtaagtgaaaaatgcagtcaaacacaatatggcaattactctgtataaacctgtttccaactcggggattcctgatttcagatagtctaggaataaaacggggtatagagcattgtcaataaccccactcagccatttcatccaaccttgctggaatccccaataaggacccaatgctgatgaaacccaaacaacatatccaccattttccggaaacatggtcgccatttcagctgttatcaaagcctcaggaacactccaaatgagtgcaaaaaccagaaaaccaacaagggctaagaggggaccagctgcctgaacactgtcctcaactccaaatggaccccctgagacctcatagaagatcaagaatacaagaggcagcattgaaactttatgaattctctctagtttgggagaggacccttctcctaaatgaacgtatacatcactattggaatccattgttgaagaggaagtttgcttagtcaatgcacttctctgcttctgcaagtaaaatcataatttgaaccataacaaatatgatggaatagtagagtaaagaacgtacaaaacaagtacacaccccgtttatcagccatagaaagaaaattacacaaaatgggctctgaaagtgataatcaaacattagttttaacaaatgcaaacacattataacccccactgattctacgcaagctgaagcccatacaaagcaatattaggataccaaaattaggcctaggtgcttatttagcaataaaataacaaagctgaagttcacatatcatgacaaatagctaataagaaaatatttaagctcagattgcttttgtaaaaaaaagtttccaacaacaacaacacaatctaattactatcacaacaagcgaaattgaacgaaaccaaaagttgggtttttccccaaacagcacaaaagaacaaagtaaacatcaatgagagtaaattataaacaaacactcatcatgttcaatcaagattaataaaaatggtacctttgttcttgggtcaaagattaatcaccagaacgaacccaaagattaacacccaagaagcaaaaaacagtaaaaacgaacacagaattgtttcaaggtaagaaattgggaagaaagatagaaaccattaaaagaggaggggagggcgtgagttgcgagatgaagaaggaagaagaggtgatgagtcagagagcgagtggagtgagtttgagaagtagttcaccacgcgtccctccctttcaaaaacgcaattcctccgtgacctgtgactagagttatcgattatcgatccatatttggtttcttctcacttttttttttgcagtaaagtgagagacagcagtgactcttcactcataattggccacgtttttgtaatttgttgttgttgatgtttcgctttgagaaaccacaagaatttaaatgtgttctacagtttcttcaactaattttgtttgcttagtaaaaacgattgtgtattttagtgtaaaaatgtaaaattgacatgatcaaacgagaggcataaatattaaatataatacctagaaaaatgtacaaagaagtggtcatatataacctactagttttatacttttggtttaggttattttattttagggttaggtaaataaaatttttaaaaaatatactgtttttttttttttatatatatataattaggttcggattttgtcaaacttctaatacttaaatatggcccgatttggtatcgggttgaactcgaacttggccttgtaatttttaaaactgatttttttttggatattttgaattcgggttgattgggtttgtcggataattgatttagtacaaatgttttgcccttcaaaaaagagttcgtggtttgaatccacccctatatcaaatgagatattattttttggctaattaagatttttaccccgaaatgttgacatataccaaatcatgcctcctaaacttttaagatcgttaaaattgtcactgaactatgtagattgttggatttaaggaattttgtccaatgttagtaaaaaaatctaacatggatgaaagttcagggggcatgatttagtacttataacagatcgaggggcatgatttagtagatatcaaaattcgaagagcatggtttagtacataagtaattattaaaatagtaaaattgaataaaattagacaaaagcctttaaatctagtaatctcaatagttcatggagaatttttaacattcagaataattcaagaagtatgatttagtacatgttaaaatttaaagggcaaaaatcttaattagccttattttttttagctaaaataaattattatgtatagtacaattaaaaaaaatctgtagtacattcattttaaaaatgtggtttttatatacacttatttgtttttctgtttaggagagcattttagttcttatatttttgtataatcatgtacgttgtacttattaaaaataatatataaatttttagaaaattttaaataatttacaataataaaaatataaaatccaaacaatttaccatccacataaaaaaaactatcataagtataacaatatatatatattttttttgtagagaatgaaacaaaatatttcaaccttaattttattctgaattttaaaaataaaatactaattatcctaaataattataaaaaaaatcaaaataactaaatagatagaaaatatacgagaaaagtctgagtgtattgtagaattatctcaattcttattcttctattttgattacttagtgatggaggtaggatttatacgtgaaaatatatataaatttatatgtgaaaatatatataaatgtgacgtccccgcttcaagtttctgttgggccctaacacccacggactaatggctcttannnnnnnnnnnnnnnnnnnnnntgcttcctggattgatgactgaccctacagaccaacacaagtgt

SEQ ID NO: 17684 - DNA, 5051 bp, Cannabis sativa
aagacttagcaaatattttagattgtacattgcttgatccacgtgtccttattcggttggtccacgtatattgggaaaaatcaggggcaacaataataataaaatatgatagtgtcaataaaataaagatattatttattaaaaaataatttaataataataataagtctttaaaaaaataaatgagcaatattcacttattatgtgaggatattgaagtagagagaatatttaaaactatggagtatgtgtaactattagtaaaagttgtggcctgtagtttcgtaaattagaagataaaaacaaacaaaatatgtagaaaaataaatggcagtttgtataaatgtaaaaattatcaaacatctgtataaatgtaaaaagagtatcagtttaggtagttagtgtaaaaatccctaaagagaaatacactatttcattaaaaagaagaaagtagagtgggaagcttgaaaacggaagagcagagctctggatgagggaggcaaaagacccagatcaaattgagagaattaaaagaaaaattgtgtaaactattgagaataaatttggactagaacttggtataaaagaaattcaaagtcttaatgagccaatattggacatcaacattttagactactgaatttctttttcataatccaaaagctacttccagaacaaagatacaaaagtggaagtgtggaacactggaacgtggtgtctaatagtattgaattaattgagtgtgttagttcatttttcaaatttttttaaaaaaagaaaaaaagtgttagtcctttttccaacccaaaaaaggaggtggagttgttctgtgtagtagatttcaacaatattttcaaaagtcatttaataatgcaagtatttagcattcagatctaatggagtggaaatgtccaagtaacagatttttaagacttaaactacatgtcaaaaaaaaaaaagacttaaactagtttaatgttcttgacaaaaacaattaaagccattaaaagaagcttaggaaagatattgaacgaacttcttggttgcctcttatcaggaagatgagcaattattctaccaattgcttcatttgtccacaaaaagcaaatatttacattccaccaaattcaacttctatcccatcaaaatgtacattgtacacttcggctacagcagtccataatacataatctgtaaaaccttaagaaataacacggctccaaaaggttctccaaagcttattaaaggaattattgacttttgctaatgacatgtgaccagggtctatgctccatcaagatgtttgatagcagcatccaagtgtctttgttgttcttttatagccactttgcatcgcgggacatctagattttttgacaagcatgtggaacatctgaaattcatgatagggtgtgagggagtcttataactagaagtagttcactttgtgacaaaacaagaccactgtgcaaaacaactataaaaaagaaaatgtcattttgccaaacaacccaatcgaaaatcattttcaaaaaatgtgcaatcatcacatgtgatacagagtaatagtaagcttataccagaagagatgcttgttcaatgcaagcacgctcttcttccatcaaaccagttatatggtacttcttctttgctgcacggttatatggtacttaactcagcaatttcttgagttagatcctctgcttcatcttttgtcttcaacttttctctcaactcttcctaatgctcgtgcataattgttctaagtcaaattgggaaaggaaaaaaagatcagcaaaaacttagaaaagaagagatcatacaagtctcaatgaaacgttacaaaatcatgaatacagatcttttgtattaaatgccattttctaaattttaaacttaataccttaagttgtttcagaataagcttgttttcttcagtttggtttaacatagtttccatttcctccccagaagcaattcaagctttgacatcagtgagcttatgacttcttcataggtgcttcaggaataaggtgaaaactttacattacatttgttaaaaaaaaaaaaaaaaaattgaaccttttacaatgcagaagcaaaactcacaggaataaggtcaaaatgttggtagttttcacaggagctatcttaagtcatactactccgggtgcggaccctatcaataagcatttgcctgcctgacaaatcttcttcataaccaacaatctgggagtcagtttgtgtttcactaaatccatcatacatgcccttttttccatctccagatgaattgtagttgtcatccttttccctgtttaaccagtgtttagataagccaacaatggaatgtgtatctgaatggtcttgaccaagggttgagcaattggacgggaaaacacttttatcacaagcagtccttcctggtgacttttgatcatgaatcttactagtctgctctaacaagtcctcaattgctgcagctacatctggaacaacatgagacactttatctgtaccctttgccaccacatcatttctgatggaattattagcattgcttatggaatcatttggatgtaccccagaagaaagcatattcaatttaccactatcttccaaaagccttgcctttttatgcaatgtactagtatgtttagctcctccgaaactttctttactgctaccaataattccatttaatgatgttttaatcttttctgatcgacttgtactctgggatggcatgtctccagacatcatttgggcagcttgtgtggaaaactggctcatagcacacaatccagcctcttgatcttgagcagtgatttccttcggagaaaattgatcaaaaggaacaagtttattctgcttgacacattcatatatccaatcagatgtaattgaacgtattccccatttacaagcagcctcatacttggggccacttgcaaatttgcaaatgagatgagtgaccttctttgtcaaccttcctactagtttacctccaagaacaaagcacaaatttctcaaaagcagtctgtctttctcttcatattgcgaaacacaaaatcgaaagttttcaaatccagggaaaggaatccaacagggaagtggagaatatagaatgtgatccttaacattcagtaagcatccatcctccaaacatgaccgaatccaatgactcgatacacataaagtttgggaatcataaactaactttggtatcacaccatgacattcaactgtgaagttcacactctgcttcagaaaagcatcagctatatcacctcctccttgttttatccactgaacaatttcacctttccgtccttcaggaaaggaacttgaaaattcaaatactttacctgcaaacacatttgaaacttttccattttgagtacttaaatcaaattgcactctctttggagcctcattcttattctcactattatcatttacagcagcaacgttactgtgctgcactgattttgctgctgttgccataaagctgaaaccactgatgttgatttcttctggtttttcttctttgtttccctccaatggtgatggcattccaatttcaccgcttattctacctgataaaggattagatgatggcatgctcagatgagcagcagagactctaccttgatttagacctgccaatcccataagtgctcctctaggaagaagtaaatcatgtgcaacatgcctttgatcaacacgtatctcttcttttttacgatcacaatcttcaagccaggtagtcctaaccacatgaatgacaccaaaagctgcaagattccttacctccttcttctcaatctccgaaggagttccaactactatatgggtcaatttatcgttgaacaaaacataacgggagccaccacctctacgaaccatgttaaccagtctgcgcatttcagaagtttcaaagccaacgagtaatattctacactgtgacaagtagaggtcactgtcttcatgctcagaatcattcgctacactctgttcttcgccaccatgctgtttagaattgactggagcaacaggtaatgtagagcacatactttgagagagggtagcttctacatctgaatccaacacaaacccagaactagagataattgatgaattggtgtgtgtagccactgatgatgagggtgcagattgcaaattgcccatatctttgccttggctaagctgcatttttacacttcttttctttgaggatacagaaccaccaccctgaacaggataggactcttcatccagacgagctcttctggctacagactgatcaaaccatttacgattaataatatgaacgttgccccatctcctagccaccttatacttgtcaccttcaggagcatcggaaatcaggtgtgtgcacttcttggtaagctcagcagagtactttccaccgttttgtgtaatgattttctccatttccttcctttcatctgctggaattctggtgacacaaatggtcaatccagaaaaaggaaggactctaaacgattcatggggaacaattcgatgctcgttccagcattgatacaaccaatccgctgtaataactggtttcttcaagacttgtacggcgaacttgtatttcccggcaagaacattcttcgcaatgacaaagctaacatccgaagatgctctagaatgaaatactcctcccattgacgttaccaacttctcaatcctacccttttcatccccttcaaaaccagtggccagaactttgacgccctccattgcgaggcagcaggtgaacccttgccttttagggagagcccgatgttccttagcacacgaaaatacgcattgggggccgagcaagttacaacctttggctgtgagatcctcaaacttttcgtgatcgggagaagagataatgtggaaatcgtcggggccagagcgagaaggatcggaacaaaggaaaacctgggcaccgttgttgtttagagcgtcgcgaagagcatcgaagatttcagggggcacgagtttgcgcgacatgaaaacattggctccgt

SEQ ID NO: 17685 - DNA, 6551 bp, Cannabis sativa
agatattaattgatgattatgatcaaagtgatatctgtcttcaggtgagggtttctcggccgcgggggttgactttttcccattcttattataaaattagagaaggcacacagttttgtaatgtatatacaaaaacagtattacaacaacacacagcattcattaatagtacaagggtcaaacctgtgaaaattcccagaaatggctccatttctattttattttactcatataattattttatgtacagctacagtagtcttctgcagaataattactcgcaacgacttatacatatttagttatatgtatatatctctagatgatcagaactacactaaagaaaaaataaataaataaaaagtaagtcacgcaaaagtgaaatcgaggggcttggaaaatttaaagtgttggtgggttgctcaccaaaccctaaccataatcccacatgaccaaccctattttcatttaagacaaacgacccaaaccccatgcttataagatcgaacagactgtgttgtgtgacccggcctctattttctttttctttttatacaataatttttatttttgggtggtgtcttcactatatcttagtttctcaactaatctcattaaatccttttagagtagtattgaatgcttgaattaataaggcatttcaccttatactactttcaccaaaatttctattattagctgccgtgcaagcgcgtgcaggcgcgtcaatgtagagaaaaagagaagtgatcgatcagctttttccttttgcctttagggctttttagttttactacagtgactttcattttctttctatgtatgaaattatgaaagaaaatgggttgagagctataatcactcccttttattaaattgtaaaccctcatacaataaacatttcacccaaaaacaaaagcaaaaagggtaaaccagacaacatacttttattttatatttctctctctctcaacgaccgatttgtgggcattaatgagagagctctgaaaagtttttagtgcattgtcagagtgtgagagaaagactagtcctggattgtcaaaaaccagtctggctacgattattgccattcattactctttcatctatataacctatctctataatactctcttttctctactatattatattacctagccccaactacacactactctcttacactttcaacctcttccccttcttccttatatatatttttacctacttcttcacattttgtactctccattctctcttctttctccttcttagtttatcatcactacatatatacaaaacatttatacacatttatatatgataccccccattgtacggtgatcaagtaataaaccatttttattttgttttcattgtatcaaaacaagctatatatactaattcttttatacacatacccttttacgtttgtataacttcttcaattttcagctatctcagctgaagttcgataacgctagcacagaggcattttctcgggaaaaagagctttcccgggaaaaactatatattttgaaagcttatattcttagtgagatggagatttctaccgctttgatgcttttaacggcgattacagcttatttgctttggttcactttcatttcacgttcactgaaaggtccacgtgtctggcccttattgggtagtctacccggtttgatcgagaactgtgatcgcatgcatgactggatctgtgataacctacgcgcatgtggtggcacgtatcaaacatgcatctgtgccatcccattccttgccaagaagcaaggtctcgtgactgtcacgtgcgacccgaagaatctagagcacatactaaagacccgattcgataattacccgaaaggtcccacgtggcaagccgttttccatgatctactcggtcaaggtattttcaactccgatggagacacgtggctctttcagaggaaacctgccgcactggaattcacaaccaggacacttcgccaagccatggctaggtgggtaagccgtgcaattaagctcagattctgcccaattctaaaagaagccgaggaaaaagcccagccagtcgatctccaagatctattacttcggctcaccttcgacaatatttgtgggttggctttcggtaaagatcctcagacttgcgctaaaggacttccagaaaacggcttcgccacggctttcgatcgagccaccgaagcgtcactccagcggtttattatgccggaggtgctttggaagctgaagaaatggcttcggctaggaatggaagtcagcttgagccgctccttggaacacatagaggagtatttatcgagtgtgatagattcacgtaagctggagctacaacagcacaaggatgggaaccctcacgacgatttattatcgaggttcatgaaaaagaaagagtcgtacacagacaagttccttcaagaggtggcacttaatttcatcctggctggacgtgacacgtcatcggttgctctcagctggttcttctggcttgtcatccaaaacccttccgtcgaggagaagatccttcgcgagatctgcagtgtcttgatcgagacacgtggcagcgacatcgccacgtggactgatgagccgctggtcttcgaggaggccgatcgccttgtttacctcaaggctgctctctccgaaactctccgattgtacccgtcggttcctgaagactcgaagcatgtcgttaaggacgacattttgccggacgggacctttgtcccggctggatcttcggtgacatactcgatctactcgacggggagaatgaagtcgacctggggcgaggactgcctggaattccggccagagcgttggctttcgccggacgggacgaggttcgcgatgatggacacgtataagtacgtggcgttcaatgcagggccgaggatttgccttgggaaggatctggcttatcttcagatgaagtcaatcgcggcggctgttcttctccggcatcggctgagcgtcgttcccggccatcaagtggagcagaagatgtcattgactctgttcatgaagtatggtcttaaggtaaatttacagcccagggaattggagggaatcctgacgagtttgaagggtgaaagtgatgcagctatgaaaacgacgatgaattcggtgtcgtttagtgtcgccgttaagtgtaacggcaaatgtaacggagtcagcgagacaggtggaaataagagtgagatggtagttggggttgcttaattaagggcatgtttggatgtccgaataggtagggtccggaggtgggtttgaaatctgagtgtacatttaaagaagtggtgggacccacgcgttttgtttggtttcggggtttatatggtgcagtcagctttagccacccagaagaaagaaattatttacggtacgaactgtacacgtgtcggacactcgttcttccgaaggtaattaaagagaagtggaactgagataaatagacaagtgattttatatatagaagaactactaaacagctatcaatctttatttttaaattctttttcttttgttttgttattgtttgttcagaccatatgaatttcttcaaacaacagttttattaattttgttgttgttgtattgttattatttttattttttttccatcgataagataaggaacaatatcattaatttattagtaatgcttttatattgtgtaactgaaagatgcataattaagtacaaattttattttaatggaatggctcttttgagctaaatagtattgttctctagctattgtcataatagttgtgcactgatgttttaaagtgcttggtttgggtattattaattcaagcaaatttaatagaaatcgactgtgcctcaataatctactcagcctattaatttagctgaagtgatcagttggtacgaaaaagcaatacttaaattatcataatgacatgtcgatttggagcttaaatggtgtgataccgagcctacactacatatggtacttactactagttactactataaaataaaaataatatcttttaaattagtatctaaaattaaaaatctcaatgtcatcaatttgttatatcaactatctcttcttattaatagaagttatttttcacattaaattgtgataaaatttgatgattaaaacctatatttcttctctcaaaatattttatatagtaatcatgtttttttttaataatttagttcataaaaaatgttttgcacaaaatttattaccattttaaattaaaaggaagacccttaagttttggcaaacatatcacaacatattagattaaactcacaaagaataacataattagtgaaaactacattgctaatataaagtaataattgacaaagaaatttgtgtcttttttactatcctggttgctattgtttttaggaaacaacaaaactcgaagcacaaataatttatgacttacgagacccacaaacattaattgctccaacttagaatgtttattgcagcaactgcctaacattacagacctacttctcttagccaaaaaaaaaaagaagaagagagagagagagaacaggtagggtagcaacaacagagtgaattcaatctgattgtgatctctacattctctgtttccattatattccaccaaaaaaaaaaaacctcatttaatatgcattattgatcaatattttaaataggaagttgtcatttcttcatataagaataaatgtactatagcagcgttgagatggatagattaggctgagtctttcaataacggaaaaaagaaagaaaaaaacaaataaataaataactaaaagaagattcttgggctcaggaagttacacagaagttctctaaattgaaaccaaaatgtaaatgcatattagacctgtaaaaatgagtccatttacccaaaagcttgtgaggatcaagtgattaagtgcttcacaagttgttacaaaatcactaaaatcagcctagttttctcagcaggatttcactttacctgcatcactcccttttttaaaatagagttttctgagtttctttccatttctgtaaatttttgcactctgtactagtctaatgtgctgatttcttccttcattttgctctcttcttgcacttgtttagtccagcactttctctccggttgcaaacaagttccaaactactgtacctatgatgtacaatgcaacggctaccttaaatacatcgtcccaagaacctgcataagaaacaatgttgatagtttagactagagaaaaagataatgtagcaattcagcaaaggcattagattagcagggctaaagttgtacctttttgtagtatgagacctgttgccgctgtaccaaagacgccggcaagtactccagccgtatttgacagtcctagcaatactccctgtaattgatttgtaagcttgattctaaataattctcaagacacaagtaggacaaatagttcaagcacaaactaagaagtaaatgctatactcaatagggagttacagctgttatatacatacaattgtcaaattataatactcacagcatagcgtggtccaatgtcttggtgattggaatatagaccgaccagattgtgaaaatgaatgcatcagatccctgtcccaaaagaaagagaaaagcgaataagtaacagttgataaattactatttaaggttttcctcatggaatcatatatttgaatctccattgtacaagaagtttatctcctttcatagttttaaaatatagaagaggcatgatgctgatgactttctttttacatttttaaaagcttaactttgcttgatgccaattcatgttaaacttgtgcctacctgactgcatgccatgcagagcactgccatagcaggagttttgacatgactgagctgagtgagaaagaaggctggaccaagaaagccaattgattgcatgatctgcagggtcaaaagaatttagaatacaaccaacaaaatattattctacactcctaaaattaccttgtaaaagttgataagaaagagctcgatccataattgctaatttcactttggtgataattcaactttacatgggtatttaagttgtaaaaatttatctagtcaatatataatgtcccagaatatggtttacttggtatttggttttgtatctagtcaactttatatagtcaatgatctaattaattctacttcgctgtgcatgaaaaccaactggaattcataccaatgcaagttcttaccttacgaactgatgttatagaaaaacctttgctcacaagagtatctgcaatccaacctccaatatttgcaaacacagccatagttaaccacggcagaacacagagaagaccagattctgtgaggttaaacttcaaaacctgagaaagaaaccaacattatacagaggttgaaaataaccatgttcatccaccatgcaacttagaatgtgtcttgtcaaaataaatcctttcaatatcatgacaaagtttgtgcaatagcaagagtatactcaattacctgatt

SEQ ID NO: 17686 - DNA, 2557 bp, Cannabis sativa
cctcgagccactcgcatgcaacagaccacttgcatggcttgaactcttgatgaatgcatgcatggtacttggcctggcaaaccccatcagggcattgtatcaaatcatcatatctcttagcaaggtaaccaacatttagcaggttgtgaagataagggccaaaaggacaatgcacacgagtacgaccatgaggcgcctgcaacacctgagtaggggagacaacgagtagcaggggcatcttgccaccaagctctggtgccccgaaaaggactacgctgtaaccattactcctacctccgagaacacctcctgcaattacaacctgtaacctttaacttgcaacttccttatcatgacacttgaggaccactagaggatcatcatgtaatttggagctaatagaactcacctataaatactcccttcctcaactttgagaggacttggaaattctctataacaaatgcttttgaatctataatacaagagactcacttaacattattgttgtcctacaagtttacttaagtttcattttgatttcatctttttttttttaaactttctgacatacacacttagagtttctatccacttaattttttgatgagttctcaccatcaacaataagaacaatgaacaaagaaataaaaaagcgatgggctgaaactcgaaactcaacagaccaatgtccttagattttcttctttgttctcctcgtgcaatggtggtgtatgacttcgaatatgaccaagaaaacagggtttgggagggtggagagggtctaattgcaaagaaaggtggaggggatgaaggtggtagagaagctcaaagggtttctaaaaaatactaagggtgggagatattagagattagagttggaacaaaaaaagttggttcttttagtatatatatatatagaagattattatcggcaaatttttaaggcaataatctgcccttaaaagttttgaattgttaggtgaaattttttccgcaagttaattcttctcattaataccgctgggtccttccaccactaataatttattctccatccctaataactatcttttatattttattttaataaatttcttattattggagaatgtggtgctacgacggtaataattcgattaataccgaagaaattatcccttcggtaataactcaattaatactggcaaaatttatcccgccagtaatgtctccgtccctattgcttatatttcttgtagtcaatgtttagaatctcatttaaagccttaaactgactggtaataaccatctgggtgtttgatttcatatgtgactccaccactataaatagacacctatgagttcattttgtgacactaatttatatcaagagagtacattattagaaatattttaagttggataaatttagaatactatttacattttttcacttccctatgtgcttgtggttggggaaataaatttttgaacaaaggtgtaagatcttgtttgagtttggtgattcccaaaatcatcacttgtagtttttagtgttgagattgctctcacatcactttgtactttctttttggtgcttttcaccttgtaaatatttacctgttgtttaaagttttgagttgtaattctccttttatctcttatttattattttttttattttatgtgtaatctttatatagttatgcatagagttttaatcttgttgattctatactttcattcaagtgttaatatttccaaccaaatttcctcacttactcatggttttttttttaaaaaaaataaaaaaagaaaaatcaaaatgcaactaacaaaaaaaaaaagttagttgtaacagctttgtttggctaaacttttacttttgcttatagctagaagtataagataatataaattttgatttatttttgttgtttggataacttttataaaaagattttttttttaatgaaaggtttttcaaaaaaggggcttttcatttttaaagttcaaaatagtttttttttattacatttttacggaattttacatagaaactcctatttgcaactagcgctgcaacttaaattgcaacaaaaaattgtatagaatctctattgcaactagcgctgcaaccactttagaaacccaaaccataaatttgaaaaaaaaaaagttaaaaaaataataaatggagtaattctaaaaaaaaaaaaaatcttttacagtaaattaaaaattatgtaaattattttaatttttaacataacatctcaaaagtctttttggaagaaactacaaattctaactttttttaaaagaactttttatatttttatccaaacacccctatttttttaaaaaattataaaagctaaagaattaaaaaggtttaaaaacaactcatagaaaaggaatgaaaaaatctttttttcttaaagctcttagctaaaagctaaaaaaatattatagaagctaaaaaaaaatcttttccacttggccaacaaaaatggaaaagaaatgaaaaaatcttttatttttccttttaaagaaatgaaaaaataaatcaatt

SEQ ID NO: 17687 - DNA, 5689 bp, Cannabis sativa
  modified_base (33)..(42): a, c, t, g, unknown or other
cgtgtcctttaaataggagtctggtctcgagtnnnnnnnnnngagaaatctcactataacaggttggttaaagaagtacaccataagcttgagcgtaagcatcttccaggttaatgaatccttggactctagataaaaaatcagatggggattctgctctttttcattgaggttctacccatagtaaagattcagttattattcctaatgttagagccaccatctttatatcatcagtaacctttgtttttacagtatcatccatcaaacgctgaatgtatttcttaaggctttctcctagttgttgcttgatatttgtcaaagaaataacttccaggtcaaaattctttgctgctataaattgtttcttaaacattatctacagatccttccagtcacgaacaaatccatgagataattttttccaccaatcttctgcagacttggacagagttaaatagaaacaaaagaatttcgcatcatcacttgccttagccacttgcatcattctagtatatttggatagatggtcaatggagttcgttctaacttcatacaacaccatttatggcattctaaagtgttccgacaactgtgcttcaatgattcttatcatacatggtttcgtgtcctcatcttccaactcaaacacagttccattttacttatgggagatgctctccgtgagttttgtcagctcttcaatcttatgctccagacactgagtagttgtgtcgtgatattctatttcacgaattcagtcattgatgtgatttctcaagtcatatccacgaggtcgggctttctcgtttctagctttctccctcttggcattcaatcatgcccagagatcatttgttgagagacttcaacttctatcatctgatattggatgaacttcatccacatcatcactccggctagtagaattctagggataatttttatcttttttggcggaggactttcatgcttgggcatgtgttgtggattttcaacacgcaagtatacgtatcgttcacaagtaatggactcacaagagtgaggtcgatcccacaaggactatagttaattaccaaacaattaaattcctaattctatttactgatcgaataaatggattttgaaattaattaatctaagaaaacattaaataacaaaatatgcaaataaaaagagatttaacaatggatgtgaaattagggatatgatttcaattgctttgattatccaattgttaacactaattaactattcttcttcctcctataggatgtcagattataaattaacctaaattcttttcagatcataaaggtcctaaattgcatgtcaattactgcatctcttagatagtacaacaaataattcgcattaagcaataatctaagggtcacacaagctatgtgaatactctcgtttcacatcaaaacttatgtttattcatttagagaattctcaatattcacttttcaaattttgtattgagatcatagatcatgcataaggtggctaatcaaacacatgtaataagcacaaagatgaataaatcactcaattaaggaagaaagaacaatcaaatagtattaatccatggaataatctcagtcaatatccatcaaacccctaaattgggagtttaactcataatcaaatacatacttaaactagacacaaataaaaacataagaaattaagagaagagaaaaaaactagatggaggattttcatggatcgcccacgctcactccaagagccttcttcttgtatttttagggttccattctatctatctccactaaaattcgtgacccactttcattaaaatagaattttttagcccaaaattgagaaaaggcaaagttgctcatgtctcatatggagtcgtggtcgcgaccacagatagtctagttgcgaatactgtagaaaagttaaaaaaaaaaaaaaaaccattctgcccacttttggtcgcgaccacaaaattcattttcctacttcaatctctctcaataaaatatgtataactttcacatacaaaatctaaatgagctgatttaagatgcattggaaagatgaaaaagaggtctaaaatttttatgttatgactttttttaaattctaataagaacatagtctaatttaggctttaagtttcacatttattttttgtaaaattttctctattttataaatcactattttctgaaatttgatcaatttatacattctaagtatcaaaacttgaaacaaaaaaaaaaaaaacaagcataattttattccaaaaaatgataataaagaagaaaattaactctaaaattgacttgaacaataagctaaaaatagcctaacagcataagacttttccttatgtacaattttgcctctagaattagtccggtgagcttgccctgaagcattggttcatttctttttataggaggttgactagcaggattcattctcttttgttgatcattgggagcagttttttggaggtttctcctatttttcatatccctttatccttaggaggattacgagtgttaggatctttaaggttcgttttcctagcattattactctgagaattagtatcattaggtatatttctgtgaagattttgttttcctcctccaaatgttgcttccaacatcacaaatttctccagcattaatcgagaaaacacttcttgtgttgccaatgtttgttcagttgcttctagtttttaggccatttcaacgatcctaggatttggctcatggtgctcatcctcttattgacggcattgtcttctagatccataaaatctaaatcctcaaactcgtcttcttcttctcctttatcgaggagatcatcatgaaagtttgtctcatcgtgctaatctttccctttttggtgactggtcacctcgatgggatcttcatcaaatctcattttggaattaggatcaacatcgtccttcgaggtgtcgtggtagtgaagaccacactttgttcaagtgagtaccataattactgaacgtaatctttgatggtatcactgctttcttcaactctcaataaaagtaccaaaatatttaccaagtttttttggaaaactacttattaaatataagagctaaagaaaatataattcaagaagaaatatatgaagaagacaaccagagtttttacgtgattggggcgttaacaagtctttgtccacgagtcaatattattatgaggttggctaaaaaagtctttgagattataataagtatgagcactctatactttgcttgagcaagtaagtcaagaattttcaactctttgcatgaaagatttagtgagtatttatagtgttatagatgtcatactagttacatttttccttttaatgggaagtttacaaataatacactgactttgagcttatttggttaagcccgacccttgaggcaccttgtgtatactgatgtggaggccttatcacgaagctagctattcatactgtgtcctatattcatgagtataatgacattaattacctaatttccagctatttagtttccctttttagtaagatattattctctatctgagattttggggaagtaatttttaatcttctgcgatttggcaaaaaaatggaaaactataataatcttctggatacacgctgaggacctcttctagatacacggagataggctttttgaatgctgactaagcttggcaaaacctcacctaggcaaattaccttgttgttctccctaaaggaagaatgaattctgggctcgacccaatttatattattggagcccactgatgagccttaaacttttatttaaaatccacgtatcgcttactaaaaatgcgaataataaaaccccatgcactttaactaagaaattccaaattctaacataattatacgaaaaaatatgttaaaaaattacgttgcaaatgattataatttgtacgtgtcatgtattaatgtagtttttttaagataatttaccaaaaaaaaagtattagcattttaagtataaaaattaattttaaagaaaataatttgatttttatgaaaaagaaattggagtttttttcaaaaaaaaaaaaaaaaatgggtgcattaatatttgtacatcataattaactttattttttaaaacaaaaagtgtattaagtattacatgtgtcaaattataattagatacacaccttagagcatctctaatggtaaaaaattaagggatgcttccttaagtggatagatgaagtggcaaaatattgagatgctataccattggagaaaagaatgatattataagaatatgtgtgaatgctatacagtagcattgatgctatcaatatttttttaataaaaaattaaaactaaaatattattgttactaattaaaactaaaaaaattaaataataatgtgtgagatcataattatagtatttttaaagagtgttataccattggagtgattttagaagtaagagtgccaaaaataatatggaagagagataaaataaaatattatatttttggatgatgtggagatttttagcatacttaaaggatgctacaattagagatgctcttagaacattattttgaataacaaatttaattttctttaaagaataaggtaaagtacattagttgggatatacaataaaatattataaaatagtgcatgaccaagagaatttagccatattatttttcaacatgactatacaatccaatggctataaataacatgagtaatgacaaacctcaaaagtaagtgagggattaaataatttaccttaaaagatttacggtgcttgtataatgcaccccactaaaataggttgtatctgtttcgaaatctataagaattttttcatagtcgtgtacgttatagttaagacatcttgtaaaattttgaaaaattcgaaataatttacaatataaaaatcaatgttcaaaccgtttattgcacacatgtatcaaataaaaatatcacgcgtgcaacaaactctttaaaccctattttcaacgtattaaatttttttgaatttctcaaaattttaacagatgtcttaaataactacaacgtatacgaccataaaaaaattttggactaaatattttttatataccgaaagatataagagtgtattgatgcacccatttcaagggagtgtattgtaaaattttcgaaagataccatgtttaacattattttcagttttttgttttaaaaaatgagaacaaaaaataatttttgaagttttcaaaacacaaatcgtgtttgactaatgttttcaaaaaacaatttaataacataaaataatattttgttgttatcaaaattgttattttttgtaattttattttttgaaaagtgttttaaaaaaattaggccaaacacgcttaattattttcaaaaataattttttattttttaaaaataaaatgcagttttttagttacgatgtcttatgggttacttggcttcataacttaaaaactatttttaattttaaaaaattgaaaataatttttaaaaactattaggagtcgtttagccaaattttttataaattgagttttaaaaaactcaaaaacagaaaacatcaaaatgttgttttcaattttcaaaaatatttttttctctaacatattatattttatatttttgttcacata

SEQ ID NO: 17688 - DNA, 3495 bp, Cannabis sativa
ttagagtctaattgtgcgtgtcactaaaaatcaatcttaattctttagtgacacgcacaaaaatgcgagtcactaaataatgtcactaaaagtccaaattgtagtagtgtaaactctacatttttttttttgggtattgttattggacaccaatggtacctatcaccttctacttgtgttctttgtgagcattgctatttctcaatttctatatagcacatcgactattggtatgccactcatcaacatgagattatcctattcaattgtatactttagcttgttttctctattctaaataaaaaaatctaatgtactttaaatttattttgcttaatttagatctccattattaactaattataacaatctaatcacgtatatcaacttatatatatatatagctcctatacattggaagtgttttttttttctttctttaagtaaaaaggtaagaatggtcttgaatataaaatatgttaatcatcattagtatgatatattttgaaaaaatactcaaaaatataaatttatacagaacatgacatatgtcatattaatgttggagttaagataaacgtaaataatcccaaaaagttggatgacaatatatataaaggaaactatatatagtcttaatttgttggtagaaagtctttgttaatcttcctttaacttctttttcttcattagttagtaagtaacacactcaatggcttaaaatttctccttattgtgtacgtttcgaagaaacttccgttaatgtagttgcaatcgtacacatattgtacatatatatatatatatttaataatgcagacaaaaacatgttaattattaattaagtcgttcttatatttacaatttttgttttcttttctcgaatttaaagtcatatacctaattaatataaatgtgcatcaattaaatgcaatctattcggaatgtacagtcgtttttattaggggttccatttgtttcaagtaacgaagacgtatataattaatgatgaattaaaggaacaaagacatttagtgatgaagaaacccacttgaacaattaataattcagtatgaacattaattaatttattatattagtcatgacatgcattcctaatatatatatataaatataacgtatatgcacatggatgaaatgtgggtgtaatttatggaaattacacgaaaatttctaataagataaatattaatattaatgtgggcgcagaagcaggttttcgtttcatagacttataaataatattaatgattattaattagtggtgaagaaaaaaaagtatgtacaagacaacaaaatttaactagaagatcaaaattagaaaatggatatttattatggaaaaattctactattttttttatatgattgataaatatgaattttgggttgtatgagtgatcaagactgtttttataaaaatatgaaaatcattttggataattacagatacattaagcgaaaagaaagacttttttttttttgtttggctctcaccaattaatttctactttgccttattaattaatatatttttcattctataattattttctttattctaatggatgctgaaatcatgaaattgtgtgtttgtaggtacttgacaatttcttacataactagtccacataggagggcagtgtcttggtcatttatatatttatttatatacatattataaattaattggtcaatacatacacgtacgatcgatattttcacaaaatatataactgaaatttattgtttgattttttttttatcctcatatattattgtgtaatagtcaaatattatgatgtagactcgtatggcctatattttctttctcaaataatatatatgtgcaataaataaataaatatttatttattcccccaagccgctagtttcataaagagaattgttaaaaggtatttttggtgcttaaaattttcttcgatgagtcgatgttatactgttattagtgtacataattaagtatcaagtctcatattataacttaagaaaataatttttaagaattaccgttaaccaatcgttaagggccactagtgtctaacatctctcctcgatattatgttactatttgtgtaattaagtattgggtctcatataacttaatagtttttagacaatatcgcaccacttataaaaagtgctagacaccactatagggctggtcttgagttgacataggctataagtaaatttttttttggcccttaccataaagataaatagtatttttaaaaattattaagaaaatatgtataatttttgaaaagacaatttttttgatttggggcctttaaaataaatggaccctaggcacgggtctaactcgcctatacccaagaccgtccctagacaccactagtacccatagcaataatccttcaaaaagtccatgtcacatgcttcttatattttacctttcaatttctaaagctaattacataacacaaatattaatgtatgaaaagggtcttatgtaagtcgtcattagtaattatagcacacacacatattatatatataaatttacaagattctcgaaaggcaatagtgtatatatatatatacatgttactcttatattattcttggtctagcttagtgaccttttgggccttgctctttttccaatttaaaggagaagatcataaaagtctaaaatttgaccaaagaaaaacatacagccaataaaatatcaatatattttaacttagatattattgtacatatatatacacatagctagagagagtactcatgtgaaaaattacaggtagcaagagcttcatatagttatatgtatataataggtacatattagaagagatttatatatagatataattgagagatatacataatatggaagaaaagaaggagttattgaaagaagatgatgatgatgatgatgaatatgataaagatggtgttccacttccagggtttcggtttcatccaactgatgaagaacttgttggattttatttaagaagaaaagttgacaaaaaaccacttcgtattgaactcatcaaacagattgatatttacaagtacgacccctgggatcttccaagtaagattatttctttaatttcttctttttttttttttacttatattgtatatttatacatataatattatatatatgcgcatgtctcatccctatatataataatatgcatgcctcatctctctctctctctatatatataatatgcatgtctcatccctatatatatatatcaaagtcttatatatatatgataatcgatatatatatatatgttgggaaattatataattattaatttatatttatcttttctcaactcagataaataaagatgatcaatagaaacctttattagctggggacaagtatgatttattagttgttggattaatttttaacacgtatatataaagatatatatatatatataagagaga

SEQ ID NO: 17689 - DNA, 2626 bp, Cannabis sativa
  modified_base (2599)..(2600): a, c, t, g, unknown or other
ttgttgcactggagccaaggatgagcctctaccagtcggcaccaacccaagtaaaggccatggcctttcccatcgtcaccttcagcggctatctctctccttagcccctcctcctgttttctctagccacactgacaatggtcgtgctccagtgaacacctcggtcaactatctcttcttcttctatgaactactttttttcattttatttctgacgaatctgtaaatctgtttatttctcttcttcttctattttctctacaagtgaaacgcggttaggggttcgttgtcattgtcggggtttgcatcaccaatgttctttctttattgggattcgttgtcgttggggtggagctcgcagatgcgagcggaggtcggatcaatcttgcttggctgggatttcatttttttattatattttctgggtttggttattagtttatgcaatagattctcacttttagatctattcttgtattaaatttatttgtatttagttaatgggtggtagtgatttttatattgttatggcagtagaagtgattttgagcttaaatgttatctaaatttttacccacctggcatggtgcgtacacgtggcattatgcagtagatacatgtcgtaagaggagacctccaagcagccatatgtcatgcgggtgtcgggtctccatcaagatggacttcttcagatgcatctgttggaaactaatttcacatgatctagatttactaacatgtatgttgattatataactataatctaacatcctaactatgaaatttctaaaatgataaataaatacataagggattaagaaatccttatagtcgttgcagcggataatataactccttccaatatatctctaattgtaacaccctaactagcataggcgtgttagcgtgattttaaacgtattgtgatgttcgctgctaatcaacgagattaatgaaaaacgtgattaattaaaactttattatttaattaataaacttaaagtaatacatatataattaaattctacacctacgagttttaccaaaaaatcgcatctaaatgtcaatttcaaaccagacaagtattttcacaccctttagcttccctttttataaaataggttgaacaaactgcctctaaagtccataattgtagtagtgtttataatttagtcattctgagttgtaaatattattttctatatcagggtttcgtgttattgaagcaaactacggagaaatagaaccttagaacctaataaggaggcaaaagaagcgattgtggcaactcggatcaagatcaccagctagttctttcttttccctttttatttttcttgtgtcaatttttgtttcaagtttaattatggatttgcacttagagatcgatatgtaataacaactttcactaatgtgtcgtttaccatgaagggtttatttatatcacagcaatgattattagtagatcagtctaaatcttgagtatacatgaactcctatttgtgttcattgagttctttgattcactcgttaaagtttctcatagaagatgattcttacaacttctgttttgggagcttaataacatgagtgactgggaacatgttatagaataatagaatccaagttttcttaacggatcgaatattagttcccttatagttttaattctatgagtgctaacagttggatccaaatctataatgttcacattgaattaatggtacataaggagccaaaaaataattagaaaggtaaaatgataattttgaccaactctaattatgaactaataaatggagggcaaactacttatattaattatattaatggactacaagtaagaattttgtaaatatgattttatattgttaaagagtacaattccatatttatagtagagtaataatagaattaataaaccagattattctattgatgagatcgataataatcaagtgtttattggagcttcaaaatcaagaaccagatcacagattcgagaaagatgaaaccaagcacccaatctgccaccataatacaaagaacggaaccagactcaaaacactgttatacaccatgcacaaaaaccaaaacgccatagaaaaggaaataaaatcagagcggaagaaaggaccgcataggaaaagccaagaaatcatacgattcctgaccagagccacgcccaaagccagagatggttgacgaatcatggtcagaatagcaaacacgacggttagaaaattaaagaagaaaccctagcagagaaataaatgagataggttttttagtttttaaatgtggtagcaaaactattagttagacaataaattaaagggtattttcaaaaatatttttttttatgttttatttacaattttacagcttaaaatttttaaacaaaaacacgtttgtaaaattttaaaattacaaaaatacactttgatcagtaaaaaataaaaaaaaaaaatcaactaaaaaataacgagaaatcaacttcacgataactttaaatcaaccatacataaactataaaataaccagaaacaatttcatgacaactataatacaactataagggttcgtttggaacgccgtnntaggtcgtattgtattatattgaatt

SEQ ID NO: 17690 - DNA, 7521 bp, Cannabis sativa
aagaattattgtgggttgtacaacccataatcaagttggcttgtatggttagttgtacataccatatacattgtagtttaactaaagcctactctataatttaggtccttgggttttcttgtgcagcccacgaaaaagtggtttgtacaaacaatctagtggtggtcatcagctataggttatgagtttattcaactgaaccaaaatctaattagaaattttactcttacattgcttaacatttttatgagtggtgtaatattattattagtacaaaatctcatttttattttttaaaagtaaaatcttatttatataatttaataaaatttataaagaatcattaaataattataagaccacatcttatagaatgctaaatacttttgtgcgccaacaatggtgtatgagaatgggtggaacaacacgtaagcggaaaagcgtctacagaatttcttaagggcaaaatgcctttgtggctgagaagatccagcttggacactcttcagccaataagaaactcccatactcctaaactctcatctctcagttgccacgtgtcattcccacatccacccctttccctccatttttatatattttgggaaataaaatataaataaataaaaatcttgtgcttctgattccatacacgctcacaccttgtcttcttcttcttctccactactctgactccataaccgtcctcaacatccttctcactcacacacacaccgtatcggactatgaaatttagggttaagcttgattgaatccaggtactttttttccgtaatggcttcttcttccatagctattccggacctgacttttctctcaccacaattgacgcatactcataggcggtctgtatatctctctaaaaattctctgtttaggctctctctctcaaagcatagcggctgcaattttcgaacacggatcaaagctgttaaagaagacggcgttgtggtcgatgagaagaggagcgaattcataaaggaagtgaatggagcgggattgaacggtaatggagctgctagtacgaatgggaatggttatgcgtataatggttcggtggagaggtattccaatggtggtgtgagtgtgttggagagtgggaatggggcggctactaatgggaccttggctaagtatgtaaatggaaatggtgtggctgctgaagtggcgaccgaggtcaaggacgcggaggtggcggaggaagggagaaagaagaggatagaggagattgggaaagaagacgcctggtttaagcaaagtggtagtgggcaacaaaaagttgaggtatggggtccttcattctcagctataatcaatgtttactgtctaattttattacataaatctgaattaagaagtgagttgcgaaattttgccttttgtttcatttgattagtgttgatatgcgcgaaaaagttagtgaaggattcaatgcttcatgttattaaacaagtcagtagttaggcacactctgggggcatctatatattaatccttattgaaaagagtcctaatggaggaaatcagtaggcaagaattgtcaattctctttccggtttctccaaatatgtgatgcttgcaaaaattgtcctcctcacaggaatggattggaaatgagttttttttttcagtaatctttgccttggaattatagggatatttttgttccacaattaggaataagatcacgagataaagaatcaggtgtaactactaactaatactttacatgatctcaacgaatactttgaacggcatattatacttgctcatatattaagtattggagtttttcttaagttgaaaaggcatagattttatcatttagtccttaaacttcactcttcttgtgataattaacttataaatatattgaaaaacaattttacagttaccatctttcttttgttgctcttaaataatttgatgttaatctatatatgttttcggacattttctgtgcatacactttgcaatacctcactagcatggcaatatattgttttttcaggtttctgttactcctggtggtcgttggagtagatttaaaacttactcaacaatccagagaaccttggaaatatggggatttgttctaaaatttctctttaaggcttggttgaacaatcagaaattcacttatagaggttagtgactttcatagaaaaaatagataataaagttttaaatccatggcaggctttggtttgttgttgagttgttgctttgtttcatttcattctttgtcattgaaaactaaataaactattaaattggctgctgccattagaaaggagtagccattgaaattccatcatgagtagtggtttgttcttgttgcacatctcttctggttctttgaattattacttatccgcacacacatatatatgtaacttctctgttagcaacttcacatataattaataataatgtatatatgttcacttgttcaggaggaatgacagaggggaaaaaagtcttgaggcggaaggctcttgcaaagtggcttaaagaaagtattttaagattaggtccgacattcatcaaaattggccagcagttctctacaagggttgatattcttgcacaagaatatgtagaccaattggctgaacttcaggttggaaattagcttttggtgctgtttattatgtgtatacaactatacatatatattttgcacttgttcatttgtccctttacatataattttatggtaaatttgtcattggttggtttttagttggtgttggttttactgggaatataaatccttgcattgcatggaagatgtttgcaacctcttttcagggtgacatttagaaataggataagagatattgtctggtgtataaaacattagtttcttgtgttttacgtattctgcttggtctgagatgaatgcaacaacaattagctagtggactgtcatccgtttactagtggctagccatattgtttacttaaccttaactgcagaaaacacgagtccacatgcacttcacttatttttctcagcacatgcactacactttttgaatcaacacttcttcagtaaatgaaaaacacacacaaaaaaaatgaaaatgatttgatgattttgcagaaaacctagcatagaaatttattatttagctttcaatttgttaagccagttgatgtaggatagtgtgacaaacaatgataaaagaagacgactgagaacagacagaatcgtaatttttcttttctgcatttcaattattatatcaattagcttgttgaaacgggaataggttttgtttttctcaccatttcttatgatatcataaactatttggtgcagtttgtctctgtttgctttgtagagttattatacttctttttgtattcaggatcaagttcctccttttccgtcggagacagctgtttctattattgaagaagagcttggaggttctgtaaatgaaatctttgatcggtttgactatgaaccaatagctgctgctagtcttggtaatttttaattgatgttttagatgctttacgactcaaaatttccaattggactgtttttcacctagtatttgcaatgtagggataatctgtactatttgtaaaaatagtcaaagaaggaatgtaatgtgataatgttgtgtatattttactatgcaggtcaggtccaccgtgcaaaattgaagggacaggaaattgttgttaaagtgcaaaggcctgggctgaaggctctctttgacattgatctaaaaaatctgagggtttgtgtctttctcacatttattttaattgtatcttttctggtgtttgcatgtgtttcatattctttggactggtttctcttttcattatttatttctcttgcattttaattttaaatgtgtaacttcagcttccacaggctttggaaactttagatttcaattaaatttcttctctcttcactttcattgtgggccttgtcataagttagttgttgcctgtgtgtctgtaccaatttgcatgtcttatttgcatgtatacatactgacatgcatttgcaactttggaattgttttcattttttctaccaggtaattgcagagtaccttcaaaagattgatccaaaatcagatggggcaaagagggattgggttgctatatatgatgagtgtgcctccgttttataccaggtattaacacgggagatttcaacaaaaaaacaaatgatgtttagttttcacttgtcttgagaaagttaaattgcttctagtgatttatattgttcaatcaaaggttcaataaagttgtttcacattaacaactgtattttttttggtccatccatataaaattactttggctgatcacactttcatatattttggtgtgaaaaatcactgttttttttctttttttattgatcaatgaagaatttcatatataggtgtaaatcactttatctggtcatactttcataaaattttgtctactctgttggaagatgtgtgaatgaggagggaaggctggaaacaatggtttaatgatgaagatagaacatttagagaattgacaataaaaatagaagataggatctcatgagctgtcagtttagtttatcacagggacctacaaaacagtatgcttgagtagcttgtctcccaaaaatttcagggctcagccaattctcaactcgagatcgttaagcagagtttgggaagatttctgagacatcaggaaaataaaaaatcattgatttattgtgttacaatatagtggaagaccatttattgttgtttggacttgagtaaaggcagaatggcctttccatttaaaatgtaacctctaagtaattgtaatgagtcgtgagaactaataattttctgctaataggcattttgctgaatattttgtgattcagtttatgataataaatgatgaaataaagagtaattggtgaaagtagccagtttgcaaatgaaaggattactgtggagatcataagatgttaaccattgagaacttatttaaaactcttctagaaacatttacctttgtccccagcatataaatttttatgtcaagagaaaaggcaccgaggaaaatagtatgggagcttcttctaaacaattttccattttactctaatttgttggaaacagaacttaatctagttcatctttctactggcaagtttcagtgtctattagaaccttgacatcttatgttatctattaacctgctcatcatttttcttttaatttatagaattattttcctctgtaattattttggaataaaacatctaataatatctaaaaaaattcaggaaatcgattacaccaaggaagccgcaaacgcagaattatttgcaagcaactttaagaacttggaatatgttaaagtcccaacaatattgtgggagtacacaacgccgcaggtttaatatttcagcaatcctgaatttcaggctggtagcattgcagttattcttttcagatgtaaccttttctatcattgcaggttttgactatggagtatgtcccagggatcaaaataaataagataaaagctttagatcagttgggtgttgatcggaaaaggtcaatacaccctccgccatctatctggatttgattttgtataatgatatgatattcagctcctatatttctcaattacaaatcatacgttttctatgaattcagttatcatcttttattttgcaggttgggtcgatatgctgttgaatcttatttggagcaaatcctgtctcatggttttttccatgctgaccctgtaagttcctattgttattttgttgataagtagtgtaagtgatggtaaaaatttagctgcagctcaagagagtatgtttctggtgattggttacaaacttctagtgagtgctgaatttgcaaaaattatatgataaatataggataagataagataagatactaagtatccaatctacataaaacacataaataattgattaaatttctcgttattgcaaaaattgtgaattggtcttaaacctattccaagattgtacagtgagttagctcaaagaggcttttctttctcaaaacaaaccaaattattcgctaactctaacactattctatctttatattatgtatacaacaatacacccttgcaacaaacaacaaactcccaactgaaaacatccccaactaacccaacttataaacttttagggctcatttgacataagagggttgtattgtattaaataagtaaaacactttgtttggattgagttttgtattgtattattaatcatttaatgttacaatcagaaattttaatacaatacaaatcttattcttcaatgtataaaaaattgttcgtattagcttgtattgtaatatttatgaacttaggtggtattgtcgaggttggggtcggggtacagggtcgaggccagggttcgggttaggggtctgaatcgggcagcacagcagcaacacaaataaaccctacttttatatgtgcatagtttaattgttgtggtgtttctagttagaacaagccaagaaaatttcattttaaagttgccctttatatatttctggctttataaagcatgagtacatgtcatgctatttacaatgcatctattatcatatagagttgcatgcattattagtacttctaaaatatgcaccttggataaatattgtaaaaaattcttaagtgttgtgttttacgtttgcatgagaattacagatttacttatattttgtatgcagcatcctggaaatattgctgttgatgatgttaatggtggaaggttaatcttttatgattttggaatgatgggaaggtattctcttgtccttgtgctttctatattttcttgggtgtttccctttctaaagacatatactgtttgagctacttgcagtattagtccaaacatcagagaaggtttgttggaagtattctatggagtttatgagaaggatccggataaggtaattgtttgttccatagttgcagcccttacttgtacctatttctcttgaataatagttattaagtgtcagtggtataatgtgacttatcaaatttgtaagctactaatcaattaaaattcttatatcagtacaggtcctccaggcaatgatacagatgggcgttcttgtacctactggagatatgacagctgtcaggcgaactgctctgttcttccttaacaggtgccttatcgagaacatcgcagaaaattaattatgtgttctcttttcactcattcatctaacaatatggagttgaatttgacagaaaatcagacagctcaagagaagttttccttctttaaatcataggttaaaatattcagaaacatatgggttctcatgcaatatttctaatcaatatagaaaaatatttttatatatttttaatcaatatttttgtcataggtaatatggttcatgatttgttatttctaatttattgggattttttttccatgtttgcaatatccgaaaa

SEQ ID NO: 17691 - DNA, 2634 bp, Cannabis sativa
aaaaaaaaaaaatgtatatattaacatctcatacgtttgggaaaagaatttaataattaatcattttattttgtatataattatagtttttcttataaaatctgtatatgatatatcagttacatgctgtcacatttattaaattagtgagcttctagtgactacgaatttataaacaacattattttgtaagataaagtgttatttatagtaatgagtggtcttgttttgttgagtaggtctatttcatttagatatataagtagaaagtccttgaaatataattaatatattcattaataaatatatatgattcttatcacactgacgtaaaacaattatttatataataaaaattagaaaacatataaataagatattaaaaataaagagggagaaaaggacaagaaaacataatctcaataatggaaattttccattaagaaaatactaacagctagatctttttcttcccgatacagtaaggcttacgaagattaaaaaagaaaaaaaacaattaattattagtaaattttacacgcatcaataccaccaccaaacccaagaccctaaacattttgaaaaatagaaaattaaattaaaaaaaaatccttctcctggatcagttataatccgtagtagttctaatcatgatttacattacataattaaattcattaacatccaagatatctgagatttcaaacttcaacatactgctgcaatagctctccggttcatcctcagttgaacaagtagtactattcaaataattggtcgaattattcgaattcaacgccgtaggactcgaagaaggagtagacaaaaccgatgtagtagtagtaaaactaaagttttgatttgactggtagctctccgttgagggatcaatcaccgtaggttgttgatgatgataatgattatcatgataagtactgtaagaactgtaacccggtaaactcggagcatagtgatctgcttccgtaaaatttgaaggcatcccatttgttgttgttgttgttgttgttgttgtactactactttgccattcatgactgatttgagaacttggggaactgaaatttgtgaaatttgataggtcctgatgtactagttcatcattagaaagtggggcacaagacacgtgatctaaagtacttgtagtagtagtggggcaaccaggttgtgagatttcatggagttggttaggttggtacagtacttgttgttggaattgattaatgttgttataaagctggttttggtgatcgacaacttcttgttgggagttttggaagtagaaggtagtggtgttactgttttggttgtttgttgatgaagaagtattcccacgttgttgagaattgttgttatttgaggaagacatgagagaagtggctagttttagaagttcagggttcattacagctgctggttggactcctaagaacctgctcatgtggctcatctgatgatgatgagatgagttgtagaatgaagagcttagaatggaggagaggtctaggagatctagcctaggactgtgagtcactggatcaattcccattcggaggagccgttttctaatgtgggtgttccagtaattttttatttcattgtcagttcttcctggtaaccgagcagcaatagcagaccatctaagtaagaaaagacacaataaatattatattaggaaaaacaatcgtaattttatcaaataggaaaatgaaatgtgagctatttttttcaaaagatttgagaaaatttagcgcttacttgtttcccaaaatactgtggagttgaataattgtctcttcctcttcaaaagaaaatcgtcctcttttgatatctggtctgagatagtttgtccatcgaagtctacagctctttccacacctttgaagtcctgttatacataaatttagtatgaattagtatatagtaaataattaaacaccacgcatatgtactatatatatatgtacatcatgagaaacaaattaaaggacgtaactaataaaatatacatacctgcatttttgggaagtgtcctccagttcccatatccatgtttctgaatataatcaactagtttttgatcttcttcaggagtccaaggccctttcttgagcccatttttatcacaacacggtgctctacccatattggtatatgtgaaaatgttcctttatattccaatcaaatgctattatgcgcaatctatatccaagagttctttctaattatagcttattataaatgtaattgtatttaggagtagagagggaagattatatatatttatatgaagagagaagagagagatgggtttgtagggtccgtatgcgacgtacttggtataaataggaagcaaaaggattaagggtaagaaacttgctgaagtcaaaaggattcggtgccgtcctctgttttagatcactatggagatgtacgcgtgtccttttacctttcagaaaatttgtatacctgtatttttatttatagtaacacttcatataatacaaatacttacacattaattaaataaatataatcctccaaatccaatcatcatgtttctcacacctctctctccctcacttttagtcacctttttcatttttctattttgta

SEQ ID NO: 17692 - DNA, 2554 bp, Cannabis sativa
attttcaagatgggtgtaaaaaaaaattttgtctcatctaaacgctaaatattatgatacgtgcgttttgtctcgtcatgggagtcagcagcacccaatctcaatccaccaattttttccttttaaaaataaaattactaaccttaaaaatgattactatttatcatttattcttcaaaacattattttcctatcaaagttccttgaacccatctgggtttagactccatcatgtacaaatcataatcctcttgatgcaatccttttttttttctttttcgaaaaataaataaataaataaaaaatcctattactgatactcttttatatatctttggttgaagataaagtttctagtggctactactgagtactgttattagtgcccagtcaaccccacatgtgatttgggttcttagaattgtcactgttgtaaacaacttcaactttagttgaaattatctgcttttttttttttttttttgatgaaatcattccaacgacagcaaaaatagacaaagtgaaactaaagattatgcaatcttcttatataataatattatcatatgaaaaagctaaatatatagatacaaaaaccacaaccttaaagagaattaaacaactaataatgaaataaaatgaaatgtgtcaaaggaaaatggaatcatgggtacctgagagaaccccagaaaaccgagagcaagtaaggaagaagagaccaattaaatcacactatccaatcgcagaagaaactcttttatagtctgtaaaaaatagccagtactcaagtactatgcagaagcagattataagataaccaaagcaaggaaaaaagttttgaacttattattataagccatttttggttctctgacaaacaaaacagttttagtttctctaaaggaggagtaggagagggaagttaagccttctcctataggccaaactgttgagagagaaaaaaaagtgaagaatattattatgaataatgtaacgtattcaagtgaagagaaatttgagaaaaatagcaagttgagggatcataaagagtgactattatcttcccaataacttctttcctttcttcttttagacttgtggtgtgtttgttgtgttgagaattgagtaatgtgtaaaagtaatactaaagaaaataaataataaaaaaaaaaatgggtggcgaagaaagggacagggtgttagttgctttcaactttacaaagtgagagaaattaaagaaaagtacatatttataataaggagtggaaagtaaagtatgggggtttcttgtgtttcacattccatgatgttcttcttgggttatgagcttatattattgtgagaagtgaatagtcccactccattagagtttgttgttaattaaaaccctatccttaaccgtctgatgatgttttggctgtaacaacaaatgacaatcttcaagtgttttgaagtcaagtcagcctcactaaagtgattttttccaatggttgagattgagacatgagagagagagagagagggagagagagagagagagtaaatgagctttctttccagcctattatacttgggagtgtcaaaataaaagggcaagtattctagagaatattaaaatttaaaattgggttgttcattttagattggaaaaatgagaagaaagaaatagaaattagattgttttatgagcattgctattaggcatcagccgtgcttagtactttctcgacatatcgcgttgtgattggctagcgatacttcttaaaagttattatattaaattatatgggacccgatacttaactggaccaataacaatattgacatgtaggatggtgctaggcaccactagtacctttaacatttctcacatgcactctcacatacacacgcacaaaatatatatcaccaagcatgtgttgtttggactaaatctaatatacctctcttaaaacataaataaaaatttctagactaaaaagtcctaattattaggtatattccattgttgaaaagttaatgcctcatcttcatatatcttatgtcctttttagttttatttatggatatataacattttacatcttatgttttgttacaaatcaatacaaaatggatttaaaattatattccctgttgttttacatatcaataaaaaattaatttatccctcatatacttagttgtttttattttaatattccagttgaaaaataaattatttaaatggaagcattttctttgagataaaatataatttcaaaagctttatgaagaatattaattattttaaaaaaattaaataaataaagtggaatcgtaattcctttcagtaaattatttcctaaccaataactgatttaaaataatttatgatgaaaatttaattgaaaagcattatactagtatattttaaaaatatttgttgtacttaaataaatacttttaagatataaaataattagtaagagtgcatattagttggccttagcgctgttcatccgatctaatccgcacttttttggtcaaacaacatccaatccgcactaagtgc

SEQ ID NO: 17693 - DNA, 3772 bp, Cannabis sativa
tgggagataattttaatacccgaattgaggatgatgcagagcgaaaataatactatctgcaccatattcgattttgatatatatagtttcctttttattcttaatgtatataaaatatatataataatcaaaattatatattatatgctttaattataaagatctaatgatagtaaactggtcatcattatcattgtgattgtggatgtggattacaagtgtaatgtaaagatattttcttctcgattcttagtttcatcttttttttaatttttaatttgttgggagtcttcagaagtatgagactatgatactatacttgggttatgattttgttttgttttttttttttttttcaaactttgagacagatttaatttttatcttctaatgagtaattttttttttaactttgagccaaatttatttcttatcttctatagattatgaaggcataataaatatgtgtgagaatactattttaatttaaatttaaatggtttttcaattattataatttttttttagtttgccttaatggatacctaataggttctccataatcaatgggtattcccttacattgaattcgctggttattaaacggggatggggcgaagatgggagcgtaaataggtagcggagatgggggcgcggtttgtattccgtgtacattaaccgccaattttcattcttagcacctattctttaggtgtgagtgtatagcagattgtgagtccaagctctactcggatgggtggttattagatcttatcaatcatatatgaaggtatccaaaattggattcgtcggtttaaagcaagtgagctcaagaaagaagattacatatattaatggtctttaaatgcaagtgtatatactatatggaagacaaggaataaaagtttgtggcatcatgacatgaagaagttcctacaattaaaaatacaattatttttataaaataaactataattaaaagattaaacatattgagaaaattgacaaaaaagataggggctggtttgctttgatttgtacagaaaaatgataaatgttgatgtttgtaattggttccagttttgaagtaatacaattatctcattttttttttctaaaaaaaaaaagacgcaaaaagctttgacaacaaaagtaattaattgggagtatatcaataattttaaatattacaggaacaattaggtgtggtaaaatatacaataaaaggacatgattggttttaataatttacatctacaaatctgggaaaagtttaatctagatttaaatgacgaaattattgaacaacagcaatcttaatttttgtatttatttttcttctgaaagtaacttatttgtgtatttgaaagatgtttatttcttcttaacaatatagaaatgaaaaatgtttaaggagtttagtaacagtaacagtgaatagataagagagagtgtacagaaaccgtaccttatgttgcctagcctgtgagagagtcctatcaagccgtttctcaagattttgtaattccttaagaccaagctcttcaagattctctccatgaaaatgccttcaaatgaaataacaacgacaattgcttttctaataagcgtatgccaagataatatagccaaaaataaagtcactatctacatacgtacgtactactccaaaactgaaaagctgtactacaaaattccaatgatgaataagttacggcccaaatgtaaatgttatcagatttaagcatatatacacatgatgacacacctttctgtacgctgaagagactcatatttggccttcagttttggaatctccagtattaggttctgcttgaaaataatacaattaatatattatcccataaaactaaaatgatttatatgaaaaaattgctaccttttatgaacttcgtacgtagtagctctcattggtactacaaattaccacggaatacatagcattttgaaaacttttcgaattagttataggactaactcaacagtatacacacacgtacgtgtttgatttagcctaacagtatatatgactaatcttattattattccattattatatatgtaagtgtaaatattattatatacgtacgcttataccaactgtttatgtatatgtatgtgctttaattaattttgtgaccgccccattattagatcattaggccttgcaaaatggtatttcttttctttttttaatgtaaaatataatgttcaaatcgtagaatttttcatcatcaagataattagataataataataatatttttgtttggaaaagtaataataaagatgttagtatattgtggattaattctgggattaaaaaaaactttataaaagagagtcagtgtgtatatatataaatatatagatttatatatatctatattcaaagtaaaaatataacttgaagatgatgataaattaaggagacgagtaaaaaaggcaaacctgtggttcctcgccttcaacattgttgttttgtaaggcgtatgtactctgcctgtaccgctccacaattgtattcaggctgttaattgaaaagtcatcaaattactattatataacatttttatgcttctaaatcttatcaaatcaaatactaaatagattgcaaacaacaaagaaataaatttagaatgttggttaatttaaacatggaaaagcattatccaatcattgtatttacaatgaattttttttatactatatatatttatatatggaaattggttttattatttaatttggctgcttaggtagctcgctgtaattggtgaggtgattaatgaagaatttttctgtgactaaagaaaagaacactgcagaaatttttttattttctaaagaaaaaaaaaagtgtgttaataagaaagactttcattgtgcacgcagatcgactttaaaatacttgtgcaaaataaataaattagaaaacgaactaaattcaaattaaaccaaattcaaccatgaaagtagttgataaatttgatgtactctacaattttgtatcgataaaggataaaattcaagatctatattatatatataggtatatggtgccatatcactgcacatacatcagaacacgaaacaagctcttgctttcgaactattaatttagagacagaaaccctaaaaagaaaattccaagcaaattggaatatataacggaaaatcataaaacccctaaaattatacatttgaactattatgtgtgtgcctgtctgtaacagctatagtgaccattcgtacacttgtaaaaataaataaatgataaaatactgaaaatgaagagaagcgtgttgagcactgcggtggtgtattaattgtcagtaaatcggatcatggctaactgataatattgatttcatccatatatcagatgattttcaatgttgaaatcagatcgagtcagctaataaatagaaacctaagatatcattaaattgcacacataaatatatatatatacgtaattatatatagatggagagaaaaagagaaagggaaatggtatatatatatatatatatatttatactctgaactgccaaactcgtagagctttccacgacttgagaaaatgatgagaccaacttcagcatcacacaatacatgaagctcataagctttcttcagcaaaccattcctacgctttgagaagctcacttgcctgttgatcttgttttcgattctttccaataccactttccctcttcccatcttttcccacctctaatcctaattt

SEQ ID NO: 17694 - DNA, 3550 bp, Cannabis sativa
atggggggtaaaataatcacattatttgtaaaatgctgatgatgcgaggagtttgatattttagttctgttgagaagactaagattgtcaaatgataattttctaataatgatctctaagaggcattttagaaaaataattacaaattaagttgtttaaataatgtggagattatttagataattaaattggtgaaaagtaattcttataaaaatttcaatttgtgctagaaatgtgggggtgagccataaatttaatcaaaatgtgttgagatattgttgattaatttattttattttgaatttaaattctaagtcaagtttggctatgtgcatatgtgaaaatattgacatatttggtgtaaaaattttggcaaaaataattcaatatatagattaaatatgtgtaataactaataaactaattaataatatgtaacatatgacaatatatattatttctcatcattttgtagcatatgggagagttacttgttactatgagtaatctctacatttattgtcaatattaagtgtgtaaaaagtgttacacatctgaatttgaaattcttaatgctataggatttatggtgtgtgtgttcatgagttacatttgagtccataacatccatggaggttatgagtttgactttcaaatgagtttgactttcaaatggtgatatcctaaacactatataaataggtctaaggtgctcatattgagatgaactaagttttttttttatcaaaaacacactttgttagaaaaccgtaaggtttgataatttccaaaactattttcatgagagttcttttagtgcttaaagataggatgatgaaataagcttttgaacaacaaaagtgtgtaaactttgttgttcttcaagtcgtcatggtgattctcactaatctacactcaagattatgagcgagtatattatatatatatatattcttctcttactatatgtattatatatggtgctgtaatctttttcttctagcttttctttataataattaatatataatgtgtattgtaacatatatttaattaatcttttattgtaatctttgtattattttataatagaatggtaataaaatcctaacagtactttatcaatattgtcatacatttgtatggtaaaataatttataaactataaacttgaaataaaaagatcttaccaatgtttttccactggacacaaacaaattctgcaaaatattaataagaaataacaaatttataaaaaaagtcgatctaaatgtaaaatatttagaaagaaagatataaataagaaatttatttgtaagtagttagctacaacactcaccaacagtaacatgagccgatggcatcattagacgtctgtcgaatatatggcgccagagccctgaagcatccagtataacaatatatcttactaactatttgtaattttattattataaatattgaaaaattctgtactctattgttgtccttatatctttgaatttagtactttaaaatataataatttatttttttttatataattatgtaaattatagttatagtagatatcggttgttatgacaataatttacagaatgttcaaacattaattacatatatatttttggcaattgactattttaaactcttattatagtatcatatattattcagaattcagaatcaggtaagatggttattgttatcatacaaagtagtatgtagacagtcatttaaaatgaattaaattataattttctcgataccaaaaataaatatagctattcctatgtataaaaacaaaactaatacactgtaattacctcctataaatatatatacacgaaatattatgtagttaactctaatgtataatcattgtaccaaatgttcaaaataatgtatcaactaatacatatgtttaatcatatggatatagttgtgtgtatttatatccaaatccaacagaagatcatcctgtcagttgatacatcgtttcttttttataaatacatttgatatagttagtacacaaaattcttatacaagcatagaaataccaatttagccacgtgggctagcctagaaataccaatttaaccaattgggattgggctcccaagtggttaaatttgcagttagggtgtttagggatcctggaattgaattttcaggttatgtaacctaaggttaaggtatataaggctcttttttcaactaaaaaaaatgctactaatttgggaaaatcaaaaaagaaacaaatataagcatagaactacttactgcacactgttgtaatcgccaattttattgccttgcaataaccataaacacaaaaagcctcgttgtatattttatcaatgtagcaaagtttttctttgtcattcttttgcaaaactcggatccaagaagcctcgaaaccattgctgagctcatcgtgtacatcttggtatgatatagtcatcatcgtataattcctatctttcttaaatgatacgagggcagtttggtaaatttggcaaaactcgaccaaatcagagtacttaaagccactagcataaacaacgtacaagaaccttgctttgggattttcagacaaattagaggtgtttatgtaaggagctgtgtctatgtataaaaagaattgtacactttgttttcacagctcaagaataacacacgctctgaagttggatatgttacaaaatatgtggaccaaaacctcttaccctttcgaaaagtaatttgtaattcaaatggagaagggagattagatgaataggaagttgggatggaagagaaattaccctttttgatatttggatccgaaagtctaattgtgtagttgttgtaattgattgcctcaacatggtaattatagcttcttccatgatcattattatgtttcaaaaccgtagtttggttgttgttgcaagaaagaacaaaagcattatttgactttgatacacagctgggtggatcggtatctagtcggaaaggagaggttatattatggatatttccacaagatgaaaaacaaggtctactttctgtggtctcatggaatatagttattatcattatcatgagcagaatgagatttgaggcttccattatacacaaaaacataggttagtgttattgaaacacatgtatatatatcattattaatactacctctagactatagtcaagtcaatgtctactttatttctttatttattattattattttttatataaatcacacctaattaccaaaatcttattgggggttatagtttagtagttagtatgtgtaagagcatctccacataagtgatctaaatgtaaaatatagttccttttattaaaagtctaatttaatagtgtgctaaactatgatttgaaaattttatataattaatagtaatctaaatttaaaattttatttataccccaaaaatttagaaatacaccccattttaataatttttattttatataaatttatatctactaagttttttcaacttttttctttcaattcatattcttaaaaaaatat

SEQ ID NO: 17695 - DNA, 3919 bp, Cannabis sativa
gctgaatttcactgttacattgctcattcgcacggagaaattacacaaagtcttgtcttacttcatcttgcttctagatcgactccaaagaggatttgggagataatggaggctggaaaacatcaacaagagcatgattgtctccattgatttcttcctcatccaacatctccaatggagctattccattagcttcatcaatcaaattagctctaattgcatcagattcaggattcgagcctttctttttcagattcttagtagcagatctagctttccaatgaatttttgatcttgttttagccatggcaccaacttctcagctgcaagagcaagaacgcgtgggaaaactcccattaaaatattgattgtatatacaattttttaaaatatatataaatatgtgtgaattaaattagatcgattacttttacatgtcaatcaacatccaatctgcaaaactacagattttaaattttccaatcatccgatctacaacaagtgcagacatccgcactttgcggattggattgaattaaatattttatgaacacccctagttaaaacccctaaatcttaattaatttttcaagaaaattctatggtgaaaaattaaaagtaactggtaataattaattttaatttgaaaaaacaggtcgccaaatttgaattagtgaagtcagagggttgtttgcacgtgcaattgccaaccttctgctccatgaaacatgagctggccaaggatattcaccaaaaccaatttggtataatgaaaataaatgtatatgtatatataaatatatataatatacacacgtatgtttaacaacctaagcaaaataattaatcaaattcatataatgcaagagacaattactgacatgatacattttcctattcaaatagagggctcctctgctttggtatcttccctttaacttgtctagtacatcttttgtttcctgtcctttagcacatacatcaaaacattatataaatatgtatatcagatacttcaacatatatttgttaataagaaaatgtttccctggttaagttgaattatatagaattattgagcatgttagcttcataattttttactctggccaatgtctctgattcccaaaacattgcattaattttaggttataaattcaatgtcaattaatgatcactctctcgcagttggacagtacccatatgaaagtcaagataatatatccatacatgatgtattgatacagacagagacatgcatatattccaaggttatttgtatatgaatatgcatgaatgaatcaatcaatataaacatataattccaggcaaagataaaaagagacataggtcacctagctattcattcaccaaacatcttaaaatcagtgctttcaaaatgtttaaaagacacaagacaaattggtgctattcttcaagctgacaatgtttggacacaaaacctacatcaatctattttttgagtgtagtttttaacaattcagaatatgagcagagaagtaacttttctttatattatcattccaattctaagagcacaaatcaagtaaatcaaggccagatgagattgtttattgggaatatttgagactgtcccatgaagtagtagtcctatgaattgctaatgtaaaactgtataaacacaggtcataccaaaatggtataatccaaggaccaataaatatttctcttttattgttttccaattcactcagaaattttaaagaattgttataattattggtgtctaataattgataacaacagttagatttctataagagaatagtcaagtaacagaaagcaggttctgaatatcttcctataaataattaatgagaaatagaacatttatttaactttgctacctatcatatgagttccatttcaaattgattgagttggcaaataaatacaatagatatcttgttccctggattgaaatcttagttggatatcgaaatattctaatgcttgcttacacgtgcatttcctccatgttttcctgttctacagacaacctccattaaatcaaatcacttaaaaaacttgaataaactattcatggaatctgacaaaagggaaatttccatcaaaccacacgattatatatgatatgctctcaatctaaatcccttatataagacccaaagccagaatattgattcccatagcttcacaacacagacatatccaaacaccaccaaccaatcctcaaaatggctcacctgcttctcctttgcttaatcttctcaaatgcttatctgggtctagctcaaactcaacaaaaaattcagaccatagtttggtctagctcaaaaccattatcaaacaactcaccagccccaagtccatacaaagctaaaacagatacaataagaaagctaggaaaacaccaacctgaggtgaccatgtcctccagtgaaccaacaccaagcccaagtaaaggaaaagatgctgctgagccctcaaaagaaactggtcatcatgacaaagccccattggggcaattcgtcgaacaccatgagggcatccaagttgaaaatgtccacctgagcaaacatcaccattcaatcaataagtcagtagctggtgggggtgttatccttggtgggcttgccaccaccttcttggtggcggtgttttgctacattagagctacaggaagacataaaaacgacaccgtttcatcggttcctggctctcctcctgctgctgctgctgctgctagtgcaactccacctgtataaaactaaacgacagtcttattagctcttctttttcttttcttttatctttttatagaatactgtaaagaaattgaataagtttaatgtcaatttcaaaattcattcaacaaattaaaatgatgggaacaaaatatgaaagaataatagtttcacatagtgtatctacttctacatatgaaggctaaaactttcttggaagaaaaagaaaacaagaaaagggacttttattgtacattttcacacctaatataaatttggaattgcaaacatctctaattttaaactgcctaatttagaattgaataaataaaatttctcctataattcatgtagagttttgtttttgaactataaaaattgttgtaaatatcatcttttaattgtattctgctcaattttttaaataatttattaatattgtactaatataacattactttaatttagtttaagagactaaataaaaaataaatacacaaataggagcctaataattaattataaaaatatgtatgtgtattattagaagtaacgtttgtatatttaatacgagtaaattgaattttttggtagtttaaagttgttaaaaaaattattacactgcaattatacatataactcagaaccacatacgtaaattgtttttttttttaaaaaaaaaataagcataatgaaactggaagagatatttgtaatgatttgtatagttcgcgagaaatttttacaataaaaaaatttaagaagcaaaattctacaagagttagagttcagtgggcaaaaatcctatttattctttagaatttttttttttcaatatgtccaataatttcttcaatttgggtgcattaattgatctttaatttttttttatatatatatatacaattattattgttaatttttagcatttaagtaattatatttaaaaaataaaaatataatactcatatttcaagtttaaaaatattatagtctaaattaatattaaatatttaaaaatgaaataaatatttattgaatcaacattagtattaaagaaacttaattttcttatcatttttaaagaatcaatcaattatttagtaaaactcgaagcaattttcctttttttccttgtgttgcctaaagcatctttttttttttttttt

SEQ ID NO: 17696 - DNA, 2036 bp, Cannabis sativa
gggggggggggggggggagccacaggggctgagggaggttgttagtctcgtggtagagaagagcctccccaatcctcttatcaattaaagcaatggttagattgattggggatctgggggacccatggattattttattcctctctttccaaatgcagttaaagataatggtcgcaccctccaggaatacattgaagtttaagcccctcggtctcctagtgtcttccttgaacaacattagccaatcttcctagttggagagggagtattcgtctgttttgagatgccaaatgctcccaaaccaaatcgcccttgcatgctgactggtccagaacaggtgcagagagtcttcctcagaagtaccacaaaaagggcagcttgaatcatttactctgaatatcaaactgagcttacttcgtgtgaggagataattggcaacaattttccaccagaacatcttcatacggttatgaattttttcccccatatcatacgctatttggggttcgagttatgggcatcgcctatgttttttttttatcaatctataggccgatttgatactgaacttcccattaggctctggagtctacatccaagaatcagccgtcgggtgcgtagggagggtgatattaagaatccttctagcatcatcaaaatggaaccattgtctcacccggtcttcatcccaatgattatgaacgatgaagttacttacaaggcttatgttggccgaggcatcctggcaaggctggggttggagagtgccatttggggcccataaatgaaaccatatagaagtatacttcccatctccaattttcctgcaaagtcctttggagagatgatctctaacttttaaaatgcctttccaaagcagggagtctgagatgttaggttcgatgtccaagaagcattgattttttaagtatttagcttctacaacttggctccataggcttgagttgtctcccataattttccaagcccacttcatgagaaaaggtttgttagtagcttctgtggagcgaaatcccagcccttcgcacactttgggatgacaaagaacatcccatgcgatggagtgcagagttctcttctcaatcgagtctccccaccaaaaatctcgtaaacctttgtccaccttattggcaatggaaatggggatcacatctgaggaggcaacgtaattagaaattgccgatcccactgatttgattaagcacatcttacccgcgctggataggagctttgctttccaaccttgtactcgttgaagaactttatcaactacatagtggttatccttgatacggttggccgaagtgaagagtgggaggcccaaataagaagcattgtatggcattttcttcatccccaaaaaatgtgagatagctcgtgatttacttcttgagacacctctagtgaatagaatcgaagatttctggagattgatagactgcccagaccacttacagtacttagtcaagcattctgcaacaaccttagcttccttcattgtggcttggccaaatagcatgatgtcgtccgcgaacatgaggtggctgatggataggttgttccttcccagctggaatccttttagacgccctctgtcttcttcaagagtaaggagccgcgacagtgcttcagctgccaaaatgaagagagctggagataggggatctccttgcctcaatccccgctccggtttgaatttgcttgcgatggaaccattcagcagcaatctgatttccttaaccctgatacaagcctttacccagtcggtgaaaggagcagtgaatccaagtctcaataggaccaatataatgaaatcccaatccatcttatcatacgccttttcgatgtctagttttatcatcataaaacccttagaccctctttttttcttcatggaatggacgatttctctggccatcatggtattttctgagatgcatctcccccttacaaacgttgcctggtttggggaaacaagtttctgcagtaagtcccgaagacgagaggcaatcact

SEQ ID NO: 17697 - DNA, 4504 bp, Cannabis sativa
caagggtctgaagcatatatgttacatcagttattgtatccatatagtattttgcactgcttggcttttgtccaaccgtgcaaggaaaaactaaagctttaggggaaagaatattgcctagcttttcactaccaaatatttcaaacatgtcttcatcggatctatcatcaccaatacacaacacaaagtcagctcgcctccctttttcagccattgatgagaatatcctttctgcagtaatccccttactagctccctggaaacaagaacagaaacataatactgtatattagttctactaattccacttagatgagggtacacatttaaattgttaaactcattcgtgaaaatgtaaatttgcatgagcaactaaggcaatgaatcaaaggtatattattcaaaagaaatgtcagtaacttatagctgtctatgaaaaaaatcgcacaaatttatttggactcctaaaactatgctcaaaatgctttgcaaagaaatcaaaatggcttgtcataaaccaagcatctaacaaagcagttcatgagtgataatcttttgtagtaaattaaattctcgttaagaccaaatcagatgacagtacacatagattgatgaagatagatataatcaaaatcaggctgaatatttttattctacttttttcactttatatcacccaacagaaacatgtttcctagcaagtactttattttgaagttttgaagttgagattaagagacatgtacctgaggtttaatctctacaatgtactttccactatttacagcaacaggttcatttgttaaaacactctcgaggtgacttaacatctcctttgcctggaaagatccaaacgttgggtctgcatcttgatattgccaaacgagagaactttccttaacttcaattgaagaaccatcagtagcatcagtatacaatctcaaaacaggttcaaccagatccatccaaccaaattcaaagttttggtaactaatgtcccactcgtcattttgaggccacctaaaatttgagaaattgatgtaaataagattttatagtgaaggccaaatgttatcatagagtcatgaatgattcttctagaccctcacctacaaagagagtagaaaattattgagagagagtaagagaagctcacctgataaagtatccatgttctgctgcaattccaaggttctggcatgaagaaaaccactcgtttaagtgtttcttccctctgccactaacaatgaaaactgtattcttttggtcagcacaaagtcttttcagagttgagataacatcctcacttggggggttgttgatggagttttggggcattatagtaccatcatagtccagcagaataacccgattttctgcattgttataagctgacagaatatcttcaactgctagttttctgaaagtagcatcaactgacataactcgaaaatcaaacccaaaaccaataccccaatatgttttcttatagtggtcagcacaagttttgaacatgtcttgcaagaaactacgagaccaataagccacatcatgggtactaacatatcgataatgtttcccatgcctcaactctttctctgagtcactcatagaaatagcttgaagcattgcatcagaagttgcctgaacacaccatgggtttgtgcgaattgccccagagagtgatagtgaacaaccaataaattctgacatcactatcatgctcttctttggacttgatgaagaatctggtaagccttgtctacatacaacatattcataaggaatgaggttcattccatcccttattgctgtcacgacaaggcaatcagcaatgctgcaataagcaactcttttacttgcagagatttctgtgtctattaatactattggatcatagcctggttgcccaaattcttcattgatcctccggcagttctcttttgtttctttcaatattttctccacatttagtcctttacctctggcagggtttagaatttggataagcacagcctttccacggtactttgaatgttccctgagcatctgttccattgcaagaagcttgaaatttatacctttgaaaatgtcaatatcatccacaccaatcaacaccagtttcccttcaaattgctgtttaagctctctcaaactacaatccttatctgccattgccagcaaggactcaatccgacccatatgaatcccaactggcataatcctaataccaataatccttccatgatactccaattctaagtatcccctctttaattgataattcaaacccaacaatcggctgcaacaagagagaaaatgtcgagcataatcataagtgtggaatcctataatatctgagttgagcaaagctttgagtatgttctctctaacagggagagttctgtagatctcagacgaggggaatgggctgtgcaggaaaaatcccatcctcaattcaatatatcgcctcctcaacaagtatggtagcaccatcaaatggtagtcatgaatccaaacataatcatttattgggtttagaatctcaaccactttattaaaaaacaccttatttgctgcaatataagattcccacaaaggcttctcaaacggagctccttcatacactgaaaggggcaacatgtagtgaaaaagtggccacaacttcttcttgcaaaatccatcatagaatctttccgaaagatcaggttccaaaaaagtaggaacacaattaaaattctgcaaaagagtccttgacacatcgtcctcctccgaaagatcaacatcaacatttagagacccaacataaagaacccgcgtacctttaggaaacccatcctttaaatgcaaaagcaaagaatcctcattcaaactgaaacaccacccttcgttatcctcccttctcttagcttttaaaggaagatgatttgcaacaataattactctatcagatgatgcttgatcatcatcgtcattatcttcatcattctctgacgatgaaagcctttttctcttatttttcctaagagcagcaaaattcccagaagacaaatcatgaagatttgaaaatgaatttgtcatactgttctcctcctcttgaaatcagtaatcccacaaaagactttcctcacaacaaattagacgggtttcaggcaatctgcaaatgagtcactcagttcttgattaaaataacagtaaacatattcgaactgtgaaaataacacacaacaactaaaaggaagggtttgaatcgacccataacatacaacaacaacaacaacaacctacatatattttaacacaacgcactgataatgacaaactgataacatttaagatcaacatcaaaacgtcattacgaaactgataacaataactatttaaaccataaaaagatgatgaaaacacattcaaacaaaaacccagttcttgaaaaagccctaaccttgtaaaatgaagggtctgtaagtgtacaaaattgataattgagaagagctcttgcatccatcgtctgagctggtcactcttggagccaagatttatacagcattactctacactcttcttgatacttatcatgagatatttataaactgtcgaaaacatctaggcttattccgaacacaaataattgtacgtttgtatatatatggaatcaaaagaagaaaatatggtcatggtcatggatacatgaatattcaacacaataaaatatcaaaaaaaggaatatatatagttagtaaaatataataaaatgcaatcaaatatatcaattcagcatgcaagaaaacgtgaagcaaatccaagaaattattgacaattggcagcctgtgacaaatagtaaaaagacagaccaatgaacgttgagaataagttcagagcagctcagtgggagagagcggtgacagacttaacaaagtggaactgcaggtgattttaacaaatccttattacatgaaagggatgaaattggatagtgttggtgagctgactagtagtaggggtaagccagctggactcacgcggcgaataaacacgcgcttagcacgtgactaatcaacaagaaggctttggtctgtatgtacggaagaagcgttactgttacttctgtcgcaaccagttttttattgacagcctggcggattcatcaggggatgacacgtgtcaaaaaggttatttagttggttgactttacagagaagacagctttgacgtggctggaatgagaaaaaacagtgaggcggggacgaacttatcaccagataaagagcatatgctctgactttttaaagaaaaatgtttcaagactaactaggacatttttatatgttaatgttggtattaatttaaaggctaattactaatatttttcctgaattttgacatgtattaaatcgtgtcccctgaatatttttgactgttaaaaattctcctgaactattaagattgttaaatttaagcacttttgtctaattttagtaaaaaatttctaatatggatgaaa

SEQ ID NO: 17698 - DNA, 7038 bp, Cannabis sativa
tagattgactatcagacaagtgttagtgatatatgaacaaaatctgtatgggatgattttttatttaataatttgttttagtagacacaacaacaagagaagaaattaagatcagtttcatctcatctgattggagtggaagccaataagaaagtagtgagagtgagcatttgtattgacaaaagtgagaagagagtgactgcctactgttttggcctacccgaaacacatactccatgttccatctctgctttctcaagctatttctggtgcaggagtcacctttgttgacgtatcagagctcaaactcaatctttaaacttgtcccaatcagcaacacatgactgtcattgatgatcaccaatgtctttgtactatttgtccccatgacatacgttcctagagattttgatacatatagccttgaagaggaacaatatatagacggtatgccccgtttttatggatgtcctacacctggacccaaacctggcttcttgagttgtgttggaaatggatttactgataaatttcgagcttccaataatcttcagtgggttcacaaaggttgtaatagcactcctggtcctcttaagaaagcactagacagcattgcctataagctaaacaattttcaggattaccttctcaaggatgttgatataggttcaactgaggtatgtatttatatataatttggatattttcttgtctaggtagggattaataatgccatatttggctgtgccaagcatctgagactgttgtgtgtgcaatgccatagttttacttttatatgatgactcatatctaggccttgaagaaagtgagagcatctttcaagcgcagtgatagagctctcacctcagtgcttgaacattttattactcaagtaaagtacaatataatatttgttaactcatacacatcatatgctttttatctatataattattgttctttctgtttgttgtctctgataaatcccctgcaggcagttggggacttaagttttgtattataactaattcctggtttggtctaatttttacatttctgatttggttttggacttaacatggcgtactgcattttgcagcctgcagcgatgcgaaagagaaaagcttcagaagaggctgggcaaccatcacaagaggctgctcgggacgaccctagtgcatgcatctgcactcttgctgcagagagagactgcgacacaacctcctaccaccccctaatgcatctgcttcttctgaggtatttcacttaagttttgtcattttgtattataatttgtgtatagttaatgaactaaaagaatacaaatgcttttgtgtttttgattcagagggatgatctcttaaattctcaattagatttgctcagagaacttgatctcctacataggcgcatctcggttgtggccaaggtccccatcagacacttcctatgttcatcaataacttcactacttttgttagacaatttgggcaatcccctccaccaatatagatcaacttttaatatattcagatggtacattctgatattaatatcatgtgaagaaaaccacaactaatatcattcattatatattatatgtatgtaactcagcatatatacacaatatcatttcaaatctctataggaaaaaaggaaaaaaaaaaaagaatagggttatgtgatgcattcacctatctaccatctgcaatggatgtagtggaccaagataaagacattgaataagacaatgaatccttcatatcttcaaaagttgggtgtgaagaaccaaacccaaaactctttggaaactcattccaaaacttaccacccttttccttattcaacaaatacacatccatatcttctgtttctccatcattattaccctcatcatcatttgtttttccctctaacattttcacaacatgtctcattgttggtctagcatttggttcagggtaagcacacaacaatcccaattgcaaaactctctcaacttcttctttgtcaaaatctcttttccttaacctctcatcaacacaactccataactcaccttgactcatcatgttccaaacccactccactaaccccactttcccttcctctataggtctccttccacacataacttccaaaatcaacaccccaaaacagaacacatctgtttgagacgaagctcgaccgttcttcacaacttcaggtgccatgtaaccgacagtcccaaccacgcgagttgtgctaggaacctggccatgtccatgcatcctagctaaaccgaaatcacctaaccttccattcatttccttgtcaagtaacacattactagcctttatgtccctgtgtagaacttttgattcccaaccttcatgcaagtacaaaactcctaaagcaacatctttaagtattctaattctctcctcacaacccaacaacttactctcatcaccattggaatcgaaatcgaataccctcttgtctaagctaccattctccatgtaatcataaaccaacatgaacacacccttctctctcttacaccaacctctcaacccaactaagtttctatgtttcaatcttccaaggcttgaaacttcagctaaaaactcccttaacccatcattcccatgagatatgagtttcacagccacttcaactttttcaattacacccttgtagactttcccattcccaccaattccaatcacattagcttcatcaaatccctttgttgctctctcaatttcatggtaactaattctatgtggccaatactccaattcccaatcttccatctcagctctttccttagctcttcttctctgtcttttcatcaaacacataaccaacacagcaaaaacaacaatcacaacaaaacccaccaaagttatccccaaaatgaaaccttttgacctaaaaattggatctttaggaagaacaaaattaggcaaaccagttgtaatcaaactttcccccaaagaaaaattagtattactaaaactccaagctaaaatcttatgactctgtactaattggccagttgagcttgtgaacccaaaatacatttcatccttaaaaacctcagaaagattatactcaaaactcaaaagtggaatctttggtctcttcataccagccaaaaccatcccaacactaatcaaagaatcattataatcaatccaaacctggtaattttcaccactattaagcttcaatttcttgaaaatcttctcactttcccaatacccagcttcatgaactttcttggattttaaggcattgacatcaatcccaacatggttatcattcatgtcatcaaattcctcattcttaaacacatcaaattcaaccccaaagacatgattatcagctcttccttcgtttgtacggttgagaaaaccaaggtgttggactgcaacggcgccgtttaggcctgtggaggggacgatgatgaagaccaagccgtggcctggaagaatgttcttgtaaggagccatggagaagatgaaggaggttgagaatgggaggactaaggaggagttgggttttttggttgggatttttgttttgaacagagctcggccgattgagaaatgggtgttgtttgtgagagtgagaatgttggagtaatcgtcgactgtggcgttgccatagagaagaaggttgttgtttgagttgttgaagccattgaagatgaactctactgacagagctgaaggaagaagaagaagaagggtttgtagtatgagaaggaaagtttgaaactttggtggtgttttcatggtttgattacagaggaaaaagttacgaaaatggttttttcatggtacttatgggaaaacagaggaatgaaacaggggaaagagagacgaagaagaaggtgatgatgtaaaaaagtcaaaagataatctttggtcaaatttataaaatactcaaattaattattattattttttttaattaaaatactaagtcaatgctaataagaatactaataaaatgaaattggaagatatcacattgatagttgtaaaaaaattatctctttttaaaaatacattttcttttattaattttaagaaatattatattattttaaataaaaactcaaaatatttttttccctttctttaaattttgtgtgaattaagattacgtgctagtgagaaaacacacactttctaattactacacataataattattgagtaattattccgtaataaaagacacaaaagtttattattagtagatagggttgaggttttttcttaagaaaataaaatataaattgatttgacagatgatgctttgtatttccattatttacttaattgacatatttaaaattttccatgcaaaattacgtacgtgcatgtatatttgaagacataattccaactttaccctcctatatacactaaaaagtcaattagataagtgataaaactttttttagtacgtactgtttttggtaaaaaaaatggcgttatttcatattccacatcataaattaaaatataaataaggttgttgagtacaaaaacatagcagccaattaagaaattatcagccaattgaagcaagaataattaaaatttgattattaatttgaatgtgaatgtgaactgtgaacgtgaaatatatttatatcaatgcaagtgggacatttattacgactacaaagtctatcattaattaattaatggataaatattttaacgtcgtatataataccaaaacatctattcatccaagctagtttacccaattaattacaaaaagttgagagaaataaaatttataatattataaatatggtaacaaacatgttcatgctcctaggcaagctaataaagttgttcatgatcttgcaaagtacgctttaaaattgaatgaagatgtttcttgaataggggaaattccttatcctattttctttattattgtaaattaatgacggttaatttataataatatagaaaattttcaaaaaaaaaaatatggtaacaaaagaaatcatgcatgccaataaatataatcctaggtacataaaagaatcactcaaataaaatcaacttattattatttttttgaagaaatttttgttcggaactgaacttcgacatgaattaaattatgttgagttattgagataatttaaatttaaatttttgtcattttttattaacgaaaatcgaagctggatgaaagttgatagggctcacatatcaaagttcaaagaaatttgaaagtcctaattactacgaaatctaattgattaatctcaacaaattagttctaagatctgaacagaatttaaaatcaaaaaacacggaatttataagcttccattggaaacgcattccaaccgagtagtgtttgggttcccttgaaccggcgggtaaagtaacatccacaataaaatcaattcaattacaaattccagatctgattatccaaatcaaacaatgtaatcaaaattgacttttacacaatgttacctaacacttgaacacactcaagttttgagatctaaactcatttagatctcagtacacaagaactccttgcaatctcacagctgaacaatctccaatacagaaatagtgaactcccttcagatcaagcagattcaatctccatcttcaaccacaggaagacatcaggaatttctatctgcaaacaacaacaaaacaaaataaagaaatattttattgccctagcagagcaagaatcaagaagatgattctaaccgaagagagttagttagaaaaacagaagcaacagaatatatatcctgaagataataaaaatcgactaactaaccaaccaactcagtacagctggcacatactaacaaacacataaaaagctgacatggcactaaaataggttttagagagatcagatgctactaaccacagcaaagatgacaatagacaaatactaagacagataaactgaacacagagtatttacataatttgccacacaaaaatgtgacacttacagaattgtttgtagatatcaaagttttgagggcacgatttaatacataaactcgtcgtgttagtgaataaaattagacaaaaattcttaaatccaacgatctcaataatttacatgaatttttaacggcctaaaaattcaaaaggcatgatttcttatttgtcaaagttagaagaacaaaaatcttcattagttttttttaaaagagatttaaacttgctttttgaaaaaagatttaaacctattattaattttaaatatatatcattttgaacttaaatatatatatatatacattttcagcacacatcatcaaagttgaaactgcatgcatttaaaaatcccttcaaagagaaaacgaaaagaaaagaaaaatgagatcaaattaattataaggggaaaagacaattacacaaattatatacattgaagtcttttcacaccaaaccaaaaattataaccaatatatcagaaaagtcttgtatcttcagaaatgaaagctaaaatattattatataattaaaattaaaagtcttctaaattataataatattagacctgaaaatagtacggatatccgtatacacgtgattcaaaataaaataggaaattcttgccaaacagagacaaactcccaagaaaaatgtcatccatgatatcattattattaattatttatttacttacttattatgtattgtaataaattaaaaaaaaaaatcattcttatcaagtgaatggatttatttgcttgtccattaccatggattatatctttatataataaacatgaaaatattccaaagtcggtcacgcaacctaaaacataattaattataaataattaaatatataattattattggtgcaagacaactgtaattacttgaccattgctccattaccatcaacccacttttatcaataatatattaattaataattcctaattaaagatatcatttatttaaagctattttccaattttctaaagaaataataactcataattattctagattt

SEQ ID NO: 17699 - DNA, 5804 bp, Cannabis sativa
  modified_base (3303)..(3303): a, c, t, g, unknown or other
aataaaattatttatagatattaattattaagaaaagtatactaaatattttaattaaaaagttattttttaaagtatataaataatttaattctgaaaaaaagttacctattaataacatcatattataagtacaaaaaatataatcatcatagttacattcaaataaataatgaaatcattgaatagacatcctaaagatgaaatatgtaaaaattgaaaagcacttagaaataatgaaatcatagttgcaaactaaagaaccacatttgaatatacaaattcttacctatgtaattaaaaaccattactcatacataggaaaaggttctaaacataataaactatcaaaaggaatcataaaattacatccttgttcccttagaaaaaagttggaagtacaccaatttatgggttgttacataactagataaagaaaagggaaactgtgttttgttataccttatagctgttgcaggtttctctagcaaactgcataaaggcggcttcatccttatacttggtagaaatatctcatttgtgaaaccttcttaccattatggtcttctagttcttctaaacaaaagattttgtaagattttgttaaattttgttaataaaaaaaaaaagaaaaaaaagaaagaaaactccgaaagaacagcttacaaggtaatcatgatgatcatatagctcttggaggtttctctagcaatgcagaaaagtagacttcatcctttgacttgggtgaaacagcccacttgtgttttttgtacctaaactgcagaaacatgtacatgaaatcatctaaatcctttcttttgcagaaaaaccgatctatccacaacaatcctccaggcctcagaacccgatcccagtcgaacaatatgaaatccaccaacagcaagtctatccagccatcaagaaatccagatgtatgaatcaaatccatggtgttgtcaaagaaagggagcctttggtttaatgtgagataaagaggaatcaagcctctaagtgcaatcatctcattaaaaggagcacccaggttgagagcagttgtgatgattgtcacatttttctctctcatccttgctgcaaaactccctgtactaaccccaaagtccaaaccaatccttatctccccgggcttaattgccaagacatcactgatcaggatatcaacagggagtgagctatttgtcacccatttgagcttctctttctccatttcaaaacatccagcgcatttagaatatcctctcttgggatttttacttgacaagcattgaaagtttctgcactgataatttccccacctcacatttctgtcatctgggatctgccaaagggactcattgatggggtatggcttctggtagaccttggaggctcttgtcaggcacctccttcggggcaatggatcacaaccattgagcatcagcttctgagctaagttccagtcatcgttgcagtaagatccaatgtcataatccatgtacttctccaattcacttttgctcaaaacacatgaatgtccaattgtatttagtaccttctcagtcccatatatattgatttttccaaccctgttttcttttggggttatgtattttctgatctcttcattgacaaaagtgttgatcaaaggattttccttcagtgttgagtgtctaagtccttcaagcttaggcaaacgaatctgcctaagagcaatatgggcattgtaaagaggcctgattacttcctgctccaagtatttcttgtgctccaatatagtaatagtagttttgtctagaggctcattcttcttctccatttgcagtacagccaactctagcttttcttgtaagttgtccatcttgtttaacacttctgcaattcgatccgatagtgctattatgtcgaacccttcatcaacaaccttattctcaggaatcacagcataaaaatgtttgcatatgtcttcattatgcaagaaaaatccagcagaatagaatctgaagagacttgatacactaacaattattacaagccctcccaatacaatctgaagccaacccatgatcctggtcagtctgcattttggaaagcacggccttttcatcctccttaaagctcaatgttgaatctttcagctagccaaaatcctgtagtttttttcgttttgctcaggttttgaaactagtaaaaggccatcatttctttagtgattgccataaacaaaatgaatgtaaatttttaatacagatcaatcattataagctttattgtaacagatatatcatacatttaaatatcatgtaattaagaaaaaagaaatgagatcattcagctagtcactcagtaattcaaagatactacatcacgtataaactatgaagtgataaaaaaagtaatttcttcattctctttgaatggaatgccagtcatacaagcctcttcattaacattagcaaagccagaaactaaaggcaattttaaaactcctagtattatccaccaattttctcagcaaccaaacagaaactaacaaggtaagacaagaaaacataatgaaaaaagttgaatgcaaaaaaaattattaatattcatcgaaagggtttgctaataacctcgattaagacatacccagataaagaatctccaagaacatgcatcaaagtgaagctaaattgccattttgctagctcaaactcaaatattccgatttcttttccactagaaatacaaaagctccctttcctaaacttcggatatacgcctaagctcataaacttccccatggagttgttttagcgctggaaatccgtagtccttaagcttaaaattttaataatgaattaaccaacaagttagtgtactaaaaagttgtaatggcttatcatttatcaattaaatactcaaggctctgtcgatcaagaggctgcaaaagccaagctcgaatctcaatgaataacccattagagaaatcagtagaatttattgccaattttgaaaattcaattgtttaatgccatggaagcgttgactgtgaggctcttcaccttaaactgcggccaacccgattctcttttttttttttttttgataaatatatggaagaaaaattaaattagtaatttgcggcataaatattaaatcattatacacgtgtcattatttttattagtacatttaaattaatttttttaaaaaaatcaaaatttaatgattttgaccaattaggaattgacacatagcaatttacttaacatttaataatcagttacctacaaaagtttcagaattataacttaagtattattnccgccaaaaattaaacttaagtatttatttacaacttgaaattaaacataggtatttacaccgcaaattactcttacttttatatagaataacaaataatacaaaaagatgtgagattaaataaaaaaaaattaaaatatgggaattaaataaaaaagtataaataaagttgataaatgtttaaataataaatactgtcgaaaaaattgtcagagtacacaatcgttggaaaagtcaccggattagacatcgttgctagaaaaattactggagttgtcatcgtcatcaaaaaagttttgaagtttctattgtcaccggtgttatccaagttttcattaacaagacacatggcatgatcagagggaagaatacagccacgacaagaattattcgaggtaactaagaaaaggaacgtcttctagacctggaaggtaacaagagacgatgacctctgagggtaacttcttttagtaaaggacccagagcgcgaagccagcgtcttgtaataatcactccatagacggttgcacctttttctaacataggatcagattttgtcccctgtggcagatcatgatagtgcgcatacgcaccctcaaatatgttttttgcccaacaatctggttagagagtatttttcaaaggagagacctttgcaatgcgtgtcttagatcatacaaaggtctccacaccggctgtacaccacacgatgaagaaggttcttacaagccaatggttagatcgtcctttagtactgaccttagtagcgtatggagtatgaaacccaaggtgggtaaggggtatgccctttaccctatgtgtgtctataaatagtcctatttttctttaggcaaagagagaactattttacttacagtcactctgcaaaaaatctaacaaagctctctctcagtattgtaaccatcttgtaatctcataaacatttgcccaaagaggccaatacaatagactcgtggactaaggtgttaacgcagattttcattaacgattatgagcctattttcgtaataaatttggcacagaaatcataaaagatctaagaaagaataatagaaacagaaataacaccaggtttttacgtggttttgcagttaactctacatagtccacgagtcaatcttattcagatttttctgatacagaactagagttcttaacaattagtgtattcctttttctgtaagatttttgtccccccttttttgtatcatctgccctatttatagtaatataggttggcagttaattacatttaaaatcaaatcccataacaatattcccctaaattgtgggtttgaattatgctccacgtaaataaatacggttattattttgaaaatcacacatctgtgattgtgatttaaactgttttgaaggaagtcaacgctgatgcggattaagacacgttgccaaggcatctcactgaggtgtctcgcctagtacataaacaactcagtttatccataagtcttccaacaatggcatgagcaccagtgtactgagcaaacttaagaactgctctttgaccataaggccttgcagactggaaaatcatgtcattcgagttattacatttacttagtataatgtaaatcatacgctaagtgtgttaacagtcaattcacctcgtcaacacctctttatatatcgtgaggtagatgcctcgctatgtgttgtctatgtctttcttgagattatgtcctctgacgcgaaatgatttcttgtcaatacgtgaatcaatagtttgtacatccttgtctcgctaaagactgtgcagtctgcaaggtataaatatactctattaattctgcatttaatgagttattccattttgcattaaataatataattaccattatatttgttggttcatattctctgagactaatacgtgtgaccttctgaagtagcagccgaatttcgggtataataattgtccctcaaaaagtcattttttaatcaaaagtgctttttaaatgattaacatgggtattttggtcataatccaattttaaaatgtgcatgccattgattttggtaattttgtggtttcgagggacatcattagcattaatgaaccatcttttccacttctctcccatttctatccattggatcttctatatttttatctaacggttactaaattcaaagtattaaacggtaaagaatccactttttaccattttttgtcttttcaaaagctcaagctttctgagaatttttcatcccaacttcccaaaaccttgcatgccacccttgtctttgacattttttttacaaatttactcggatttgcttttcgacctcaggtgttcaaagaattcatcacatcgttcattccatctacatttgcaggaatttccactagtcggcttcaaacagtaagtacctcatccttctcccttttttttatgtgggttatgattatcttgcatcttgtcactccacttggtttagcaattcgggtttatattttt

SEQ ID NO: 17700 - DNA, 8745 bp, Cannabis sativa
ttttgaagaaatgattttaaattttataaaggatcagtaaatcatcaaatattttcagatgtgccttcatccagcaaaaagagtgaggcagggactcctagctgctattcaaggtctgttatctaagtgcagttgcactctgaaaaacagcagattgatgcttttggtaagcttaaaactcaaatggtttagtttctttagaacaagtgtttattaaagaaaatgagatggttattttaaaagcgatatgctctatggaaatctagatttctatgccctttatactatatgagcttgtgttttttcacatgataagttgattgttgtccttatgcaggaatgcttatgtgccttggttgttgatgattctgtggaggtgtcagcagctgcacaggagtttcttgaaaattcattcacgtcgatcgggaaaaattatttggaggatgatcttactcagatttttagcaggtttgggcttcattgatcggcgatagtttcatatactaaaataaactgacttttttttttttggttcttaaataagtagtttttttttctttcaaatcagactcattgataggcttccaaaaatggtgcttggaagtgatgaatctctagcgattttacaggcacaacaattgctcgtgataatatattactctggtccccagtttttggtcgatcggctcctccaatctcctgtacgtgattctctttgtaatgatgtgaattttagtcttatgccttccaataactagtagaccacaccataccatagttgtatgtactaactgtatatgtagttgcaacttagatggatggccttgttttttctttatgctcatagttcttgatggtcgtattcaggtaacagctgctcgattcttggaagttttttctgtttgtttgagtcagaattctgtatatgctggttctcttgataagcttgtgaggacatcctcggtaggataccttgactctgttgcacagctgaaaggtggaattaatttgattggtgatcgcttgactataatgtctgctgctcctaaaatttcagagtctgcagctagtcaggaaaaacccataacataccaagaggaacatacccataagaattatgatctcccacgcatgcctccttggtttgtctatgttggaagtctaaaactataccaagcactatcaggaattctaagattagtaggctcatctttaatggcaggtcatatttctatggaatatttatttattttgtataaaagaaattatttcagctattttccttttctctttactctcacatcaaattatacttctgtttcttgctagactttagaggtggaatacatttgtcacttattacagaaattcctcttggctacttgcgcaagttggtttcggaaatccgtatgaaggaatttaagaaagagagctggcagtcatggtataataggaatggctcgggacagttgctacgtcaagcaggcactgcagtgtgtattttgaatgagatgatatttggtatatcagatcagtctaataatagttttgcaaggaggtttcagaagtcacgaaaaaaggaaaatgagattcaagaaattgatgataggttgtctggtactcagcctcataaaagcttgtttactgaatcaaagtggaaagtttcgcatgaaaagggtgtaaggactcatctgatagactgtattggtagaatattacacgaatatcttaccccggaaatctgggatcttccaatagaaaacaaatctgctgttttagaacctgattatgaagatggagatatcagtttatacttctttcgtgatacagctatgctacatcaagtaatagaagtcttcctattactattgcttaatcatacatcaagctttatcagctatacatggaaactgattatggctttgtttggctttaacaggttattatagaaggaataggcatcattaatatctgccttggagaagattactcttccagcggatttctccattcatctttgtatatgttgcttgagcatcttacctcttcaaattatcaagtcaggagtgctgctgatgcagttttgcacgtccttgctgctacatctggcaatccaacggtaaggtttttcttataagcaacaattaacccttttcaagttagtcccggatggggttcgaacctataacctcgtgctttctctctcttcctcacatgcacacactcacccaagcaattgtgaggttacctcaacccctagcgctatctaactgtaccatgactctatattaactttatctggtattggaatgattcaactgtaaatatatgtggtagaatttatttacatattacgagtctaaacatactgttgtctttttcatttgttccataggttggacacctagtactggcaaatgcggattatgtgattgattcaatttgtcggcaactgcggcatttggatcttaaccctcatgtccccaatgtgcttgctgctatgctttcctatattggagtagctaataagattttgcccctattggaggaaccggtataccttctagacttgctgtacttgacttgttcttgttcaagaagcatcatgaagatttctttccattctaaatattgaggaaatattcatctctgttaaacttttgaatagatgcttttaattaataatgttcatgatttgatatttgcagatgcgctctgtttcactggaacttgaaattctcggcaggcatcaacaccccgaattaactattccctttctaaaggttattttttattccttctatgtttctgcaccatcactaatttgttagtgtaattatgtttgtctatttggttcttagattggaaagaagattcgctaattcattagaatggaaatagaaatctaatcagcaaagtttgcatttactgcatttatagtcttgttcaatccctccctcttttcttaaatttaaagttaaattcaaattttggtgactctctgatcattgtatgtttgtttttacattttaactgcttttgaaaaattatcattggactcagttatataacctccatatgcaacctttgctactaaactaatgatgtctggtcttgtacaaatattatactcattgttgttaatatgtacatatctttcgtttctttttttaggctgttttagaaatttccaaggcagccaagcgtgaggctcatttactgcctgaacaagccgagtcttactttacttacgtgaactctgtaagtaataccgaagtgagcgaaactgaagaatccaatcaggttgtaggacatgataactccgatattgatgtggttgacatggaaacaggttattacttttctatttaactttttcttttttcatttatggtgttaaaacctctcttgcacaaagaaatgtgaaaactcaagaaaatgatttttgttgttcccacatatgttttctttcttttcttttcttttctctctctactaagctatctttctttttaattgtgaatttaaatgcaattttttcttatttgtagaacaatgggaaaacattttgtttaagttgaatgactcaaagagatatagacgaactgtcggatctattgccggttcatgtattacggctgcaacccctctactagccttggcaaatcaagctgcttgtttggtggccatggacattgttgaggtatctttttagtccattcttgttttgagcttctcagtatagatgcatgttataacagatggtattaaaatataaagtcaccgagattcgatgagctttatgatattttcttaaaatatatcctttccgaatatgaaggaaggtgttatggcattagcgaaagttgaagaggcttatagacaagaaagacgcactaaagaagcaatagaagaagcgatcgaatcacgctcgttgtatcatcttcaagatactctagatgctgcagaggaaggggctgatgagaataggttgcttccagcaatgaataagatatggccatttttagttgtgggtgttcaaaacaagaacacagcggtgagtagtcatttttcttttacacttacccttgaaaaacatctatatttaactaagtgatctttctttcttttttatcattaggctgttcgtaggtgcttaagtgtggtgagcaatgtagtgcaaatatgtggtggcgagttcttttcacgccgcttccacaccgacggttcccacttctggaaacttctctcctcatcgccgttccacagaaccaatctgaagaaagacaagatccctctacaactaccttaccgaaacatttccaattcttcagaagacttgatggcggaaacttccaatctgaaagttcaggttgcagcactgaacatgattgctgatttggcccgaaataaaagaagtgcttcagcattgcaagtagtccttaagaaaatcagcggtcttgtggtggggatagcttgtagcggcgtggttggactgcgtgatgcttccgtgaatgctctttgcggcttagcatgtgttgatcctgacctagtgtggcttcttttagctgatgtttatttctcaatgaagaagaaaaaagacataccttcaccgccgatctcaagtttgccggagctgtatgaaattctacctccagttttgtcaccaaaagagtacctttatgctcagtatggagggcagacttatggttttgatgttgaattttcttctgttgaaaatgtatttagaaaattgcacactcttgtttttactcaccaaatgtacagttagttcaagacactttagtcatggttactaattgttaaaaatatccaaaatgaacggctgcttttctttttctttttttcttttctttttggttaggtagctaggaaaggtttaatttttagacaatggttatattttaatgctggggttttttgtacacagtggtataatatttcaggttagtattattaatgtcgttagacaattctaaatataccttgacttgagcatggctggctggctcaattctaaattatttaattaatattatttagttgtaattttatatatttttattactatattctttaaaacagtaaaaaaataattaatataattaaaaatatatacataaaaattaaatatgagatactaatagaaatatgtattgttatttgtaacataagaatagtttacacgaatataatgtgtcggattatggttgagattttttgacacaaaatatatataaatcgagtttatcaattaaacatatcaacctgtataacacgaatatgactaacacaaattggcatccctaatccaaagatgagagtgacactgctagctgactcctcacctcttcatgatttatagaaagaaaaaaaaagtgggaccacaaggatgtaagccccgttcagttagtcctaaaggaccaagtgaatgactgtaaaatcggccagttagcttcgggctggggagctcatatggctccacacacgtctcagcccaactccccaaagccttcgaagttcacccgtttccggagctgcatctctgcagtaatgggcccggggactttcctgggcctttattctatggttagtagaaataggcccattcacttctccttgtggtgaggtaaacataacagtcgaaagctaatatatatacatctattaaaacctgtaattaacctatgtgggactaagttctaataacaaactgaattatatataaatttattaaagtctcaaactcgaatagagagacttttctgaaaaaatgggaagcgaaagaatatctgagaagaagcagaagaccagtcggaagagaagttcttctccttcaccttcaccttcccaaggtattcgttttttaggttttacagagctctaattcttttctttcttaattgtgtttcccttgattttggtcgtattggtttttttttttttttcttttgtgttttggggttattttcagaacaatgagaaactttgatataatactttactcatatttcatttgaatgattcgatatctgatttaatatatctataatttttctctctgtttttccatatgttttctgctactaagtatgaaattttgttacaagtttcaatttgttagggtttttttaagtttcagatgagggaagaaggaagaggcataaatcagttgaagatgaagaaaggaaaagtagaaagaagagtagtagtagtgataagaaagagaagcataaagacaagaaaagccataaacgccattctgaaactgataataaaggtaactattacatatttatatgtatttagaaatggattttcagtagttatgttttgattgaataatttgaatttttgtgtttattctcagacaagaaattgaaggataagcacaaagataaagatgggaaaggtgatcaaatggtaatattctgattactttttatttaaatttatctgcttacatatattttggtatgatagataattgagaagaaacatttggttttttcttactagagttggttaagtgtcaagcaagcccatgtttgctcaagttctggttttaggttcttaagggatcctaattagtaatataatactagagttctctgacccatgaggggtagctcaaagggtacctacgtagcaattggaaggttaggtaaggatgctagtttttagaaaaatacatacacatatgtataagagttctctgtagagattgtagggttcagcagggagcaaacccgaaaatgatattttgattttgactcagctaatgataagaaaggaattaaatcaagtaagagttcaaactcaaagatgtttacttattgggagttttctttggtacttttctcgtctttgaaacttgttaactgaagcatagatagtttggtcattttcttaaattcaaaacttagcatactgtagctgattattaaatgcggaaaaccattagaatttagacaatggatcttggattttttatttgtctactagactagagatttagattagcatcagaaatgttaacagtgtaaataaatgttaaaattaatcaagttatggtctgggaaatttgacaagtgaactatgaccaaactaccttgaacttcattgctaaaactttccgaatttggttgcttgaacatcaaattcatgttggtaagaaaagtctgtttctttcatctttcagaattatgagttcaaggagcttaccaaagatgactacttctccaagaacaatgagtttgccacttggctgaaagataagaagaagattttcttctcagatttgtcggcagaggctgcccgtgatatgttcaccgatttcatcaaggcatggaacaaacacaaacttgattcccggtactacgaaggcattgttagcggacccaggactgcacataagtggaaaatcaaggcttgaatttagaaaaacatcatcagaaacaagctcatcttgttttaaagttaagatcttctcagttttgttgtgtattttaggagctttgtagtctactcagttatacagtgtctgtgattttagacagtgaaatggaaaatggaaagaaggaaaattgatcctattcatgttgctttcttctatgctattgctttttattaaaatacccttatttaaatatataattattatgctaataattcaaactaagatttaaaattttcatgtgaaataatttgaccttagactttgcagttgagttaatttaacataaaggcaagaaccaacgtgacaatttataatttataaaaatactataaaagttgttactctttttactttaaactatatataatattataaaaatacaacttgtgatctttagtggactgattgctgtaatgggtgaaatttcgttttaatggaattttaaattttattcaaaaaaaaaaaaaaaaatacaagtttatattaacttataacatattatatcatgtacaataaaatgtaagtctctctcacttatatatataaaaaatatatgtcccctcaactaaaatgttgggtccatcatttgtcccccacatcaaacttgaaaaaggcgcacaacacaaaaagtaaaatacttttcgtccaacgtccactacacgatcgacagtgcttggatacatgtaacatcagatgtactaagttttacggacgataattattccccaatggatctcacctacatgatccaaaatcaatattataatatattttacctcattgatagacttatttcatgtataaaatcttaacgagtttgggctcacacaaaacccaatttcaacctataaatagagttttatccttttatgcaacgagttaagaactttagttaaaaactatgtagaaatgagctaaaaacactcttatataaaatacttcacagctagagagcttaataatattaactcgagaactatgatttattaaacgtctcaactacatacaaattttattcttctttattttttaaacatttttcttagcttaatcaacttttaatttagtttctcaaaatcttaatacactcaaatatatatatatatatatatagagtaaactaattgagaaagaaaatcagaaactaaattatcatattagaggtatatctcatttcatcatatattagtattagggtgactattcaatggttatatttttattgtaactatatggttacatttttctttaacctgtaatagcag

SEQ ID NO: 17701 - DNA, 3687 bp, Cannabis sativa
  modified_base (1202)..(1205): a, c, t, g, unknown or other
attttgtccagattcaatgaatataaaatattcatttatcaaaaaatcaattatttattttatttccttaaatggaaaatcatttctttaaacaaaaaatttaatttcataattaaaatattcttatatatataataatgccgacaactgtaaataatacaatagttgctaaaaagtaacaacattttcaaagtttataccatagtcagtactatacgcatatacacaaacttcttgtaattacattatggaaataaaataattaaaatactatacggtgaccgttgattgagaatccatatattaggtcacattgattgagacaactaatcaaagtattaggtcgcgtttgaaattaattatattcttctttttctgccatcctaatctaaaagaaaactcaatctaaaacagatcgtagagaaaactcacaaacaaaataacaaatattataaagaaatatatgacttaacgaagagatgaaatgtcaatctcatcgagtagatattagagacaagtgagaatgaacctaaattatgaggctaggatattaatatatacaatatacaaaagtacatatatagagagagagagagagtttatatcatgacatcttcaatatcatgcattatatggccaatattatatatgtataaatgtgtgttaatacaaaaacaaagaagattataaatgatgcatgtataaaagagagaaaggagggagataaagagaggtatgcatgcttggctcctcgcacgcaacaagcaaaaaccaaaatagctttgatttgatcctcatggcatacagggagccaggcataacaaatctcacctctttcactaatttaacatacacaaaataacctctcttcttatataaatattataatttactgtaattatcaaatcctgagtacgtaagctaattagaagcccacacaggaggaattgttttatgttcatgagtaggtagagcccagtatatatagtagagaaaacgagagtacaaaagaagagagcatttatattctaattcatcatctaaggaaactccattagcccctcttcatttagaaataataaaataggaatgatctcataccatttatatgtcagatttttctttaaaggaatcaaaaaaaaaaaaaaaaaaaatagatggagaaatcttaaaagagaaagagaatatataatatatatatnnnnatatatatatttatttatttttattgattgatattaatttatgccactaattggtcaccaaaaatagatatcgaccacacatcaaccaccaatcatacctttttagtccgcttcactctctatcaattccatggtgacgttgaatatttaatattctacctatgacttttgggtaaagtttgcatgtgcctattcattcaaaatttattttaaaaaacaaataaaaatgaaaattattgattatattttgtaattttctatttttaatgcaattatattttgtatgattgttttgattgataattcaatggaccacatctatcagaattcactgaattagaaacatgtgcaactcttatttgggaaacatggtaaggtaatcttaaaaatgactttttggaaagcaaaaataatctacatgtcatataaagtttcaaatcgagtatgatttggtgtaaaatccaaccacttttacaaagtactattttaggaagattattatctaaaagacattaattatttctttttttttaaaaaaaaaaaaaaaaactgaatacaatattgcctattatagtttagcatgtttatccaaccatatgtgtgcttgttttttctgttttttttttttttttgacattgtgtacttattaatttcacgcgttattgaattattttaccatatatatggaaaaaattataggtgcctaattgacggggatatttttttattttattttattgagaaaaaatgacggggatattgagtatatactatgtacctacatatatttttatataaacaaaaaataattttatagtattaggtacgtacatatttttattgtactcttttgatgtttgtaattttatttacattaacccttcggttaaaatactatcgttgatgatacttcaatttttgttaagtttgaataaagtaaatagaaattctactttaattagatatgtaatttaacgtgaattttttgaattactttattttcattaaaaggttcggtttcgcactcgattatacgaaatttttgtttggccaaaaatgttaaaatttcttggcatgatggcggaattcttttaagggaggggttcccttttgttgttctcatctttatttgctaaggaatttcatcattaaaaaaaaagagaggaagggaatcaaaatatcaaagtactaagcttgattgtaaataatcaaaataaagaaatagaaatagcatagaatttaatatgtttctccaattttcgttaggaataggttccacgtggagcaaactcaaactttaaataagcaacactacttgccgtgaatgtgaactcagattccgaaaaaagaaaagtaacaaattattattaaacacaaataggaaaaatgatgaatactaaaaagcgtgttctttttcaagcatctctaattacattctttgaaggtaaaaatattaatatgctctaaatataactaaattcaatataatattatttactaattaataaaagattagaaattattttatgttgcatggttcacatgattatatatttaatatataaattctattaaatctcgaacatatagttactaatgattatactgttctatcagtgaaaaataatcgtgattatatgcttcaaactatttagttccacgatttatctgtgtattagatttacactaatgtgataattagcgatgtggtaagtttacttacacttatataagtcgaatgtcctttccataacattagcaaagtaaatttgtatcgaatgtatcgactatatatcagacggactgatattgtattgggttttgtgccctaactaaaactctattttaatataatcttgaatattcatttatcaataaagaaaaagaattattttattacttgtttaatgtattgcttggttcacatgtttgtttcatgatcatttgtttgatttataaatttatctaaattcttatcacattgttattcatgattactgcgttgtctacacagtggaaagtaatcaagattatgtgattaaatgtagtcacacgatttatcaatacacaagatttctactgatatgataatcaacaatgtagtttacttacacttggatagtgttatgtctttttaattaaaggcataggtaagtaagcttagattggatgtattattatacatcggactagaccgatattgaacttgattaagaaattataaacttactgttatatctttctaagtcataatcacttaattaatcttatatcaatgatctcaatcctcagatggttaggttctagctcaatagtattatttgtgttctttgatttattcgttacagttaaccaattagatcttcctgatacttagatcttgagaacatgatagttcaattaagtggaagcgctactcataatacagaatctatagcttctataaatgcataaaagtgaaatgataatttccttcaagct

SEQ ID NO: 17702 - DNA, 3313 bp, Cannabis sativa
  modified_base (297)..(302): a, c, t, g, unknown or other
gtttggtttcagctttgatcgccggttgatgatttgggtttgatttttctgactggtatgtttcgattctcattctcttatttgggtttcctgcattgttttctatttgaaaatttgtatatatgaatgtgtgtgtatatatatatgtatgtatatatatgtatatatatgtatgaatgatcctttatttgaattgggctttcgatgatccttttgataaagggtttgtttcatgtatttatttattgaaaataatatgttttctttgtttttgatgatgataatgatgatgatgannnnnntgatgatgatgatgatcatggtgaattttttatgtgtttttgatttgggtactgattaatgatttcataatgctgtttggatgattttcttgttctacattgttgatcaatacattgatttttgtatattttgattgtttatcttatttggggtttaataagaatgggtttttttttttctcactacattgtttttgttctattcattagaatgtgattatgattgtttggtttggtttggtttgttgtgatttttttaattttgatttttgggagagttttaagagaaacccttttttgactgaatgattttgttgttgttgttattgcagatctgtagttgtgtttttaaagtgaaatttactctgttttttttcagttttttcggttttcgaaaatggaggaaacaagaactgatgagtctgaaattgatcaactcctttgtgagataccaaaagccacttctgggattccaaatttagagaggtctaataatagaaggatgatgtatttgaatgggaatctctcttcttcgattcgattggaaactaaagaggttaacaagatgatgttggagaagtatgatcaatcagctgtggggttgaatctccctgatgatcaatccttaacatctgctttttcgggtttgaatttcaacgaaaccccggctgttgtttcagctgctgctggtgctgctggtgcttctccttatataccgaaaatgatgcaatacactcttccttctttggaaggaatgttccataacaacaacaatcagaagaagcaaaattcggatgtggaatcgaggatgatgtttgttccttcttatcgaacaacaacaacaacaacaccaacaccaacaactaacaatgtgccttatggtgtttataattatgagtctgatatgagaaaaatttgctatgacagtacaaacctttcgaatttagctaatttggaattcaggagacgataccaactcgaaacttttggtaatgctaatgctaatgctgttcctgctgctgctcctgctgctgttccattagatcattcggctgctggttttccatacttgcccgggatgcagccatataatcctttaataaccgagcaacaatcgccattctatatggaaccagtttcgcggataccttaccatcatcaacaacagattaaacaggaacaagagaggtatgtgagtttacaacatcagctgcaaaatgggaacattctgaataggtttactagaaactcgaggcaatcgcttcatgatgctacaatccctcaccaatatgagcaatggaaaccactttctgatccatatttgaacaattatgatgtgaacaattactcaaaccttttgaatccttccaactattctcacattggattcaacttgcctaaagtttgggatagagtggatagagctactttccccgaaagggtagctagatcaaatggatttcggtttggctcacttggaggagtaggagtaggaggagggaatgatttaatttctcatgttgctcaaaatggaaggcctcaacagaacaacaatggtcacttgtctcataataacaatcatggttgttgtaccttaaacaatgtgcttatgtattcttctgatatggattacaaaagtaatcttaatgccaagctttcgcctcagaaatgtacttcacttgatgaagcaactggtagaatttatctcatggctaaagaccaacatggttgccggtttttgcaaaggaaattctctgaaaggaagaaacacgaaattgacatgattttcgaggagatcattgatcatgttgttgagcttatgactgacccttttgggaactaccttgttcagaagctgcttgaggtttgtgatgaggatcaaaggttgcagacccttcatcgcattacttgcaaaccgggggaactcatcagaatttcgtgtgatatgcacgggtttgtgactaatacttaatctctttgtcttacattttagcacaattatattgaagatgttgaatatcatgttttttcaggactagagctgttcaaaaggttatcgaaactgtcaagactcccgagcaattctccatggttgtatctgcactgaagcatgatacaatcacactaatgaaagacatgaatggaaaccatgttgctcaaaggtgcttgcagtattttaggcctgaaaataatgaagtaagttgttgtttttttcgattctagaactaaaatcctttcgatctttacaaaagatagggtgctgataacggttttctttttctcttttgtagtttttgtttgaaactgcactattgaactgtgctgatcttgctaaagatcgccatggctgttgtgtgcttcaaaaatgtcttaccttttctgatggcgatcgaagacaccgtctcatctgtgagattgctgccaatgctctaatcctttcccaggatccatatgggtaaaaattacctaatatatcaaactctacttttgtatgtttttgtgaatctgtaaattaaagtttcgatttttatttactacagaaactatgttgtgcaatatgtatacgatcttcgccttccatgggcaacatcacttttgttagatcagttggaaggtagctttggtgatctttcaatgcagaagcacagcagcaatgtggttgagaaaagcttgaagctttgcaacgaagagggtcgttctcgtatcatccacgagcttattaacaatcccaaactcgatcaaatcatgcaggatccatatggaaactatgctgttcaagctgctatagatgttgcaatggtattgcctttttaacttcatgatttttcgagttatactttcgatgataaaaaaacattttatgtataaattttcaatcttgttgttaagcagggaagcctctattctaagctagccgacgcgataaagctacacactgctgcactcaaaaccagtccatatgggaagaaagtcctctcagcactgaattcaccaaaatgtaaacctctttt

SEQ ID NO: 17703 - DNA, 8835 bp, Cannabis sativa
  modified_base (473)..(488): a, c, t, g, unknown or other
ctctctctctctctctcaacaagtgataaaagcaaaagcaaaactaataaagattaaaagatgagatgggttgggagttgggttggtttggattgatgagatgagattcattcatcactttgatctatctctctctctctctctctctcactctcttttcttttttctgtttttccttctctatttgaggacccttttcctttttctttttgaaagaagaaaaaaataaaaatcatttatggttatttgtttgtagtagtagggtagagtagtgaaagtgattatttttcaatcttcatagatagagtcaatgagttaccatttttcagttgaaaacaatgactagtccagggatttcatgccccaatcatctatcaaaattcatttaattttaaccaataaataaaagaatctttgctttgccttttttctttttcttttttttcttcctgtattattattattattattannnnnnnnnnnnnnnntattattattattattattcaaagggttttggataaacaaaatgggtaaaggcagggcaaggacaaaataacaatggagaataattgaatcttggaaaatacacatatgagaaagaacagtgtcttttcatggaattgaaattggaattaaaactttctttacaaatgtactaagaaagtagttaataaggcccaacccatgttgtaactgtgggctacaaatgggcctctttgtactgggctgtccaaaggaaaggaatatgttcatgttcaactcttctttctcttttccctttcacttagtcaaaacatatcaaatacaaaagttgagtaagcaagtctaaattcatttcgagtcatttccaatggcaataaattcattcaagtcattcataattttattcttatttagaataaaaagtttaggcaattcaaaaatcccatatcatagaatcaaaaatatttgggaagttcaaacactttgtagtaggaactttttcacgagaatgtaagagaaaaagggaagctggcttatgcagtcataccacttgattcacgattgtcgcgtttgcctttcctgttccaaattggagtggtctctatcagcttatgagggacaaggcggtgttcacgcttggtgagtttacggaaattgtggactttcagtcttgctatctctgcctcctcttcaggggtagtttcccttactactactgtcaatcgacactctggtctcaccataattccgcttcttcctttagcgtggtaagaaactctctttttgaaaaagcctttcccgacaaaggcctcagctgcaataggagaaaataggaaaatgtaagggtaaaagacactgccacataaaaaaaattgaatctttacttccatttatttaccaacaagaaggcggtctggatccaagccatgattatgagttgcatttgctcgggccgagtgaataacctgccaaacaaagtgtgatgttttaaactttcatcctcgttagaatatatacaaatatcagtaaccttttgactgagcaaggtgttaatcagactgatagtatcacctgataaactgttttcgaagctcgctttatggtcacttgcaactgcaacaatgcatcctcgactcgcattccacgcactaatgcagcaaccaaatttaccttctttggactctggagtagtaaacattatttaacaacacaatataaggcacttgtactaaatgcaactcaatgcatgaagattagtattacacatgataaaaatagtatttcacttggtgggactaatgtagatctagtcttctctagatgtggaataaaataataaattcctcatcattttagttttccatcacttttcatgaaaatgacagaaaatacataaaccgttctgctcaaaacataaacagcagcaacataaagcctcatcaagataattaagctgtattaccactaaccttctcaatgtacctgttttatgttcttcaagacagcttgaactgtagaaggcttagaaactgctttctgctgctggtcttctgctttgccactatttaatgccaaaacaggtgtcaagggagaccgaataggtgcttcctcagatgaatttgctagtaacttcctcgacgtagaaatcccctgtgttaacaaggagatgaaacacttcaacacagtagcaattactactcaaactcacacatccataatataaaaaactcgtgacagcaatttgtgttgttgagaacaaatgtcatattagtttaaaatttcggagagaaatttgaaattataaagcctaatagcattaccaactgctgaaaatattgatgaaagggcctcaaaacggttggcgagggtggattcttcagcctttgaaggtaagaaaactcacctgcaaaaggatgatgacaaagaaaagatacaattagcattctaaaaccccaaataaaaagtaatgagaaggataagcaaaagccttccagcaagagaataggaaatgaacctggcttatacgaggagcctaagcgagaactacataagttggcagatggagtgtaactatgttccacttttttcccaacatgatttagtagagattttatatgtctttgccacccaaccatggcttccaatcctaattctcttacctaaacacatcacaaaataaaggctctctgttagataagtatatgagctgcaaatgagatttggattaagaccaatctaaacaaacaaatacaatatgtaacattcctaattctacaaaatcaaactcaattgattaattaagctaaaattctaatctaaagctcaagcaattatttcaaagactcaaagagagagacagagatcaaaatggtagccttaaatcacagaatccaatttacagaattatgcgaaacacagtaaaaaacaaagaaattgaacaaaattaagcaaatccaaaagagaaatgaacgtctaattcataacctcgtacccaattacaccccagaaatcgcaatgaacagttcgaaacaaaaggagaatcaaaatttttctacagtagagcacaagtacacttagaagaacatagaagaaagtgaaaaacacagatacccaagttaaggtgaaccgataaatcgcggcggagaggcgacgacccacgtcggagaaactgagaagagaagagaagagaagagacgagagagaatgagatgaaaggggttagggttttaggctctaactgtaaactcatcgacaaaacgcgtcgttttagtgtaatactttatttaatttaataatatacaaaaaaatccatatgaaaaacaattaagccaaaatgtctattatgaaattgtagatattttttgataaaattgctaaaaatactacatcattttaaaatattttttttatttatataagatttgacatatttttttttaaaaaaaatactccaacaaaaattatccacgatcgtaactttttccaaacagaaaaagaaaaaaatgtcatatgaaaaggtgtatattgagtaatatttatctaaatttggtcttaaaagaaagaccatgcaaactcaaatgctcttaagacatcaaaattcaaagtaattttgtctagtcaataaggatataatttttgactaataattaaataaatattacagcgaatacctaagttaattttagagttgggaagaaaatttacaaaccaattatcgtataataactttgaaatcatgtaaacaagtttgtaatcatattttcacactataaaatttcacactgtaaataactactttacacatcatcatagaaaaactaaaattttaatcaatgtatgtgccaaaaacccaaaaagagaaatatatttaaatcttgtattatgggcacctaaaatgagttattttaaagtttatttggataccataaatatttatggtcccaagattcaattaaatttagatgtaattacacaatttaatatattaatttatattactatgtaattttactgtaattgagtaattaattatagagttctagttacattggttaattctaattacaccatgtaattttaccataatcactaaaaaatttatatattaaatattaattactaataaataatattaattgtgtaattactagttattaaatatattagaaaactatatataattagcacctcatattcttgtaagttatcgtatctaataaaaataaatttaagttaacgtaataagtctttgcgttgggaatgaagtacttgtctcgcattcttgccaaaacttatgagcgtgaggagtttcgatttcaccatagatgtggtgggttaaagattactcacctttgttttgccaatgatttattactcttttgtcatggtgacattcaatccataatgcttttgttgcaaagctttaagcgtttctcaaatgcttcgggattaatggccaatcaaagcaaaactgccatgtattatttaggaatagattcgagtgatgtacaataggtattgaatgcatatggttttactcaaagtaggttgccatttcagttcttaggtgtgcctattttctaagaaaattccctcatctgaatgtgaaatcctcatagaaaagatagtggctcgaattcaagtttagagttatcgccgataacttatcgacatctatcttatgttgggagagcaattctaattaactcattcttagttgctattcatatatagtactcattcttcccaaacaaattcctaaatctattgataaaatatgtcatgattttctatgaaatggcacttctggttataaacaaccaggacttgtggcttggaatgttgtttgtaagccaaaagatcaaggaggtttaggttttaggtgtattgaagaacgaaacattagtgttatttgttacagctcaagaacaagataacaacaaatgaagaaatatattgctttgtgtaacttgcacactttggttgggtgatctggatcaatgaagccaagtggatgcaccatataattgtcttcatgaagatctccattgagaaatacattgttgacatccaattgtctaattgtctaaccttttgatagagcaatagtgagcacaacacgaatagtcactgcttgacaacagggctgaaggtttcatgaaagtcaaattcagcttattggtgataccccttggcaactaatttggcttttagtctactaactgatccatatgagttttctttgatcttaaagacccacttccagcctattggttctctgttaggaggaagaggcaccaatgtgtaagtcttgttctttttgagagccatattttcttcagacatagcagccagtcatttggtgtcattgagggctttcttgactgatgtgggaataagggaagccattagcactttaggtttcttaattcttgatttggctcttgttgtcataggatgcttgttgacaactggtgtagagtaatcaggtggtgctgaagtgttattttgcataactgatggaggagtaatactggtagaaccggtagcatctggagtgataacctgatctgcagcaggcacattaataggcatggctagtaaagtattaggaacaacaactggtgtgatagtattttgtggctctggttgctgttgtctagttggattgctggccgtggcatttgttgaagatgaaacttcatgatctgcaacatgtggtgaattgcctgtaaaaagcacattaacaagagcagaagcagtaggtgaagcaacattcaaaacattagtgggactaggtctaggtgacccagcaggaggataattgaatcctagaggagggaaaagttggctgagtctctaaggaagactaggagcagggccatgttgctgagtgagagtgggtgaggagttttgggatgagttgttatttgcttcaagagaaaatggaaaaattagttcatcaaatagaacatcccttgatatatagactcttccatcctttgagagacacttataccctttgtgagctaaattatagcctaggaaagtgcatggttgagatctaaattggagtttaaccttattgtaaggacttaggttatggtaacataagcaaccaaacacctttaaagaggtgtaggcaggtttgacatggaagagaatctcaataggtgacagattgtttagctgaggtgatggcattctattaattaggaaaatagcagcacgataagcttcatcctaaaactttaatggcatgctagcttgagctaataaagttaggccattctcaactatgtgcctatgttttctctccacaacaccattttgctcatgtgtgtggggacatgagactttatggacaataccagattgttggaggaagtgagtgaatgcttgatactcacctccctaatctgattgaatttgcttgattggtagaccaagttgaagttcaactcgggttttgaaagtgataaaggtggaaagagcctcatttttagttcttaacatgtaaatccatgcatgtcttgagaaggcatcaacaaagctaatatagtatcgatatccacatgaggaatagattagggtaggatcccaaaaatctgaatgtaaaagttctaaatgggcagtataaacagtagtggatttaggaaagggcaatttgtgatgcttcccaagacaacaagcagagcaaagttgatgagaaaattcaatgtttttattgcttgtttggatattacatgagtttagcacttgctgaactattttatgatgtggatgtcctaatcttttgtgccacaaagcaaaagaattacaagtaaatggcagagtactagagttacattgagttgacaaaggactcaaattacattatgtggcaatagtattagactcgacagtggtgggtaaacatgatgatggttacttgcttatggagagaagcttgagttggttggaatcaaacttgtataggcctttgtcaagcttcccaacaagtaaagtctttaaagtaacctggtccttaacaacacaatgaaagggttgaaattcaaaaaaagactattatcttgagcaaattgagatacactaagcattttttttgtaatttgtggcacatgtaagagattgttcaagacaagggtgtgatcatgaaagggagagacaaaggaagattggccaatgttttgaatgtgcaaatttgtaccattacccatgtggacttgctgattacttcaccaatcttttcaaacgaggaaattctagttgtattagttttgtatataatattaatatatgtattagttttgtattaattataatggtatttatttaaagtgaaagtcattattactacactgaaaaatgcaaaggccgcgttccttattataacaaaaaaaaccatatactatacgtactctctctctctctttctctctcagaataaaggtacagtggacacactcactccctccctccctcccactctcctcagtaccttacgtactatctctctctctcttcctctctctctcaatattatcagtcatttatatacattcttcttctgttatatacgagggttttccttagagttgttgctctaatatcctaaatctatcctcattcttcttgattttcttgcttgatagcaacaaccaacaccggcatttccaaggaagaagccgatatatcaaaactcattgcctaatcattcttctaataatattggaaggtctctctctcactctagatctcttcctctctttttctcccatctgcactgtatcataatggattatcgatgaatatgtcggtaactgcagatggagtatatatatagctatggttttctctaactcatgattttctttctctctcgcagtctgagtattgtcattttctctttcttttccacctttgagcagcagcagcaaccaccggcatttccatagaagaagcccatcaaagtagtctttcttctaataacatcagaaggtctctttctctctctgtatataccgtactctctctctctctctcttgtctctcagtactcatttgtcacgtatacattttttttgttacagagggtttttacaacgaaaaaagaaggcgatcaaactcactgtcacaacctgctaatcattcctctatatagtaatcaaggtctctctctcacacagtattatcagtcatatattctgttcttggagggttctcttgtgttgctgcgctctaatttccgaaatttatcctcatctttcttgattttccagctttgagtaacaacaaactaacaccggtatttccatggaaggtgatcaaaacaaactggctcaagcgtaatcatcattcttctaatagtatctaaaggtcgatctctctcctcgtttgttacagtaaccctaactcatgattctctctctctctctctcgcattctcagtattataggagggtttatttaggcttttctttttttttttccagctttgagcagctaacacctgcattgccatagaaggcgatcagaactcactggctcaagcataatcattcttgaattaatgaaggtctctctctccctagatctttctctcctccctagatcaatcgcatttgctctgaataataatgatcgatgatgaatatgttggtaactgcagatggagtagctagggtttgtgacagtaaccctaactcgtgattttctctctctctctgctagctgctaccataggatcgttagaggctatatctaccattatctcagtactatattctgatctacccatttctggtaagtttatatatatacatatctggtgtatatacatatataatg

SEQ ID NO: 17704 - DNA, 6499 bp, Cannabis sativa
agacaaatccctaaaatatgaaagtaaccaaccattaaatcatgatattaaaataatttaatttataataaactgcaacattgaaaattaatattacattattctatctaattcatattgtttatttgtatcctgagtctcctaaaaatttgacaatagtatcattcaccattctagtggcaatttttctttgctgctgaaaaaaaggatcacgtggtgtggtgccaatcccttctccactccttcaagggcttaaacaatcttatggatcacgtgccactctagtgataattaagaattggttttggttaatcaaatgtcattttattaatactaggctcgaacatcgatcgggctggccatgttttaaattcacgggtttagtaccaaaaaaatagcacccgtagattggccggatcgacgagttggcggatgagagggtggtcagatccatgagttagtagtttaattgtaattattattatcttttattttttaaaaaatagctttttcttttttttttttttaaaaggaatatatatttcacaactaccaactatacccaaaacatgtagcaagtttcatcaagtaataacaataaaaaaactaccaaaaatcatttactttctttaaaaaaatttatatatatatataaataaacttataatatttatattacaaagagaaggtgagagtccaggattgggaagtagatagatctaggagagggcaaatcaatggatgattggatctagaccaaagcatcgtccatcgacaaagagaaagagaaacgatagggagtgatttgactagatataggtctctttggttttcaagccgtggttctctctttggttgtcgaaatagatgattgtgagggagaaggaattagtcgacaatggacggcgaggttgcgagcgattgtgcgaggcagcgagcacgagagcaaactttaaagagagagaagaacaaaatgaagggtggggagtgctgagttgcctgattggagtatagacgaagttgaaaacgaaaggggcttgtcaggctgagttttttttgtgtctgatagagagaggaaaagcgagcgatatattagatctgatctgacaagagtgagatcgattaggttttttttttaattttttttttatctatgtttattatattattattaatgatatgtatacataatatataaaggaagaatgagtaattttgggtccaacccgacacgtgagtgtttaaaaatactaacatgtaccccctcattcattagtaacgggttcaacccgacccgcccgttctatataggtttttttttcaataattgggtttcacagttcaggtctgggccaaactcgactcaaatgtttagccctaatttatacctatagattagttggtgtggaaatatggaattgtggttatgcgattattacctcttggttgtcttgttgggtcttggttagacatcatcttctaacgataagttggctccttaagttggttttttcaagtgttattgaacacaaaaactttataaaattgttagataatgtatgatataagagtcttttaatactaaggaaaatgaaaagttgattactatggatataatttttatcgatagggaattactgacactagaattttaaaggttattttcaaagtcatccaatgcaaagtgtgcctctatcttgagcgtggggcctccatggaccttgaggggggatcctccttgaaggggggctccacctcacaatcataccgtaagcgagaggagcctacatcgcgtccaagatcacttgtgggggagggggtttcacctcgtatccaattcccaagctaaggggcttcctcctctctccaagagattgtgcgaggccatgcgaggtcaccaccttgctccaaaaagtcgtgtgaggcccttctcacctcacacctcttggccatatgaggtggtattgcctcttgcacaccatggccatgcgaggtggccctcaccttgcaccacatgacttcactatgggaaaaatagtaaaagagacccgagccttatctcatcaccccttataaagagggatacaagtcacatacactcatagataaatctaagagatctcacttctacttgaccaagaccaccaagtgatgcaataaaatagcgttgcttggtaaaaactacttatacaaaaatcctaataactaagaaatattttttaagtgttcactccatatacccaaggccgaaaccatccaattggcttcatacacactcacatggtacaatgtataaggcacgatggtgtatgaataagggcaagttggaggagccaccacagatctgccaagtctaggtacaagtagtggatctataagtagtattgagagcaaaatttgtaggtgttagtatagcttgacatccgaccaccactacctccaatacccacctacattcttaccaaagatttacaattagattaataatttattcccttttagaccacgtgtaaatcaaggccaatagccccttcttccattggaaagtcagtgaaaaaaatgatgtttttgtgaggaatttacaaggcaatgcaatagtagcttttctccattgttaattgagttttcttaatgttttttgatagttcttaatttcaaactattcaatatgattttctaactctaattttgttggtgagtttttattatcaacagtttggcaccaactatgggaaaagtaaggttcaaaatatgtttttcctataaaatcatcaccatttatacatgtcacgatgtttgaggtgtcttagtgaagtataggtataattgtatggagttgagccagttgattcaaggaaagatccaccaccactaaaaacccgtggtcttcaagataaatacgcccaatgaggagaggaggaagccttttcccttatgacaccaccactgaaggcgtccaatgagatcaccccctgcgatagggcttttgcaagtgtgtaccactcatccgccaagttccaccaactagaccacttccctccattaggattataccactacctattaaaccattaacaaataaggtaccatcgccatgaccaccgtcactcttatagtatctcattccacctcaccgtgagcaagatccaaacatgtctgtgtgtagatttagaaaggatgcacagatgtatttagaaagtcaaagctcctgaactcgttgctataaaaaaggagataaacaatctccattggaagaaccaaagggtaaagacaacaacggtgtgtatgcaaaaggtgttgaatggtatgcttgaaggaaaaatctattcctcactcttcaagtgcaaaggaaaatgacaagagaagggagaatcaactatacattttcacgagggaattcatgatatttactaatgatactccttaattaagatcatcttaggaaatccatatcactagatgggtgccttacatgtcaactgggatagcccaagctatctctcttataagatcacactcaggggaaacaccccataatctaaagggaaaaattcacctgagatctatggtttcattacaagagagagacaaacataatgccccatccttcaactttggttggaaggcacacatagagggggcaagagaagtacctcacacaacctcatatgaaccacaaagaggaccacggttccactcactaacctccgagagaggtgaggaaaatgatgaaggacctagaagtggagatgcaagacctatgccacaagatggatactacctcagtgggagacctagatgatgatgaattcgatgaagaatcccttttctcaagggagattcaagtagaaccacttccacccatcttcaaggaggcataataataccctatgatagcacagtcgatccaaagtatcatcttagttcttttattgagttgatgaagatgaaaaggtgttgagcaaggctacataccaatgcttcacgatggcattgaaaggagctgcaaatgagtggttcaagaggtatggaaaattacatattgaaaggaaatttgaaaaaagttccttcgacaacatcaggccgcgtgtaattacattatgcctgtcaaaagtattaccaatgtgaaataaagaaaacaagaaagttacaaaactaccttcaacactttaatgccaaagttactgaagtaggaaaagtgtccaaagatgaactcaagatcaccgtagctacagaagtatgccctagaagcagactatggggaaacatgccaaagagagagatgaattgtaatatcccaaaaaatataaatgatgttttattggacatattttattaaatatataattatatgaatattatggtaagattataatcttacataagctaattatgagttaattagtgatttttgagtaaataaataattgagtgtaatttattaattatagagattttattagaacatgtgggtattatatatactatttttgaaataaaatatttttggattcagcgaccgtggaaactagattggccaaaggtgtcacgacgacaatagattgagttttattggtattgtaccggactggtttagtatgttgagttgtaagtttagttggggtatctagtattgaccaaaatacccctaggttataaattagcttaagtatttaatggagggtaaaataatctttttgctaaggttttaatttttgtcttcatgttctagtaactttaggctaattaattttttttaattattaagtttaggtttattagattaaataattaagaatattcaacaaagatcaaactaagaaaaaatcacataactctttctttctccctcttccttcgaagccctaggaacccagctaaaaataagagaatattcatctcttatttaatcattctctagatgaagtcaccaattctaatagttgttcatactttgaggtaagctcttcttattcttgttgatttctagggtttaggttgagttttgttgaagtttttacttgattttgggtttgtaggcttgattgagtttagagcatgttcttcgatttaatttaagtttatttaagtgtgaatttgatgtttcttaggctgttaggttttgattagagtgagttgagttcaagaactcaaaaactcactcaactatggtgaatttgcaattttgatgtatttctgagttttaaatgttgagatatgttgtatttgtggtattaaactgttttggaaagtttcaataggtttggaggaactttgggttggttttgatgcaaaaaccaggggttacctatttctgcagtagaaattgattaaccggttctatagggcactatggaaccggtcaaccaattgacctagtggggaaccccatttttttttgaaaccggttatccatttaaggtgtttttctagagcttagttttaagtaatttattgatgtttaggctatttctaagctagtattgattagggttcgtttggttttaagtttacggcctattttgggtttgattaagatatttatcaagtgtcgttgtcgtgacacagggcttgagatcgtcgagcaccattccactcaggttggcctgcacacttgattttagatttgtaagaaagtcaattgcactgcttagcatgtcaaaataaggtacgataattactgttgttaagaatgagttattactctcttttgaaactgcttaggttttcttacttatcggtgcttaattaagcaacgatagtgacataagaaactcattggtaacgaagggttaagatactttataaagcatcgaggtcgcttagtcttataaggtaaataattgatcattattatttgattactctttcaataattgattattctatatgtgtccttgtatgctatgtattgttaaattattatactttatgtgatgtttgtgttttacttgcttttcttgctgagtctttgtgactcacaggtgctctatggtgcaggtaaggggaaggagaaattggaccaaccatgagttagaggtctcccgacaatgtaataagctgttttgtagtattttgtaaaagtttataattaaggggatccctgaaactagtggtattttgtaacaaagtttaagttatgaattaaataattttattaaaagtttttattaaactacacttttcttaaaccgttagtttattattataactaattaattaaaacacacacacacacgtggcgcccttacggttcagggcgttacaacatggtattggagcgaccaaggtttaaagatcttgaagattagttggatatgtacattggctgtgaagactcatggtatagtaagtgttaattgttaattgattattagattatgtgttaattacttgaaatatttgcatacttgaaatgtaggagttattaaaagagcatggtaggtttcaaaaataatgacggtatgtatatacaagtacaaaaatacttattaacatt

SEQ ID NO: 17705 - DNA, 3098 bp, Cannabis sativa
tctacattcctaaattttgtttatctaaaacctgatctaattataccccattttatatatgaaaaataattttttaatatgtaaatactcatttatatacctaaaatgattcttacattacacaccccatatctattattttcaaaaatataaaagaaaaatatttcattcaattcccacatggcacattgtatacattaatattttttagctatagatgttttatttttttagacaattagttataaatatttttaaatggaattcatattatttttaattttgtgtgattaagattaagtaggtataaaaagcaacacatataatgttaaagcaacgtatttcacatctatctttatataacaatgaagtaaagtatattatttctagctctttgaatttcacaagtacaaaaagctcttatattccaaactagccagttgctttagtataatttagtactaaagtggaactgatccaatcatattatccaaatactactttttcttttcttttcttttactagtgaagtgaagagaaagcaatatacatattccacatccctatatatcattgtcacatatacatccctagcaaaataaactaagtgtttcactagccatttgtggtatgatcataatggataacattttttttttttcatttatacaaaatctcatgaaaattaattgtgttttttttctctttttgcaagattgtacaatggagaacagagctcaccaggaagaaatacatgaaattaacataaatgttgaaacattggtaagcaacaagtttgaaaaagatgtatctgctaatcttgtaatgccttctctatgcagcattttcaaagtcccaaacatactttcaaggcacaacacagctgcttttacaccaaatgcattttcctttggccctttccaccacaacaacaaccaactcaaatccacaaagaaaatcaaacaaaaatatttgcttgacctcgccactcgtctccccgaaccaaatccaattttgttcaagaaactaaccagagttgttcatgagattcagagtgaagctcgccagtattatgcagggccaattgatatgaaagaagatgaattcttagagatgttggtgcttgatggttgcttcatcatagagctttttcgtaagaaatcgtatccaaatctcagaggagaaggtgacccaatattctccatgccttgtttactccaatttctttaccatgatctcatactactagagaaccaattaccttggttggttcttaaaactctgtttgatcttacccaaactagtactaattcatccacagatgagaacaagcctcagcctcttgtcaaattggtgattgaattttttggtaacattttctcatccagaccaattccaattgaaccacttctttctaacaataacaacacactcaaacacattcttgatttgttaagggagtcattggttttgaactctgacaaaacagaacacaaaagtcttgagtgggggcctatgcccccagctactgatctttggaattctggtataaaattcaaggtaaacagtacatcaaagtctctattggatattaaattttgttccaaaacaggtgttatggttatcccagaactgctcattcaagagaccagtgaaacagtgtttagaaatctcataagcttggagcaatgttgcccaaattatgagcccatattcacttcttatgcttttctattggacaatctcatcaatgggaatggtgatattgagctactttgtaaaagtaaggctattgttagttggttgaatattgaagatgctacaaaattgtttaataggctctacattgacacttttgtgaaagagaattactacgattcacttataaatgaagtgaacgaatatcgtcatctgagatggccaagatatcgaagagtgcttacgcgtgactactttaagcacccttgggcactcatttcagtcattgctgcttccattgctctcattcttactttcttacagactctctatgcaattcttggaaaagacaactaattagtacgtatagtcttaatcttaatcttaatctacctacctatgtatttttctactttgattaaaagaataacggtttttttttttttttttgataagtgaacagaatcactcataaattaaccatgcactgcaacaattcacaatcagcgtggaacttcttcttgaattagaataactcatcgtctaactgaagggcatgctttgccgaaccacgatttgtaaaattttaattacgagttatgtaggataaaactgcttccaaaaatttagatgataaaactataacatccactaacagtatctcaacatattaaagaaggtccttcctttattaatagttgttactagacatttttttttattatttatttacttttataactcttattcttatataagagttgtttagatgtatctcttatttgtttcggcaattaagatagcaatttagtttatttttttttataattgtatatgttgtatttatttaaggttaagtatattttttaaaaaaatttaaaaaatttatattttagtatgcatataaaaataattataatgaaatatttaaatattataattataatgtaagatttataagtgatctgaaaaaataaaaaataaactaaaaaacttacttagatgccaaaataaaaggagaatatactaaaacaccattttcaaataactatagaatatcctaaagcaccattttcaaaataagaatagaacatccctataatttatagtggtatttttatattaaaaaagtaaaaatagttattattttcctaaaagccaaaattcatttctcattactagattatatagagtatgaaaatttattatatttgcttgacgatttaatgagttaataatgacgaattaataacaccttttttagttcaatgacaattcgcaataaaaaattcaattggaacaccaggttaaaaattaaagtaattatattagatgttgtattttgattagattttttattttataaaataataaaataattttatatttttttttttttt

SEQ ID NO: 17706 - DNA, 9303 bp, Cannabis sativa
  modified_base (5035)..(5039): a, c, t, g, unknown or other
tatatatatatatatatgacttttctattatataactttacacatttaagtatgttttttcgctttttgtgtttttggtgctaaagattacaaatgaaagtatttacttttagaaaaaaaaaaaaaattgaattggatcccacaattatgaagaactttacgcgagtttcaatttatacaaagtgaaacacgatcgagtggaatgcataacacacctagaaataccaaacatgccattttaaccaaatatttatgaatatttttatgcctataaatgtgtatatgacatgatcatgtcatcatatataaagtacatacagggaaaagtgtgacaggtcactactattattacattatataaaaaacgatttgcttgttttttcttccttgttttacaaacaaatcaccatgtatgaagaaaagaaaaaattctcagtaatactacatagtgttatttacatatttattgatcaagttttctctgaaattgtttcttgatgaggtctattagagtgagaaaacatgttcttgatagcttcttccctctcatcaacaaagtcaacaaagctagagatgacaccagaacattgacctgatgatgacggccttggtggtgaatttgaaagagagggagcattctgattctctcggcgtttgtaccggacgaattggtgaatcattctgataagaaatattacaagggcagcaagagaaaaggctccacagagtagatacagaccccaaaagctgatcaaatgaagttggttaggctcattgtctagttcattgtcaccaggacatcctatcttacaaaaccagtgcttgtggatctcctgaagttttccagtctcagaaagtttcaagattgctgttgacatgtccacagccagaggagaatctctttgaaaagcctgatatggtaaattaaaagtaagaaaatgacacaataacaagatcactacaaaacaaacttctatgagatcgatagatatagatacttacaaatccccatccacccctagtgaatggctgtccaatgatcccgaaatcagtttggtctgataggaacaattcgacataaggaagctcatctatgatggctgccacacctccagcacttgggcccagcctcagtgccctttcgtactcttctggagtccttaggtgaacaagtcttttgcttggtatgaaaagaatctcagtaagatagttatacacaaatgagcctacttgataaccaataggcgaattggatgccatcaagctatccattccggtgatcgaagaaggaagctgttgtattgtgaggattgaagttaagctagctgtgtagcttgatgtgatcaccatcaagaggaaaagccacaccaccatcaccatccgcgcaagtgggctcacagtatcttcttctgtaatatgatcagaaccatatgaaattgttgtgagtttaaggagttgatattgttcagcaaactaccaagtacatagctaatatttatattgcagaaggtgaagaaatccttacgatttctcttgaacaatgttgagaagctaaacctgcaataatgaaacagttgaattgacctttagactagtctccaatatgtacatcaagaaatttagattaaaaaagaagaagaaaacttacagaagcattgttgcaagttgcctaacaggaggaccgcgaaaatcatcgttgactcgatgttcaagagtccaaataacaattgcaatcatcagaaaagaagctattgtgacacaccacaactccaaggaaaatggcttgagaaacacccaagcatttgactgcggacgacttataggtgccactatcacaagaccagtactagcgtaaggctgagaaaaatccaccattgctgtccggttcctggcaattacaatgtccccaacagcagcatcaaatacctgtcaccaaccttaattatatcagcaaaatagctctgcatatcaaactttttatcttcactaaacagcacaaatttaaccactctaccaagaaaatatgataaaaagtacaatttaagatatcatttacactgagtgaataagttctacttacatcatctgcaaccagttttgtaagctgatcatatttgggattggaatgaccatccccgaaaggcacaaatttataaggaacatcataagggattaattttcgcgcttcaaggaacacatcaatacagtatccccggatatcatgaggatggtttactgtaacaaaatccttaaaacttgttctgtttgggactacaattctcaaaggtttctcatgaaccgcaatcacccaaccacgtggtttttctgtgcctccaccaggccaagtagcattgtcaagattttgatccaaaatggaagattcattctgctttgctttcagagtttctggtggagaaattgaaagccctatgacttcagaccaaaaaccaagtttgttaatcttcatattatcaatgttaatgacttcataaccgctactaatgatactccggctggccgaatcaaagctaacatgaccagttaaaccggtgaaatttgtctccagtaatttcaaacgaagagtagagccaccatcaaatactctaagcttgctcagctgaagatcagatgatttaatacttagtaacttatcactgagagaaaatgacaaatttccattctcattcaagaatctatcaacagcatatgcaactgtccaaacggtatcataagcataaaggccatagacattcaattcagagcttgataaacctgtttgctttaaatctttccatctagacaaaaactcttgctttttcttggattctaaagtgtgctggcgaagagaaactacaccttgcacagaatccagcgattttcgagcccttggagagaaagaatctattgtagaagatagccaatctgttgcaaaccacacataattgctattcatcatttgaagtctcttggcaactttgaagattttcaaagattggtcaacatcaacatgaacaacatagacacgagtaccaaataacttagaagcattgagcatttcggttacatggctcgaattaaagttgattgaaagaggcaatttataagcaattctcaagtctttcttctcaagctcatcctctaatgctgaaataccattcctaccatactcattatccacatatacagtaatgacttgtttccatccataaaactctataagactagccatggcagccatttgtaaggcatcactatgagtggttcggaagaaataaggaaactggagagcagatagagtaggatcagtggcaccataagacacaagaggcacttggagaccattggcaatttgagaaagtatatgagctatttcagaagattgtggaccaattatagccaaaacctcttgttcaagtacctgaaatgctgcccaaagcaaatgtacacttaaagatacaacttttaacatctccaattcaagattaaaaccttatataatatcaaatacatggtgaactgaactcaatagggaaagaataaaaaaaaagtgaaacttgaaaatacccagaaaagaaaaaatatatatttgataaaacataccttcaatggaccccagaaaggcactagagttagcgtcctctgtaatcaagttgagtgtagtaccattgagtaatgtttggtcggcattaatatctgaaacagcagcttctatagccggccttgcaactctgccaatcactgaattgaaggagaaaattgctccaatattcacagaacgaggtctttggcaaaggacaacaccagtacataagaacaggcaaaccaaactaaacaaaggcaccaacctcatcattcttcttgaagcaccaaaactcgtctaaacattaactttcacgagtttcccaaactgggttttataaacaatacaataataataataatttatgtgtgaaaatatcccagaaacatttgtgaatggatatgaaaatttgtaggagggtagttagctttgaaaagagccaaaaacaaaacaatagaaaaaagggaagacttaaacacaatacccaataagaataaaagagtttaaaactctacataaactctagattttgttggtgtggaaatcaagttgaggtgtgagcaggggtaaaaaacaatgagtatcacattttgaaggagggaattttgtgagacctggaattggaggcccaaaaaacacccaattgtttaatctttttactgttattttatctttatcttagaaaaagtcagcattgatgagaatggagtgtggacccacgtagattggagacgaagaaattaaaatgtttatataaatttataatatatgtatataatttgtaagaatgagacagttgaagtacaaatacttttttcttcagatcacactagaactttattcattttcacaacttgcatggaatcataccctctaatctcttctcatctcatgttattattcttaataatatttaattattgttctttatatttatcctgccataaatgatacatacatgtcactttaatatactgttattattagtgcttaagtctttaatgttggaatttaatattatattctatgccaacaacttttggatccggccgcctgttttatagcattttctttccaacttagctgaaaaatatataaaaaaccacttactagcgtggattccacagaattttctctttaatagacaaattactatatattcttttcttttaggagacaaaaaaaactgatttttccttttttttttttctttcagtgcacaaattctattgatttttcttttatgtttattttgtaagaatccaaattccacaactgtatttatggagtccatcagaaatttgctttaattgttgtcatcatgtcaaccaactatgtccaggccggtactatggtatatgtaacaaggcaaaatcaaattttagaattaattttcattttaaaacaaagattgcaactttcattaaagcaaatcagttaacaaaatagcttccnnnnnagaagggacagaccccctactggaaatatgatcaggacatgaaccagaagaacgagctaaccaattagccgcttggttcccagatcgcttaacaaactgaactgaaatatgaaaattagaaaaggaccgtataagattaatacaatccgaaataataagaccaagaggagaaagaatgtggctcttgctattgatagcatcaaccaacacaagacaatccgactccaaaatcaccgctgtagggcaaaagtcctcaacaaccctgccttctccccagcaggatttaacccaactcaaagcctccttcatggacaacgcttcagcaacaacagggtaaatttcacctcggagtttgacagcagcagcagcaaagcacaacccagcatgatctctggcaatccatcccaatctgtgactcatttctctagaaaaaagagcagcatcacaattaaccttcaactctcccaaagacggtttaatccagtgctcaacaccagcacgaggtgtaaaagtattgtagttatagtctatttcatgttttcttttattaatattcattatattttctctttcatcactttcttaatttctcattttttttttaattttaaaacaaaaataaaacttaccaaatctatttttaaaataaattataaaataaaaacagtgttaaacatatttttggttgttttacattattgaaattagcaatggggacatatctctttctaggagaagatgatgatgatgatgaaaaaaaacaacatccttttagctcaatttgataattattcactatataaactgtatttaacattaaataatttgtagttacactaagaaaatttactttgcttttgcttttagatcaatgcaaaatattctaacacaatgtgtgaagtgatctttgtcctttcattttaagtaaaaatagattttattttcctttttcataaataattaattttattttctttacatccacatctttaaagaaagttgtattaaaatatgcttaacctatcccaccttaaaaaattaaattaaaataaaaaagaagaaacttattaaagcaaatttgaataaagaatgaactgtatttgtcatttagcatcaaaagaaaataaaaatcacaatcaaataacagtgggtggaccattctaaaaagaaacaaaacactaaactccgaatattattattaggtacttagtcaaaaaactctcatcaattaaaaataataattggataattaggaagcttattatattattattattaaagaaaaactattgtaattttaaaaatgtgcaaaattattctgccgacacttatgcattgcttatgacttaaagctttttgcactaggcttctagttataatataagtacctaaaactattactaccattgctattattatataggtttagaaatgcatgtagtagattctttaaaacattattttggtaaattctttaattattttgttattcaaaaaaaaaaaaaaattatttctttttatgatagtgtgtgctataattatttaagattatttatatattttttaaaaaatttataatactgaaaataaaatttaaatagttacttactatgtgtataaaaaaaataattgtatgtgcaataaaatgtgtaaattttattttcggaattataaactactcgaaattttctaaaaatttacaggtgtttcgaaataactataacatacacaatcataaaaaataactcaaattctctcaaataatgaaatagataaatagtctaccaaaacaactttttatgaagtgtatagtagacttgtccgttgctttgcacattcttaaaaatgatgtaccgatgcatttttttattcgtttcagctttcaaaaaaaaaaaattagtctaatttttatataatcgtttatgttataattatttaagacatcttgcgaaattttaaaaatatcaaaataatttacaatataaaaagcagtgttcaaatattctatttcacacgcatataaaataaaagcacgttacaactgactagttgaattttattttcggtgtgttaaatttcttaaaaaatctcaaaattttactaaatattttaaataattactacatatacacctagaaaaaaaataggataaaaaaaattctccatcaatttttttatttcttatttatatttatatttatatattatctctttagcttttctttatatttggtttttttttttcttacgtgtggcttcttttaacagcctcttctctcttctctattggtgagcataaaacagagaagggtttctcgctgtctctctataccaatctctctgtctctctacaatcaaaacagagagaaccacaaaaacccatattatatttttcattcaatccttggtaagagcaaaaaagtctcaaactttcttgaaaattaatcaaaagggtgtatatatttagtttcattttcttatccaaactgtgtttttcttatctttacaggagaagggtcataaatccaagaaattagaagcatatacaaaaaagatgctttcagcaaaatcagattccgatatcacaagcttagctccatcttcaccatcaaggtctccaaagagaccagtttactacgtacaaagcccttcaagggattctcacgatggagacaagtcatcatcaatgcaggccacaccaatctacaacaacacccctactgactcaccttctcactcctccttcggccgccactcaagaaattcctccgccagccgattttcagggatttttcggtcctcttcgggtcgaaaaggcggtagcaggaaacaccagcagcataaaaataatgacaagggttggcctgagtgtaatgtgatattggaagaaggagcttatgatgatattgataaaaactactcaagaagagttcaagccttaattgctctctttagtttctttgttctcttcactgtcttttgtttgatcatttggggtgctagtaagcctttcaaagcagagattactgtcaaggtatggtaccaaatttttctctaattttgctaaagatttaattttttttcttaaaactaatgttatcttcttcttcatattattagttggtgagaaattatatattattatacataaagttgacttgtaatattattagagggtaaagtaaggaaaatgacaatattgtagagaagaaaagtatttgaataagtacacaactaatggagtaatagtattaatatatagagcattgctaatgttagtccctttctggttaagtaaaaaagaaataaatatagcaataattggagaacaatattaaacattgtcactagtggtgtcaaattgctaaaggtattctataaaaattgttaatttaaaatatatgtgcctaattatttttaatatatatatgtatgtgtatgtgtgtgtgcagagcttggcagtgaataacttgtatattgggtctggttcagacttttctggtgtcccaacaaagatgctaacagtaaatggatcattaagactaagtgtatataacccagctaccatatttggcatccatgttagctcaactccaatcaatctaatttataatgagatcactatagcaaccggtcaggtaaaaatttcattacaaatataagccaattattgttattattagtaatagtattatgaggggaatcattttctaacaagttatttgttttttattaaagttgaaaaagtattatcaaccaaggaagagcagaagaagtgtggaagtgaacttaagaggaagtaaggttcctctttatggagctggctcaactttaattgtttcacaaaatggtgcagtggttcctttgataataaagtttgagatcagatcacgagggaatgtagtggggaagctagttagaacaaagcacaaaaggctcatttcttgccctgttgtaatcgattccactaagaccaaacccatcaaattcaagaagaggtcttgtacctacgattgagagtaatggatgttgttttttggaagaataataaagagggatatgtattaaattaatgttgttgttgttgttgttgttgttgtagatatgatgtaataattaataacatgtctggttttgattacattacacaatttacacttgtggagtgaactgaagatgtcagactcactcaggggcccttttaacagattctcatatatatatatattttttttttttgatgttgagattttttttttttttt

SEQ ID NO: 17707 - DNA, 2322 bp, Cannabis sativa
gatcgtagctatttagccaatagctttggtttttgttcatgaatcatgaataagaagaaaggccatctaaaagagtcttcatagcttgcttcttcactactttcccatacagtcctcttcccactttgaaagctttttcagtctccaccaccccaccactcttattcaatcttcccaacaaaatctttagcaccctctcatcacttcccaccacttccacaacactatccaccaccgagtccaccggaggaatcctccgcccccatcttttcacagatttttcagagctataagcatcaaaaaaggcagcccaaaaagatgacctcaaatagcctttcgctttgcccctcaccatcattcttttcattccctcctctaacctaaaaacgacacccccagcttccattcctctctccactccaatctcaacctctctcatttcttgccttgacgaaatctcttcctcgaatttacacctcttgcaaacacaatcgaaaccccaactcttacacatctcctttcttttgcccagtggagaaagcacatcaaaataagcaaatgtgatttcctcacctgcctttaaatctctagaggcatgaaccaatacgtagtctccaacatgtactcgcctagcattgggaacacatgaatggttgatgaaacaagccaaaacccataacccaataccatagtagtcaccgttcttccccaaaaccttacccgaaactccattttcaacaagagaatttacatccaagatacttataaccctgttagtatcaagcttttcaaaacataagcttgtgttgttatcctcagcctcaggactaaataggcctatatcaggaacttcaagactacactcttctactccggatgataactttccgatcatattgagggttttgggacacttacaagtggaattgttgacttggtcgatgaaattcttccacatgaccaattgggcattctcattgggcacttctcctcccaatatactcctctcaatggcgactgctttcgtcgaaaatagcagagtccctgcatcaatgttcttggtagcaaatagccctctcccgctaatctccgatttcctcaaatcaacagggccaatgtactcggagagctccggaaactttccttggaaccgattcatgacccactcagagatatcaaaagcaccggtcctccatagaaactccagcttcttgcacttttccacgtacccattaaggctctcggagccacatgactgagaatcgaccagagctgttttaaaacagcccaacgccatggcatatctgttgaggttcatcaagattttccctttacagagaagagtcttgaaatgggcactctcgattctcaacgcttcatcgcaatctctcaaagcttctgcgaattctcgaagtctgaaacgagcttcggctctgttcgaaagggctagacagagggatttgtctagcttggagaggttatctggattgggttgaagatcacgagccttttgaagctggacttggcagagagagatgaattgagagtaggtttgtacggactccttccattcctctctgagtaaaagctctgtggctttcgacctcagttgctgcattagctcttccgccattgctaactctaactttcttctctgtcactaaagatttcattgacgaggtctgtttgtttggttttgtgtatatattttaaagtatttatttatttatttattttttgtgtgtgtgtaacggtcacatcgaattgttttctcaatctttttctcgtaacggcaacggctatctcggagaggtttttgctttaaataatcagaaaaaaaaaaaagagaaataataaatattattttttgataaataaagaaataatatttgtatacatattactatgttaatattactatatatttttagttgcattaatttttttttaatgttatttaatttttattaaaaaatgcctaatttatttatttatttttttttgagataaaaaatgcctaatttatttgttatttgtaaaaagtaaacataataatatttttgtttatgataattttatttaatcgtaatattttattttataatactttaatattatacacattatttatttattttttttaaataattgaaagattttttttggtaactacattaggttttttgaaaagatacgttcattagtaaaaagctaattaggaattatgcttcttaaattttgacatgtactaaattatgcctcctgaacttttaaggtcgttaaaaatgtctcctgaacttgttggatttaagaacttttatc

SEQ ID NO: 17708 - DNA, 1993 bp, Cannabis sativa
tatacagaggctgttttatcctggggacgccgtggttgctagactgttgtgcacacttcgggcagagccgcgaaacgtcttaaagagagcgacattgtccgcgactcagccaaattattctattggtaattcgttcagttattgtgtcttgccaatgttcagttattggcaatctatgagcacagaattgctgtgcaaggtttcgggtggggcatcaactcttttgatcaatggggagttgaactagggaaggttagtaactgagcattacctggaaactttttacggactataatcatcttgcaataatgaaattaacacatttctttatggaaaacttctggtgttatgttttctaccatgccttattaaaatagcatgccaactttaataattatgcaaaaaaaaaaggtttttggataaaattgtgtcacattatcagctccttttctctctcaaaccatatttcaagctctctttttctctactatgatagcattaccactaccttcctgtggcagtagagcacccttaacattgtccacaccattgatgctaccatctcctatcaccattggaacacctatggaagcaccaatctatttttctttctctaatgttttaatcaaaatcaaactcaaaacttaactccagtaatatttaacttaaaacactaatttaaaggtttctaatatatctatgtatgatttattagtttggctcgctccacatttagaactttgaaaatctgtagaattttgaacaaaatgatgctcactaactgtgcttttgtgatgctctcatttgtcataatttttaggtaagaaataatgtttttgcgatgtttctatttttaatgatttttgaagttaaacatgatgcatttgtaatgtttttgcgatatatttgcaatgttcctgttaaaacttgattttagactaaaaattaacttttaatgggagcattgcaaaggcattgttttacttcaaaaatttataataagtgagagcattacaaaagtatcgttagagagtatcgtaaaagtatccttaaaaaaaaaaaaggagagtatcgcaaaaaaatatcgttgtgttcaagattttgttgatttctttgaagtttagatttgaaataaaaatgcgagcaaacccaataaatcatacataaatgtgtttttaaattagtgttgtaagtaaatattattcgagggtttgttttggatttcattttgttaattaaaacatagattggttcttctatggggtgtttcaatagtggatggaggtggcaacattaattgcgagggcgatgataatggtggtggtaaggttgaaatggtgttgttgggtggtggcgggtgccatggtggtagagcttgagagagaatgggaggggtaagggcctcgagtcttttcctctttttttttttttttacgcaaactctttttctaccacattgtataacatactctattttcggtcccataatcaaatcatatcacatagctactcaagttagaaaacaactccatgcatctcgcaccaagagtgaacctgtcgagggctttgttgagggcttcaactttaggaccgcaacgttactaagaagatatcttgaggtgtgtcatgtgtgaaacatatatttcatttcagggaaggaaagagagatagataaatgaatcttgacttgaccaaaccaaactatatatattcgacattgcaggcaagttcaaatgatccttcgtattcttcaacccgtttgccctggatatagttgtataacttttgtgtgcctccttatttttgtattgcatatattttgacattccaacttgttttatataggggtgtgcataaattgatctaatctaatgacaatcgacctatccaattacaactggtcgacaaacattggatatccaattggatcggatcagatcggatgttacttttgaatatccaattggatcagatcggatgttggatggggtgt

SEQ ID NO: 17709 - DNA, 2617 bp, Cannabis sativa
ggtaataatgctctattattttattattgtttttgaaaattttcttaaatgccgtacattaattggaaatttctttagaaagaaagaaaattctattttggttttgcattatgcagtagaaacaaaagtcgagaataggtcctggtttcattataaaagcacaatggttaacccttttccttcatatatatcttccacaagccaaatagccaaatagtacttcatacccatggcttctcttacttttaatccaccagtttcaatcaacactacttcattcttctcacccagctcagtcgtctctcgtaacaaatcacataataaccacttaattcccaattaccgtagaaaaagctttgtgcgcaatgccacaaaagatcaagaccatgaccaaagtcataataacaaagagcatccaaagtttgataggagaaacgtgctcataggcctaggagggctatatggaaccaccatgacagggctgagctccaatccctcagccattgctgatccaattgcgccacccgacttatcgaaatgtgggccggccgacttcccagaaggggtgacaccaaccgattgctgtccaccagtatctacaaagatcattgacttcaaactaccttcggtgaacagattgcgcacgaggccagcagctcatgcagtggacgaagcttatattgccaagtacaacaaagccgtacagctcatgaaagctctcccggatagcgatcctcgtagcttctcacaacaagccgatgttcactgcgcctattgtgacaactcatacgaccaagttggtttcccaaacttggagctacaagttcacaactcatggcttttctttccctttcaccgttattacttgtactttcacgagagaattctagccaaacttatagatgaccccactttcgctttacctttctggaactgggactccctcccggggatgcagttgccggcgctttacgcgaaagttaactcgcccctttatgacccgctccgagaccgttttcaccagccaccgacaatggttgaccttgactacagccctgcagatgctggtattcccaccaccagtaacgaagagcagttaaagatcaatcttactgttatgtacagagaaatggtatcaaacggtaaaaatgctcagttgtttctgggtgagccttatagggccggagatcaggccgaacctggaccgggttctctggagtccattcctcatgggccggtccacttgtggaccggtgacagcacccagcccaacttcgagaatatgggaaatttctactcggctgctcgtgatcccattttcttttcccaccactcaaatattgaccgattgtggagtgtgtggaaaactcttggaggaaaaagaagagatttcaccgacccggattggctcaactccgcgtttttattctacgacgagaatgcccaactggttcgggtcaaggtccgagactgtctcgacacaagaaagctcgggtacgtgtaccaagatgttgacattccctggcttaacacaaagccaaccccacgtcgagcgaagtcaaccaaagtggcgagccgtagagcaagtggtagagctttcggagcggctcttgcggcggagacggttacttttccgatcacggtagataaggtgatgagtacagttgtgagaagacctaagaagagtaagaggagcaagaaggagaaggaagaggaagaggaggtgttggtgattgaaggcattgagtatgaccagaatttagtgttgaagttggatgtttacgtgaacgacgaggatgataagtcgccgagtggacctgagatatctgagttcgctggaagcttcgttaacgtgccacacaaacatgtgggtgtgaagaaggctaagacttctctgaggttgggcttaactgatttgcttgaggatttggaggctgaagatgatgagactgtggtcgtgactttggttcccaaggtcggaattgccactgtttctggaattaagattgagtttttgtcttgaaattaattaaagtaattaattccagtagtactactttagtttcatccacgtggatttatttatatcaacgtacgtgagaaataaataaataaataataatgcatatgtatcatgtatcgtactctatgaatttagttttactatcactatcaattaataaatatcaaagtaattttctttcaataagacaattagtctcaacttgttctgtaactttatagcctgacttttcaatattggtggcctagtaagtaagatctacgattctattactcatcacattatttatgtgacaatttcaaatagtttcaaataggataagctttcattggtatatatgtgatttcagcttaattatctttcctagtattgtgactaaaagtttgtcaactctataaattggcttaattaattacatgtgctttttcttgtaattttaatcttgtggcttaagaattggttaaggatatgatgcgtgtaaatcaaatttaataattttttagaatatttatgaattatttctgatggtttgagaataaatttgtattggtttagatttgtatgggatgaatattaggtggtgtagtatgatga

SEQ ID NO: 17710 - DNA, 9873 bp, Cannabis sativa
  modified_base (9248)..(9249): a, c, t, g, unknown or other
ttcgggttatttggacgggttagactagtattcaacttggccaatatattcattgggcggtttgaatttttcgtaaagttattcgggttatattttttgtcggtttattcagtttggtttgagcgatttattcaggttgggcgatttgttaatttttttgaacagccctagtcgtagccacaggtatccaaagttcccaaagagattaagctccttcttaatgctgaaacatgtctcacaaactttcagccaattaattaggttctccatttagttatagctattgccattagttccttctcatagattgcttttttccgtgcttgttggcctaaagtttgactgaagtaagcaatggttccccaaaaggcttagaaaaatcagctaaagtgagaattggcactgataccattactgtcatgatggccaggaaggcgttttctgcaattgaattccaaccaaattgatcttttcagagttgggtaatgcaagcatagttcgctccaaatcttttgtagtgccctgtgagaccgagaaaccccttaagttgtttgatagtagttggtgttggccagtcaatcatagctttgatcttttcggggtcagttgccgctcccttgtaagaaatgatgtagcccaaatgtgcaatctctctgtccaaagtcacatattttcttgttaacatggagctcttgctgtgaaaagatgctgaaaacttcattctaatggtcgacatgctccaattgagtcatagtatacacaagtatgtcatcaaaaaacaccaagacaaacttcgctaagttaggtcgaaatatgtagttcataagagattgcaaggtggctagagcgtttgttgacccaaatggcatgacctaaaattcatactggtcatcatgggttcaaaatgtggttttgtgcacatcctctttccttgttggtatttaatgataacttgattcaaggtaaagtttggaaaaaaacatagtaccactaagctcatacaataattcttcaatgatatgtatcagatactattttggtatattagtgcgattgctgggccaatagtcaatgcaaagatgcatcctttttcttcattgtatgaaatggtgaatcaattgtctattctcgttgaaaagtaatacatatatagataaacacataatagaataggaagctacacaattggaaactagaattaagctaattagacaattaatatacaactaacactctctctcaaattggagcatagatattgatcatgcccaacttattacatagataatcaacctgaatctcattcaaagctttcgtaaagatgttctctagttgatcaccagtcttcatatatctatctgcattgctttggcaatatccattgcttcatccacatttctgaggtgttgtacccttacttcagctctctgattgttggtactaagtcattcaagaaagtgctcaactgttctggtggtatgctattcaatggaaccaaaagtctaatgaaatcattcttgtaatcacccatgtttccttcttgttttactcaaagaaattggtcatacaaggaccccatttgtgtatcccagaaatgcttgaacaccaatctcttcatttctcaaaattgttagcttctaattctaatattgataccaaaacaaggggcgtcactggagaaggaaataaaagttgctttgatcttgtcgcgctcatcatagtggtagcaagaaaagtacttgctcagcttgcattatcaatccatctggattctcctcatcgaaggttggcattttaagtttccgcaacctatgttcttgacgatggtggtgaaacccatgagttctttctgagttgacagctcctgggaagcatcttcctgtcattcttcatgatcgaatacccctgtagtccctccttcattgtcatcacgtgtagctccactcaaagaattcttgtcccttgactcgtttccagtgtgattccagagttcttggacctttcatgaactttcttgacttgccattaaattcttaaatcgttgttgcatctgctagttgagctgaatggagtctttaactccagccatttctaactttattgcttccatttcttcctccatgagaattgacgagcccccttttttgttagtcttctttggtcccatgtctgcagctcaccgcaccgccaaattgataagtcttttcttagttagaatcaaactctcattcttgcaaaaataatcgctgatatccctccaagaaatctttattaaattgctggaaacataatacaaatcaagcatttgagaggcttgtctctcctatcctaatttttcaagaggattggtctctccacaagaactcactcttatctaatccaagctatccttacaaaaagagcctattacgtaatgccaactagtctaggatccaattagaagaagacaagtcaacccctaactaaataaaactgccagctagaaaaaagaatgaaatagccacaaggaatacaaaaaatacaaagtacttatttacttaggtagcctcctatatcaagattgagttagttagcaagagtgtgtgttagtttggttgagtgaaagttagttttctattagttgtcagtgtcatttctgttagttcttgtaactaacttgctttctgtattgagctatatatatagctccatcattgtacattttcattgctgatcaataatatcaaatacagagtttgcatactctgttcttcttcttttcttttccgcaactaaaatcccattacatacaaaacgtactgaggattatcacatgaatatgcgaaatctaatgtttttctttttaatgtaatggtctagcttttcttataacatgaatatgcaaaatctcatgtgttttctaatgtaatggtctagcttttcttgcacaggtgcttttagagaaaggaagcatttcttctatagcagagcgtatgcagggctaccaagttattgcaatggttgtcttttgggggttagttctgcaaatttattttctaaatcttctctaccagcttgtgttagattaagatgaacatgttaaatagaagttaaaattgatgcgttattcatttttttgtatggtcgatttgcggtaggcctaagatgaaacatattcaaaacaaagttcaagaagatgtgagaaaaataatgacagagcagttacagttttcgtctcctgcctcggttcacaaaaggaaaagaaatcctgattattgcattaaccagccaaactttattgcttcgtcgagtgtttttggttctgaggtatgccattcagtgccatagcttgagtctttcagtagctgcaacaatatatagaaattatgcttttgctatattgttgattctacaaaataaaatctagcggctaccaatacaatgaaagcttcttgtttgattctcaacgaaagcttcgtagtatattctcattccccacctccaggcttaagttcttccggaaccctgccatgtcaacttgaaaactgacagatctgaactctcattatcaaagacaagccggccttaatgttacagagatcttgagatagattaattctcccccaatctctgggtgagagacatgcctacagttaaattctacttatatggaaatggatggtttaagaaatcaaatctcaagaggaaaataaaatatggaattctatgctaccaaaatctgagccgatggctgtgttccactctcaaccatccaactttgttctctgcgatagttctcaaataaatacactacactccttactgtttttggttcctcttttgtttttctcttttcttccaccccattaccagagtgctaggactctatgatcttctcagattaatgaaatagttttcttatgtacgcagggtaaaggggttgttgttcgaatagtggccgcgacaactgagtcagtataccaatttttacggcatcagttagctagcttggaaccactacttggagtattaccatataactgaatattctttcaatatttaattaggacggatatttactttttactcatccatctttgaactgttccataacgtttacaatctgaatttggaaaaatattttcagagtacttttcatttttgttgctgtatgcgtaccatctgtagaatatattaataaaatcttccaagtaaataataaatcaatataaatagtgaccattttactgtcatcacaaaaaccattgattagttaaacctaatagaagtaataactgtttaaatatattgttagttaatgaacactgagctgtatggttactggtagtattatagagtttgttgcatgaatgtatttttttctttcttgccttggtttgtcgactagtggtatacccttgttcattcttgtatatatttcctcgaatattaatgaagacgacttattactggctattccatccttctcttttttactctaacaaggtatcatagattttttttaacactaacatggcattatagaatttttttttgttctctgtacaaacaacaaactcaaagttgtacttcaccttccataaatgatagcaccaagctgtccctattttcttggcataaatgataatctcagtctgtcttgtttcttatcctctcactactctccctaccactcatggacacaaaaagtctgtcttttctcatggtggcagagctacttacaaacttttttttttttttttctaaaaaagtaaaatatcggatgttaactccccaaatctggacaaaccagaaaaattaaaatatctagcctaggaaactagagcgtgccaccacaccattttttctcggatgttagtgggatctattcctattgggaaatgagtaaaatacattatagttttcgtcgattatttcattaagtgagtcgaagcgtaaccaatgaacacaatcacctacaagaaggtcttcaattatgtaaatagaaaatattgtatgtcgttacggtctttcgcacaagatcgtgtctgacaacagaaagcaattcaacagttatcacttcattgaattttgtaccaatcatgggattattaaaagcttttcgattgtggctaggccataagcgaatggacaagtagaagccgtcaacaagattctaatgaccacattgaagaagcaattgcaagcctgcaaagcacattatcttggaagaacttctcagagttattcgggcataccggacaacaaaaatgacttcaatagggcacactccatactttatggtttatggctacaaaactgtcatttcaattgagaccacaatatcgtctcataggtgaaaaacctacgaccctacccagaatcacgcttcaagaatcgctatatctagttgaagaactctggaacagtcacaagttcaactgaaaatgtatcaaagtaagattttccaaaacttcaattcaaaagtaagaactaaaaatttaaagttagagatctcatcttaagaagggtctttctagcatctcatgagttgggagtgggggtcctaggacctaattgggaagggccatacaaaattcagcacaaggtgtgtgacaaaacataccagtttaaggagacttgatggatttgagattccacaagcccaatgcggaccactccctgatactatcagcgactagggggtgtccggatcctattctattcttgcacatttgatttccttttttttttccaagaaatgtaagccttagggcaaaaatcattttatgataattacaaaggaatttcaagaaaaatgtgaagtctttttaaacttttatgtgtgtttctacaggtgaccaagagcccaagctctcagctgacttgaggggtattatgtacaaccatgtgtctttaaaaattctcttaaatatgtgtgttctttatatgatcgaggggtagaagcataaactgaagtccaaaaggtctaggcctttggaccagaacctcaggagactaagagtaaattacttcttaccacgcctagatcagtcaactgccagttagcccaggtggacagttaaaagaagttcaggcttctaaaacgataaataaacgaaaacttcaaaagaaaagtaagaactgaagtccaaatgttccaagcctttggaattggaaccttaaggagtctagagtaagttactttcaaaagttttccattttaagaatacgcatgttaagataaattcgttgaaacccaaaggctcaggctgttggaatcataacctcaaggaattcgaaagtagacaatttaatgaaaacctaagacataagactaagcacaaagttgaaatcctaaggcttagactgttggaactggaacctcagggtgttcaaaatcaaatttacttagtaaaaattcatccaaagtcacatcacttaatgaatttaaacgcagatgtaatttaaaggtagttttagtcctcaacagttagtaaagcaaaacaacgtaaattaattacaatgtaaggccccgttgcaagggcataagcaattgtctctgcaacatcaaaaagggtgacatttgtccctaaattaaaaataaataaataaagaagaagataaaggcaacaattgggaaaatttaaggctagacacccaaatcagtattggcaagggccgaacttggctcttgagcaaaaaggttagtaggtgattcttagaccagaaattcagaagttggcacttcatctggaaggggtgcctttagcttttcaggtgggaggtcaagagatggctcttcagtcaaaggatcggtctacagtttcggggacgaatcttgtgcctcttttggttctgcttgcactcgaacaggaagttgggcgcgaacttcatcctcctcatcaccgaatgccttcaaagatatatcatgatctctctggaaaagggtgtagacggaggtgaaaaaggcatccttccatccaacaatcctcttttcctcagccttttctaatctctcctcggcttccaccaacttggcattggcctcctctagccattattttagttcgtctttcgaattcactaggccatcccggtcatttttagtcatggtcagctccgcctccaagacccaaatccgttcttccttggcttcgacgtccttcttaagctcgaccactgtcgcctttgtctatgccatttcttcctatgctttgctcaactttttctgcaactccacctcactcttttcgagtttggtagttaggtcgcgagcttgctgatagctgagttttaagtcttaaacctccttggaaaacttgatgttctcttcttgaagcttcgtcttcacagttgagactgtagtttagatgcctttgtcaagccggactttaaccgcaaggtccacgaccttttggaagtgttcctgcctatctttgttttcacccaccacctgataagtgtacttcttgagctccgatagttgagatttggtgccctcaaaggctttcaggctctttctagcctggtctagttctgatttggcatttgtcaagtcctccatagctgtgatcttcttgccatcaactgcctaatattcatccctgaggcttttaagctcatggaccattcttgctgttgctttcgcactacgctgggcaaggagaacatcctttaaaaatagaagataaagggttagtgaagaagctggaaaatagcaggaaattaaaaattaaagttataaactaggatacttacactgacgacctggtgttggagggcttgagacaaatacaatgtgtcatcattggccaccgtggcccaccactctattagaaatattttaccaggatctagatttactaacatgtattttggattataattctgtaatctaacatcctaaatatgaatttcctaaaataatgaattaaagacattaaaaagttatagaaaaccttacattgatggtagataaataatatgactccttctgttcagatctctaatccttgatcctttatgttgtagagtatgatcaagatttgaacttggattcttgttcaagtaacagaaagactacacaatcttccacactatcttgagtattgctttgaaatgtgtgggaaattactcaatcactcaaggtttgaaattattgagaagaagaagagaattcaaaatatatgaagctctctttgattttctatttgtctaacaaagtgagtcaatagtattatgaaaaccaagagctatcatattctatttatattgtaactttagggttaggtttagaatttaaaatggaataaaaaagataaaaatggctttattaagcccttgatggccgaaatactcatgtgggcccatgggttttaattttgccattttattgaaacttatctttctttttaaaaataccatttttcattttaactttataaatgacaattttatccatttaataattataatagttatccgtgtttccggcaagggacatgtggaatctatgtcagcatcaaaggtccaccagtaagccccaaagaagacaatttgggccaagcttaagttacatagaaccatctaggaacgtacctaagctccgtgactagatggtcctccgctagtggcagtccgtcggaagcagctccagtatcgtaatgcatgaagagtcagacaacatgttcctggaagaccagtccaatttccatttttatccatgcacacaaataaagaaataaatgctcctcaaatctctatagaagatcgtatcatgctaaaagggaaacttcctaaacaaagatcaagcaattaattcatgattaattgcctacgattgtaggacacagttttgacttattcaaccgcatctaatcttcctagtcagcagatcatctccttcatgggctggactttacgagacatcccaagttatgtaattcaatgtaaacttcccaatagagggaaaagagaaattaaatgtaattttcttaacactataaatacccaatgaatccttcgaataaaggattgaattctcttgcaatattcactcaggcaaacttgagagcctatgctcattgtattcgcaaaggtttttctagtttaagttacataataacattaactcgtgaactaagtctcgttaacgccccaaccacgtaaaaactatttgtgtgttcttactctttctcttttaattatttatttcttcaattctaattatttataattagtatttcaaaaatctcggtaaatatttnngtgctttcattgagagttgaaggaagcagtgataccatctaaaaattacgttttgtaattatggtactcactcgtaacaagtttggtcttcacttcactgatcctaatgccaagataggagatggaaaagatcagaacgaggcgactagccgtcataaggattaggttggcaaagatacagacctagatgctcctgtattgggagatgatgattcaacagagaatagttctgatgatgctgatgtcgatattcaagagacctcaaaagatgatcctcaagacacgctgaaggacaatcatcaagacaaacctactgaaggcagtgctggaggaaagggcactcccgaaaagtcagatctcgtggtcgccatggccaaaagttctagttaattgaatgcgcaaacacctccaacaactgatgctcccaaaagattgtagaaccttaaatcctcgcaaggataaaaggaaatggataataggtgaagctttgaagaagactcctttgactaagcagcaaaataagtccaaaattgtcgaccaacctcaatagaaaaagaaaggaaaccatgcttcagagtagggtgaccagactaattctaaaggcagagtcgcatagaaagataa

SEQ ID NO: 17711 - DNA, 2774 bp, Cannabis sativa
tagagttgacaaccaaacaaaagagaaaaaaaaccaatattgaggtgactattgcaagggtcaagagtcaaacttggaaagacaaaacaaccaaaacaaattgtctagacttaatgaccttccttaccttttgttctcaaagttttcttttttattatatttctttgtctaaagattggatttttacttacaaaaatatatctgcaggtaaaggagaagtggtgaattgttcaaaagaagagaatagtgacttgtttcatagtgttcttggtggacttggtcaatttggtatcataacaagagcaagaatatcactagaaccagctccttcaatggtgaaatggattagagttctctattcggatttcgaaacctttacaagagaacaagagagcttgatcacacaagatcagaacaacagttttgattatattgaagggtttgttatcattaacagaactggtctcttaaacaattggagatcatcttttaatccacatgatccttctcaagctagccaattcaattcagatggaaaaactcttttttgtttagaattggttaagtatttcaacaaggacaatatagatatggtaaatcaggtaagcatagtaaacttaattaaattatgaattttataggttttctatacttaattttatggaaaaaattgaaaaatataggaaaacggtaactagttaccacaagaaggtaaccagttaccttataccttttttccaatatttcttttaatttttttctaaaattttccaaaatgaaaattctctaatgttgttgttgttgtaaatgcaggaagtggagaaaatgttgagtaaattaaagtatataaagtcaacactgttcatatcagatgttagttatgttgattttctagacagagttcatgtatctgaagtcaaattaaggtcaaaaggattatgggaagtaccacatccatggcttaatcttcttataccaaaaaccaaaattcaaacttttgctcatcaagtatttggcaatatcttaactcatacaagcaatggtccagttctcatctacccagtcaacaaatcaaagtaattaccttttatattacatatctacatttttattgaagtacattttttttttttgtgtttttatttttttgaaaaaaggggacaaaatcccatttgccttatgttgtccaaatttgattgattgatatttattttacaggtgggacaacagaacatcagtagttatcccagaagaagaagaagaagaagaaatcttctacttggtggcattccttagctcagctgtaccctcatcaagaggaagagatggattagaacatattctaaaacagaacaagagaattctagagttttgtgaaaaatccaatcttggagtaaagcaatacctaccacattataccactcaacaacaatggagagcccactttggtccacaaaaatggcataaatttacacaaagaaaatcaacttatgaccctttagccatatttgctcctggccaaagaatatttcaaaaaggcaaacctttaatacaattctcatgacaaccatgcttttatacaacagtaagtaattattgattagtattaattagttagttgagatttttgtaaagggtttaagtattaatcatagttggaaaagggacttggagaacagccgtccttcctatagaccatgtaaataaataccataaatatatatatatatatgtcaattttgtaaagtttaataacaaatattaatgtgtactactcaatctctatactttataaatgcatactattcttcttcttctccatgttcaagcttcaatcttttttgtttctttctttgaaatagtgattggattcaatgaagaaatagtaaagaatggagcgatcgggtcccacccgaaaatttattgtctagccaaagggcatgcaaattaatttattagtcactttttaagtaaagcaactaataagaaagagagaaaatatgacttatacatagagaatcacatgagattcatttttttttctttttcaaaatagtgattgaattatactaagaattcaatgaagaaatgcaaaagaatggagggattgatttcatctgaaagcttattttctaatcaaagggcagatcaattttggttgtttcttttaagtatatcaaccaataaaaatgagaaaacaactcagaaaattagacaatacaacttagacataacaaatcataacaagttttgagttgtttaataataacacttaaaaaaattgagcagaaaagttgaatctttagttttagtaacaaagttttctcagagaaaaattgtttgtatatgtatgtatggaccacatagacaaaaattataactttactattaatttccccttacttattagttattacccttttgccagatatgaaacttggacaattcccaatttccttttgtaaaaattaatgcagtgtatcaaagatttgatactgttggaaaaagtaacttcaaaatatctgacaattgaaaatgaaatgaattaattatatgtttatatttatatggaggggctcaaactaatagacacctccatgttactttcttccattgttatcatgagaaaaatgactatgcataaataatttgcatcattgcattgtctgaatttagtcttcattttcttttttgcccaatttgaaagctatgacaaattttcctaaaaaagaaaaggaaaaacagattaattaaccgaatttttcgattagtct

SEQ ID NO: 17712 - DNA, 3892 bp, Cannabis sativa
  modified_base (1889)..(1890): a, c, t, g, unknown or other
atatatatatatataaacacattttgtatctattgagtcgaaacagaacttacaatattattttttttataaatataatattatttttgtcctgcatgttttttgataagttgaaaaatgatcataatttaattttgttatatacgaatattttaagaaaaatcacttgtttgattttgaaaatttttgcagaaatggatgaggatgataataagagacttgtgtatgttttgtacgatggaagatgggttattgatgagaaatcgaagtcaagaagatatgtggatcaccaagttaagataattatggcagctgcatctagatatttttattacccatacaaagggccatatgattggctcattcataaaatatgtgaagagcttggagtggattccaaaaccatgaaacattccatcaaaatgtcatttgatccaaaatttggttccaacaacaaaggtatgaaaatagaaaatgatgacaatttttctgtgtttcttcacttaatcgagaatgaccctaattttaaaaattgtcctattgtggtagagtgggaaaagtgaaaagtgagatcatgacattaattaattagtacaataagttttgtttttggatcaactcaaaatgaccagtcttgtcagttttcagtattataagtacttttaggtttggatcaagtactagtcttgtctttttaatttcaagtgtgtttctattctgtatgaagaatgaaaattagttatgtattaatttcaatattaatattctaccatattattattatttattaaaaaagaactttattaatcaaacggaacatctgttacaacaatgagcattacaagttaataataagtacacttacatatattacaagcaaaatcataaacatgttgatatcttttagagattttccttttattaacaagcaacaatctagttttaaggccattaattataagtatttcgattctactagataaaataaattgttgtggcacaagcagctactgcaatatcagaaagtaaactatgctctctttgtagaaatccatgcctgccagtacgtttgagataattatttggccacaccaagcacaaatgacactcaaagatataattatcatcagcaaaaaatatgtaagaaattaataacatgagcttgtcttcaaattttgattcgagatttatagacttaaatcaatgaataaagaccctaacatattgtatatgtatacatgcattgtataggttactaatacctaatgtattaaatcttagttaattatcttattatttaaatggaagtggaatgtaacagctgttaaagtacacagttcaaaaacaaattaagtatacacaattgctttattttattctttccttcttcttattaactagcaacaaaaaagtataaaagtgaaaaattaacaattattattcttaatttataaatacactactacttcacaaattctcttcttcattaatgatattgagtcctaattactttaataattctcttgcagatcacaaagactgaagcttaattacatttgctctagtaagtaacatatatcctattctcaaatcaacttaattttcctatataaattctcaattgtgatataatcttagtaacttattacaatgtaaatatataattttttagagtgtaaatatgataactcaactactataaaaaaatttatttttagtcacaacaaaatatatttgtgactaattataaatcatcattcttagatgttgtgactaaaagatctgtgactaaaggtattagtcacattcacaatttgttgtaactaaatgtatttttagtcacaatatatatttattgcaactataattaaattagtgacaatttgtanntaaatactatattttagtcacaaaaaatttatgttgtgactaaaaaattgtcactgtaattttttctatagtatataaaaactccatcaaaatgtccttagcatcattttttatttttgataagtggaaaaatgatcataatttaattttgaacatatgtattataaatataaaaatatcaatatattttaagaaaaatgagatgtatatgtatggttttgaataatgcagaaataatggataaggataagaagacacttatttatattttgtatgatggaatgtggattattgatgagaacagcaaatcaagaagatatgttgatcaccaagttaagataatcatgcaagaagatagacatatgggatacccatcatacgatgggccatacgattggttgattgataaaatatgtaaagagcttagattggattccaaaactataaaaaattcaatcaaaatttcatttgatccaaaatttggttcaaacaacaaaggcatgaaaatagaaaatcatgacaatgtatctgtgtttctttacttgatcaagaatgatcctgaatttaaaaagtgtcctattgtggtagagtttgagactaattaattaattaattaattatgattaattatatacaatatttgtaattttcttttatcttttgtatgatcaagtcaaatagtcaatgagttgtgaggagttttcaattgtgtgttgtttccttctttcctatgtaaagaaaaaataaataaataaagtgaaattaaacaatagcacttgtgtaactttatagatatctatgctatttacatctctgagtaaatattaatatgaaaaagaggaatttagaaaataattttgaaaattatcaaattttatattttttaataagtgtttgttgatagaaaaatcatttcaatataaacacgttaggtatttatagcgtttaagatcacatattttaaaattcaacatcctacacctcatggatgttactatctcttaattagtgtaaatgggattagtttagtgattttgaagttatgggagctattagaaacatcccaaatgttcaacattgtcctacaaagttgaaaaaggatagaaactggttactagttactaatttttttttaaaaataattcttcaaagcgttctaaattatttttacttgattttatatcacttatacacaattataaatgataaaaaaaaaatcttcaacaactatattttcattgaagctttgaatttcaattaattaataagttgtgtaatctctctttacacttaattagtgataatgtaaaaattacaaaatgtaaataactccaatacctcatatgttacaagtaattgttttgttccataatatattgggataagttgaggaatacctcttttttttattaatttatcaaaaatactttcatattatatttcattaaaatatacccacttttgtgagtgggttgcccaatataccctcacccttcacttaagtctaacacatactttacattaatttaaaggggtataattggaacattatttataaaagtgggtatattttaaaaaatatagaaaaaaaaagtaaaaattaaaacatgtaaagtaaagtgggtatgcaatgtaatttatttatattatttatttaaatataacacatatcatgcattattgcatcatattataacatcatcataccatattttgatgatccatacatatacaaatatagtattcaatttcaatcaaattattaattaaatatttatatatatttaagatctagctagctagaatagaaagtcaaactctctacaattagcatatataattaaattgttatttataataatcttctcatttcaatatataattaattacatgatccggatcgatcaatctatatacataaatatatagatttgacaaaactaaggcattattcccctcaagacaccttctgtttgcatcttccatttatatatatatatat

SEQ ID NO: 17713 - DNA, 4492 bp, Cannabis sativa
agtggatactgatggtttattcctttacgcttcggttgtggttgacacgatttggagggcttgtaatgacaaggttcataataacactatgggtagcttgatacattatattgactttatatattattgttacacagattatggatcctgtctgttcaagtctcaccaggttgatggtactctgggttggtccccctcgccagaggattaggtcaaaatcaactgcgatgtcaaagtcggaggggaaaccatgtgcgttgtggcgattgcgagggaccatacggagtcgattttgtgggtggcgacaaacaagctttacttctctgatcctcttatcagggaagcggggacttgcatgttagccttggagacggcggtctcgatgcatcatctttttgttatggtggagagtgattctgagattgtgatcaagaacctaaaaggtgttgaatcgttttggaggattgagaactacacaagataatgtaagcatctttctacttttttgacaatgtttctggtatggtagaggtttctactattccgaatgctatcttttgtaatggccgtgaggtctgactgtttttatctaatatatatataaatgctttgtttcaaaaaaaaaaaaaaaaggaaaagaaaatagaggccgtactcttaaaacgacttggtttgttgttgcacttcgcaaagacccaattttttcgatcatcagtgatttcggacttcttcttccctgatttattccttggtttttgaaaaataaataaagatacattcactgaatcacagttgaacaagaagaaaccacttctttcataccagtacaagaaaagcaatgccctagaatttgaggaggaagaagaaaaatggcttactctggatttgggaagcaatcagggccggcaatcggagggggagggcctaagtctccgccactctttggcaatgtggttcggcctccttctccttccccaccaattttcaaccctgttcctatgcgatctcccaggttctctatctctttctctcagctccatcgattgttttgtcactttttaattgccttaaaagaactgttttttagatgaacatttcgttgttttcttttctctttttaggccagtagagtctcgtggtcctcctcccatttggggtgatgggcaaagaccattttatcagaaaaatgatgcccagtttaaccaaagacctttggtcacttccattgttgcttccgataattctgatactagcgttagtttcaaggtttctcgatctcaagactctagaagaaccaattcacctgctatggccagaaggtacatgttttttttattttttttggttcttttaatttttgttttgattatgtattaatttgcaattaacaactgtgaattggcttctaggaacactgtttccagtgaaggctttcgtccttcttttgctggacctggaccagtacggtgagtttctttttggctgctattctctgctctagttttatcaattacttaattttgtagagattttgttttcttgctgttgagtgtagtagtcacttcattcctcccagagctaattcgacagagttggtttcgagaagcagtcttcaggtttttcgcccttcttacgcccaagctacagcccctgtacggtgagttaaaaagtgttttttacatatttatgctgaggcacaacttgcaacatatccttttgctggttgatggaaatctctgcatcatgtttgagaaattgaggcccgtttcttttatttctgaactctgcttacattaggcttttcctgtctggctggttagtacagtcaaataatcataaacataagatgcatgattgccttgtggatggcactgtacctctagtgctttctttggttcattgttctccgatcatattttctgtatagcattgtgcttccttaatatatctgctgtttatgaaacaggcctgctccattttcccattcatttgatggccagcccaagtcaccagtcaattttcaggctgtacaacctcagtcttcactgtcaccttatacgagctcgtatggttctgaaagacgccgatttgatgatgttcaagtaacaaatggaataagatacccttctccaccgcttgccaatgaagttcttcctgaaaattctcattttccacaaatcaattcaaaaaggtaggatgctgtgtaaagtaaactatacataatataaactattatgtggtatgagggaaacatgttttctttcatgtcttgctgtgtgactgaatgtctgctatattctttgttttcaaaaatctgttaaacggaacggctctatcctctgtcagtggtccaacacttaaaccttcatttttctttacattaagattatttagagatctaaatatgtaggatgttgtgttaacaagggtagtcatgctattggaaaggatatgagttctggatttttgttagtcatggagttaaaagatggtgaccttcattgatggagtcagttagagagtatggagggctatagccctccctaaattttttgtttttatgtatttttgtatatattaattatgtcaaaaaaaaggttatttataattattatcaatttgcccagcctaaattaattgtttttacaattttccccctcccctcagtttacatattctccctctgccagtagcggccttattatactcttggggtcaccgggtgagataaagttggacacatttatgatcagacatcttacacactgaaatctgaatatgggtttggatagatatcaattaatagagttaaaggttgtttttattcctgttgagatataatttctcttcataagagcagcatcaattaaaacaagatgttaatgcacaattcactgcattgtacatgttaatagacagacagtctgacatgacataaaccattgtagttgtcttagcaacattgaggcacttggataaaaagcaattgggaaagttgatttgtcttatttgtgctttctactccaggccttcttcatctcctcctgcatatggtgctatttcaaatgttgactatagtacttatgattcacaagctcctcggaagttattggcacgtgcaaacaatactcattctgctactgctgctggaaccaatcccaccaacttgccggttatgaaaagatcaagatctcctactttacatcccagtgatgaagccacggagggaagcatgtatgctagtgaagatgctgatcggtattgttttctgtttgatttgatttagtctgtctatcaatttctaatgtccttgttaagttatacgaagttatgatacaatttgcagagaaatgcaagccaaggcaaagagattggcccgtttcaaggttgagttgggtgataaaatgcaaagcagtaatgatactgcagagaaaaaggtttcaaccaatcaacatgaactatcttttgttggaaggaacaatttatctccagaacattctacagaattggctgaagatgttgccggtggcagtactttacctgagaatgaaaattctggacattctagtgttattgttggcttatgtacagatatgtgtccaggtatgtctcctaagagtgtggttaagtttttgcttctttcatctttgagggcatgaattatgtttcatcttattcatttggttgatataataattggggagttttgtatgtattttgaatggtaagtcatgagttctttaatgaaatatcgttatgattgactctttaagttgagttgtgcatgatttattgtattctatgttagaatttgtgaatttccaatacatatcttttaatgtgatcatttgtgtttcagagtctgaaagggcagaaagagagaggaaaggggatcttgaccggtttgaacgcgtggatggggatagaaatcaaaccagcaagtatcttgctgttaaaaaggtagtgatattaaataggctgttgagtttcagtggaaatttttaaacccgtgccctgttaatgagtgcatttttttaaccttgttttctttattttgttctatgcagtataacaggacagctgagagggaagcaaatttgataagaccaatgcatgtcctgcaggacacaattgagtatttgttaaatttgcttgatcagccttacaatgataggtttcttggcatgtataatttcttgtgggataggatgcgagcaattagaatggatttgagaatgcagcacatttttaatcaaggtgctatttctatgctggagcaaatggtacgcactgccactatattgtttttgtatgataattaattgctgtttgctcagttgtcatcacaaagagactctagaaacctttttttttttgaactatagaaggtgggcagataagttagaatgagattatggaaaccagtattttcaatcttatggctttctttcattcatcacaagccaatatttcgaagtggcagtaacttctc

SEQ ID NO: 17714 - DNA, 18200 bp, Cannabis sativa
  modified_base (2269)..(2272): a, c, t, g, unknown or other
tatcatcaaaatgtttttacttgagaagcttctgaagagatgcaatggcctcctcgtaatcctttcccatgtcttcgttctgtagttgaataattaaaacaaaaagaaattatgtactgcttaattaatagagattaagtacatagatatatatagtagtatttatatcaattattactaattaagtacctagctatatatatatagtaagctaatattacattaaactttagccaagtactacagatacagttccccttttttcttagatctttggtctaatgtggaccatacttttttttttttccgtgaaacttatattctgtttaagaatatttcgcttgcttacatatatatagcggatataataagtagttcatattatattagtgcaatgttataaatggggaaacaaaatatccaaatggaactgcgtgtataaccatacacgtttcactactaaaaaatgggagccaatcaagaactgccacgtcaaataaaccaacatggttagtataagccagtctctaccggccacgtacgtatttatatacttaaaatggttagttgcttgatagctccacaaaggtattaactttgccttaaaagccaaaaacaacactgttttaattgtgaaaatgtaaaagtttcatgcacattaaaataccaaaagcacacgtacatacacgtacccctccaatttttttttcttttttccttgatcatattaatgaaacaaagaccacaaatatatatataagttattacaataaaaattaataataaatgcatgatgaataattagttaattaattaattatattacccaagtagttgggttgatgataggagaaggagctgcgaaaacgggcttgttttggatgagactaggaggaggagtaggagaagaaggagaagaagaagagccaagcctagcgcatggtcgtaatgtggtgggtttattatttttaagagagttagaaggagagacagtggtggaggtggaggtgagacaccagctgtggatagaagcagcagtcgacattgtgcaacctaaaaattatggtgttttggtatatagtttataccccacaatttctcaccccaaaacagataacgaaagcgaaataccactaaaccacagcttcaccctttgaagatcaggtttcgacgctccagatcattttctttagttacctctccatcaattttctcacagaatatatatatatgtataaatatgtccaaaggaagatccatgcttcttaataacctttataattaagtcgtttcatttgcatggtttaattttataactggttgccacgtggtccaatacatgttatcgttatatatataatcctattctttaccagttgatatagtttgtcccttgttattagctgagcctgagcgatcaatagtatttatgttattattacaagagtcaatgtggtttgaaataaacataaataaaacaataaattctctttatcaaaacgagtggacatcttataaatattggaccaatatatatcactattgggtcggcatgcattaacaacagtggagctactaagagaatatttattattatttatttcatatatatataaatatatattaaaaaaatgggcattataatcccaacaaattataaaaagtataccccaatattaaaaaaagaaaaaagaaattttaacatttaaaatttactctaataatttttttaaaaagaaaattctttcacattgtattagtttcaataattttttaatcttgtcttcatatactttgttagaaaatgtatatatatattgttctaataaaatttgataaatttttgaaattatatattaaacatatgtatctatacaaaataaaataataaaatagactttcaaatcaaagaaatgacgaggcaccttaggtgcaaataacaaaatgtacgacaaaagaggtgctgtatagtgcaatttaatattagatctctcacatgttaatttgataaataatataaaaaattactaactattcacatttagtatagtattggacagcttaactcacacccctaatagcaatattttcaaaataataaactgcgtgcttttatataaaattccttaattagctaattaatatacatataatgttgagtataactttataaaagataaaatatccgtgaaaattgggttcagacatattaactttttgaaggaaaaaaaattacaagagaacattgaaagttttttttttttttttnnnnttttaaaaaaaaaaatttaataaataaataaagtaatgaattcccttagttatagtgaaatcaaaatattcatggtggagatgtgacagagggaatgggtgaaggattgtagagataaggtctatcctaaaaacatggttcttgtggtatatttaagaccttgggtgtccaaaggggattttgaatcagacattgcctttcatcactgcttttctggataacaatatttaaatttattacctacaccatgcattttttatttttctataaatattgaccttttggccatttccaaagagtactagtgaaaaaacaatattgttacagtgggatttttttatatttttttacttataataggagataagaagcttaaccatggatgtatggacaaattattattcgtggttcaaaacagcttagctagtttctaacaattttggttcactaagttgtacgtgatatatatgtacattaacaatataatatctaagcataaatttaattaaaaaaataaaagggacgtggcagtgcctttatatacataatattattttttatatgtttgtggtgcgtaatgtgtaatggagctcattattagtgatttattaatgatgaaaattgataagatgagtgaaaaaagaagagtacgttcagttcagacagattacatttagccagtttaataatatagcaataattggtaagaaaatagcatatatatgtacgaatcaatattgcttgtccgtgcatatgtaggtacagtactagctaggcatattatatatgtatagaatgtactattattgttttgatgaacaattatggtgaataatgagagcatatgcatgcttaattgaagatagttactgggttttatatatgtgttttgtaacattttttttgtaggtgtgtaacttgaatacataaaacgacgtaacactcttgcagttttgatataaaacgacaagaacgacaatagagaggtcagatgagagatgggatatactatataattatatattatataaacacacgtattatgtaaagcatgtatataatcaaactgagaggaaaaaacaaagagggaaacaatataaacctgcgtaggatctcacaacaaagacagaactaaaatggaacaaccgtgttccacagcaaagagtgataacgtttttgctcatctttttcaactggaatttgaaagaattggattgtgattgagagaaagaagatatatcagttgtgtgaactttatatatatgagtgtatatatatatataagctatccagctttacatcttcacagtgtcgacatttttgccaaatttttaaaccatgtcgacatcctcttctcatctacttgacatatagttttgtttgtttgctgttttatttttatggcactatccaaaattgacactttttttatgggagatttgtaggttaaaagctgttgcaaaactcactaatggtactattaatagatgttaaagttcattatacaattagatcagaatacgatgctttgcgttttcaagactggtcatataaattgaagaatggaagtataaaatttggggcttggcctgaaaagcttgttaattatacagaagcttaaaataattccaaggacgtagtattattaacagacgaccaaatgaaacataatatacactagctcaactgttttttgatgagtagcaaaattaattcctcatttagacatttttttttatggaacaaacgttcattcctcatttagacatttaaaaaaataaaattttgaattgagcctccgacataaagcttattcttttattgtaacaaaactcttgttccgtgcaaacctctacttgcagataccagaaggaacttggccaatgctaagagaaataaattaagccttgagaaccatttgttgtagagccaggagtagaagaaagccaaaccaggttggactcatatggccaactacttgggagataatctaattggacatacagagaatgcaacacagcgagctgctttcgctagcatgaagcgctcgttctctgtcaatggtctctcaatcaccttcacaatgtttgcgtcctaataccatataagggccaatgaattgaatcagaatcacaaaaatgattcattataaattgctttgtgacagtaaagaggaagactgatactcactttcttttgctgctgaacagaaggcctcacactggctatatcaccaatcacaatcacgttgttaacatttccactatcatccctctctgacggtgatgatggtgaatgccgccaattcccgttcactatgtatttgtagtaatacctgaacatcacaggaatacatgttatatcaacaactacaagtcttacaaataggaggaacaagtctgtttgatgatttcacaacatgtaatattgctctttgttaaactagattgttaaccactaccattcactttgattcagggtaataaacacaaatgtagaaactttataagcaagcactagtcggtatgcaataagttcaatcataatatcaataacgcaatataacaaattttacacttactttccttgttgaagtttaatttctacttcgaatctaggtccacctttatggtgtgctggaactggttctttccaattgccagtgaaatctccaactaaatttacttcctccccctgtcaaacaacataaaatcatgtgaatagaaacaccagccagcaggataagtcctactactaataaattatagcagttatattttgttgaggcagaaacccaaatcacctcatgcccattccacacaaatgtaacagcatgtgttgcgggtccatcatgtctgcctttttccaccatagctatgagatcccaagttgcccaagcaattgctggtctgcagcaatcatgaaggtaaataaattctcaagttatggtatccagggacaataattaagaagacatagtacaagatgaattacagtactaaatgtcagctgaacagtgagagttgagttaaaactaaaaaaaacctgtctggtttgcatgaatgcagcccgatcacaaaattataggctgcatgaagggaagtatcagtcatccagtgcaggtatgctattacacaagcgggagatcgatcaaacccagttgtacaagtaacataaacacgatgattcttttttaacaaacgtaggaggagtcctacacaaaatggtagtttctttctcatatcatacgaatctccatccctgcaaaaaaagatgccagaaaaatttacaaaactcataaccaactagtgagccgcaaccatacaggactttgtcatgccttccatgaataggcaacccagaaacaggggagcaattctcagcttaagaaacagagcattgtataaaattgtgtacttaccttataggatagttgatcattagaataccaaatttttggcaggactgattgatcacctttgggtccattccccaattttctgcctcaattccactttgaaaattaagcactgcagtaactccctgaaacaaatattccacatatcaactaaagggcaaaaaagagagggattagggatccaaccagccaccatttaatgaacattcaatggataggtaattatcaaaaacagtcaattgcttgcaaaaaagataaacatgaagacagttgtgaatgcatatattatttgtaactatcaaacttatttgatcttcagatggttcattagtcattcaagcagaagctccattggtagggaaataattatgctctcaagtactcgaattgaactccttgtttgactgtacttttctacgttttcaaagtttttttttttttgcctaacttttcaagagaaacactattacaataataataaaacagcttatggattagctaaaactatcctttagttagataacaagcttatttgaacaaaagatctctccccctatgtttttcaatcttaatgtggagtcactgctacaactaaaaaaaattcttctccagccagctatgggatatgaaaatatacacacaacgtttattactcacacacacacacacaaacacccactcacacacacacacaaaagaagaaaaaaactcactgctgtatttttcaatgtctctacatcagcttctgtctgaatacatgatcccacatatatctgctctgtaatctaacaaaataaccaacataacaacttagtgaaagaataagaaaaggtttgaaaacaaactgaccaatctcaatgtaaaatacattaagtagttcatataagggtagcatggtacaccttgctataccgcattccaagtgagtgattatagtacagctcgcctttagagcgatccagtgccttaatgtattcctctattgggaaacttccataagcccattcaccatctccaggttcatcttcacagaaaatacaaactagcgggctcatgggtggagacagtgtattcttctgtaattttgattgattacgtacattttcatcggtcagcgatttccatccttgtgatttaagatacttagaagagaaggttacaaacccagaatttccaccgctctctgaagatggttgcaaattggatgccaaaatgcatttgttccatgtagagataggaactttacctctgttaaatgaaatatcaagatcattcaacagaaccaattgttgaattggaaaaggtgacaatggcctctcaagaataaggctgaaagatcctgctttctccttcagcatcttcctgaagaaaccaaagactgaaaaaataaaaatgaaaaattttatgaacatgacaatcataaatcatcataacaatttgaatttttataaggttaacttaaagactctaaatatgcttactaggaacccaaacacgtttttgcatgcataccaacaatcagtacacccaatgtacgtatttttgcaagttgaaacaaaactataaccaaacaaaaataagaaaatatataacaaatatagtgacatactgggtatcaccaaagtccttgatctcgattaactttccaccagatgaatcactcgccttcttcaaggtgtcacccaccataattattctcgacctctccgcattacccttcagtagcaaaaaaaaaaaaaaaaagaaaaagttattattcaatcaaaagaaaaagcaccataaatttatttaaattcaacaaatttataaccaaaacagatcaaatacccctttcttaagtgcgtgaacgaagattttgccatcaacggagagcgcgaatcgaataccgagtggcttctcgagagtgaccatatattcgttcaaattcatcttgaacgaagaagaagaagaagacatagcaaaaaccctaaaaccccgaccattgaaacgacaccggagcttctctccacttccaccgaccaagttaagctgccgcccccagatcgaagaggacaagctcctccgttgtggctgaggcggtgatcgatcgaatgccagagctctgcaacaatggagttgcagagaacacattttcgctaaggtttttgagagtaattctcaaatccaatgcaattgctcactggtattgatgctattgctgttttagattttgtttattagaaaactctgagaacaagaagccacagagttggggctaagaatctttggccccacacgtgtgcctttctctgagtgggtcccactacacgggatctttcttagcgcgcttttatttttcttttttaaataaaagcgccacgtttaatataaagcttttatccagtaatgtaatgccacgcaagtgaagcttcaaaagctaagggtaatcgagtaattagccatgcgattccttgtgattattgggtcatggttatggttgttgatgtggtggtatagtttgggggacaccgaacctaatcttctgccgccagatctctatgcctatggagtatggaatgtatgagaaatatccgaaccacttgcttcacttaaacacgtgtggaatgaaattcaatgaacggtcccgaaagcttttagtaaaatggtaaaagtataattaaattatttatataaggcctaacaatatattttgtcaaatgtcacatatttgaaccttccttggttagatatgttcaatgaattctttatactaccaaattgtacttctatagatgcgatttattaataatactattctgaatgtaaaatataatttttctattacattttattttatttattataaaataaataaataaataaataaagtacctttaccttttatttacactttttttagggaaaattacataaatatttttttaacatatattaatataattagattggatgagttttaaattggattgtgagattgacatccaacaacgattcaattaaattagttactaacttttatcattcaatccaattgtaaacagatatctatttttttgtaattaaattggattggatcggttcggttcacttgaataggattaaaagtgaaagatatttaatttttatttttgttataaattatcattgactcgtttcacgatacaattgaatagaatgtgatagaaagatcacattactgtaaaaattatatttaaatgtgtattattaactaattttatattataaaaatacaatttaatagtataaaaaattttgggacaaaatactaattatttaatgttaaagtacacaaaatgtccaaaagaaataaaaaaagttttgggaatattctttttttgataacaagtttttgggaatactcaattataaattatatgagtttctaggcttttagcattaataattggatagaaaatatttagacggctttttcttttcgttatttattaaggattttcctaagttgtatttaaagtgtgacacaatttcttaagagtggggagtctagagactagaataactttttttctttttcaaatggttctagaagaactacgtttaataaattataaattaagctttggaataaattaaaaaagaaaaaaaaaaaacaacaacttagtggcaaatttttaggtgcatgaattttattgcaataatcattttccacgtataaggaagaactaaatcatacgcaatatttttgtttaatatatatatttttaaaaaaaatatgcatgttcacgattaaaggaaatggatattaaatataatgaccaatccactaaatcgattggttttgagttagtataatttataaatagtcaaacatatcccgaaatttggtagagatgataaaataaaaattagtcgcatcatgtcgcttttagtgcatgaacatttttgaaaatttattagttaaattagcttgtgtattgaaatagtttcaagataaattgaaaataattaatatagtttagaaacctatttgcatgttctcttattttggaaacaagatccttatatagtggatcacaacctcattttcatgtgctaaggacaactcttgtttttccaacccaagttcaaaaatcgtttggtaattttctacgaacataccaacatttatttattttatttatttagaactagaaaagatcaagaccaatattaaatataataaatagaaattcatatattctgttaattttaattaatatatttaattctgtacagtatttttttttttttaaaaaaaaaaaaataacaactctattaatcaattaacttcaactataacaatagataaaacaacaataagagcagagctttcacggaaaatacgatttgaatagaaataagagtcgctagcaatataatgagccacattatttaccgaacgtttaacaaaaattcaatgaacagacttcaaataatctaacaaacccttatactcctgaaccatgcacctgactaaacaaagatggcatgtgaatggcactatgcacggtttgaacatcaactaagaaatatgtctcaagttgaacatcaagttaccttttccttttgatctaacctaaggtctctttgattccaataacctccataaaaaaaagcctgagcctgcccatggaaactcgttgaaaagccttacaaaatagtgccaaaactatcacgagttactactcccacactaaacttcccttttgacactaaaatgctccgttgccattaaccttaatcttattcacattcggtttaatctagtgctcaagtctattattccacttcatcgggtgagagaacgaccccattctattatattgagcatgttgccattgattaaggaccactcttgtcaagagaacaacttctaatatcgtagtcgtcttatcctgccacaccacatcattacaaacgttccaaattgcccacgctaccatatcaagttcttcacccatactagtaactttcttctaagtaactcgaccaaaccagtcccacccacttcgttgatgctaacatcagactgcatccaatatgcacgagcaaacaaataagaaaccagcagatgcaaaactgtttcatcctcatgtcggcacattagacataaaataagaaacgacacatgcttagacaccaactgaacctgagtagccaagcctccagataaagcatgccaaagaaattgttgtacctatagagacactttcaaattccaaactatctttgaaatgaccatattctcattactcgccaccaaagaatttagattatgcagaaacttataggcttctttaactggataaagccctttgatatcacgagactaaaactagaaatttgaggcaaccgattgactaattttagtattcaaaattaaatccctatcccaaggattgaatagatcttctacaatcttcctatcccaaactctcctaccaacctccataagactatcgaccgagacatcatccataccaatgaaatcaaaagtaataaatggattgttattattagggagccacgaatctcgcaaaatatttattgacgagccagacccaaccagtcgtctaacccttactttgattaaacattgcattttaaaaatgctcttctaaataaagttgggactatcctcaagggaagcattaagaaaagtccctcgaggataataacgagttttagaaacgcgactcaccaacaaagagtcattagtaaccattctccaagcttgtttcccaacataaaaagaataaaatcctgtaaatgtcgaaaaccaacacctccatggttgcttgcatgactccagattcttgcagggagtgatgtcgactttgctgaaaccatacataagtttcttacatgactccagattcttgtagggacaaacccattcttcctagggtctatttgaaaatgctatctaatgattcttcattgttaatcatcacattttccaccatcatgaaaaccttgctaatgagtgggtcattatttggttgatcgaagatgtgattaatgtctgttgttgttgggaactagacagactacctattgttgtaaggaactagacaggcaggtcgaaaactgaaggttggcgcagaggttgctttagttttgatgttgttgccccaatattagtttcttagtgactggggagaagctttgaagtttatttgttgaagctaattgctagcagcaagatagaccactatcgaggtgtagtggattattgcttgtgctcttggtgttcaagcatcagttcactttatcatcataagtaaaatgaatctctatcgaagagtagtgcgaaaaaacccaccaaatcttttgtataagggaaaaatcataggttgttaaggaaccttacttgataatttcaactcatagaatcttgttaaaggcttaaaagaaaaaactgcaagggaggaaaaagaaaaagatagattggactgaacccaagctaagtacaatgtcccatatttatgtggagtttagccattaaaagaataccacaactaggatagcgtcccactcccagagggttttcttcaagcaattagaaaatctctgttggatgtagcgtcctgcttccagagagttttctataattgatatttctttttctttctttttgatatttgtgatccatagaggaacacttgcattagcactttagatttataattcattcattatattcttgtgtgacctcaaccgtttatatcataatagtgcttaactctggcgtgtaaatagtctgtatgtgtggttgaccaacttaatgaacttatcaatactggcactgacactgacactttaggattaagaaattcgattactagggataatgtaaacgtttaattaaactatagaaatactaacttaggtgtgtaaatttttttgaatgcccttgcaactcctggctcgcgtagaccaaggtgtatgtgccccccaaataataaaagaagcgccttcattagtcacttgccataccaaattctgttgtttcttgatcatgaatcttgaggagatgtcgcatgtagagcattcgaccactcatccagagattcatggctttgcaatgtttactcactaaagaaataactgaagttactcaagaccaactccaacaaactttactcagtgcttgggagcatcgtcaggtctgtgaactgtaattgattaataacaatgaagtaccaataagctttattcaacacttttattcatgtgatataaaatacaattacataggttgaggggggttgcgcacctctagctaatttggataaaattgaaacaacacttataggtttacaattttatcaaagaagctaagttgatccccactaaactgatgttctatttagctaatagtgtaagggccataacttggcgatggaccccttagcttaagatgactttgctgcatatttttggctcaagaggcaatcgattcacttccacaaggtaaaatgaatctcactgtgaagagaacgttctacggaacagttgctttattattaatatcatctcaaacgctccccgttccagtaccctagcaccgacaacagattcaagtggtagtcatagcaggttccatcttgttcgtcttaggttctaacgcttttgtgacgatatagggtccccctttctctcattggaagtcttcaatgtcactttctaggtcaatatcttcaaaagactcataagtcacatgtatcttcactattgctcccctattcttaatcattgttggaaatagagggagaatcttcgtcactaccctcctgtcccaagttttcttgggaagtaaggtgagattcttcgtcaatgttatcctgctcgagatcatcttaagaaaaagcatgggacttgtcatcactatctccctactcgagttcatgttgggaaataaaagatgagtatgtttcagtagaggcattcaatgttgattcttcttcactttcctggtcaatgtctatttgagacttaggaaatagataagcaatataattggttgcttctggttgagaaactcctctaaccttcttgacggtctcttcgagcttgatgaaatcatctgttctatctagaaactcatgaatggtgtttattgatttgagtttcaagtctttctataatggactcataatagttaatacaacaaccatcaccatgagcttggcatcttcactgagtatctttgtctatgttttcgcctctaagaatcactgtaagtaatcctctagaggcttgtcttcttgcttcttaatgcattcataatcatcgggttcgattggtctgtaccttgatgaggagaattgatcatagaatgcttatttaagtgtttcccaagaatttatagatcctggagaaatcttgagataccattgttgtgctatttctgatagcatggctggaaggattcaatatcgagaagcatctcatatgccttgtaggttagattgtactttaaaattgtgtacgtgagaaagagaatcttctttaccagtgtatgggtgccacactagatttttgaattttgaagggatcttcaaagccttaattcaatctgagagatgtcaacttcattcccattctagctcaaactcagttgccttcggatttgtgatgctttttaccaaggcattaagagtatcaaattcggccctatagacatcacgtgtggtgatgtgtgtatcacttgtccacttctttttggtgtcgcttcgcaagttcctttgtctttcaaatcgatcaaagacattgattgatccaggtcttgtggttattgcatggtcgtgtggccttgctagaacctgtggggatttatcctatataatgatagagtcatctctctaatgtttgctccatgagcggctgctcgtggtactatactgagtgaaatagtcttcctcagagtggcatgagtggagggaatttaactgattgatcaagttcaacatgtctctatgcacccatgtgaagtatttttcctgctagccatcaggacctcagtcgaagtacctacaccaagcatctcgttcttcacaaaaataattttcgagtgtagagtagtttgctggtcttcactctctgaatcttatacccttcactttcttcgtaaagcttccaagtccctctcccaaggttaactgcaggtccctttccctttgtagggtcatggggtggcctagagtcattagacctgtgaagagaatcccacagaggagattagtttcccacattattcaaatttcttcaagcagaattacggttggtcctatcaattgcgtgtggtgggcctgtaggtcttgatcccgagtctgagtcctttcagacattcactcgcagcttatttccctaataggtgaccgctccatattaggaaaatgacccatagatccacatttaagagtctgagtcctttcagaaactcgctcgtagttcgcttccttatggggaatctaatgactgttgcttgctgagtagtgacatgactactaggagtggtagtgtgactttgcatgttcatggatgattgcttgcttgaacttatgaatttctttcaaaataaatttcttggaagagaaatcaaactgtaattgggaactcgaactgtggctctcaatgaaaatatcaaaatattgacgctgaaaaatgaccagctcgctagattggcgggatgaataatgagtttaagttaataatttagagacataaaaaatttatagtagttcactcctcatatcgcgatggtaatggagctacgtctactttgagtttttatttctcacgagaattataataaagtggctaagtgtggggcttgaatttctagagagagatgctctaaccttgtggggacttaaaagaatttgaaaaatgagttagaggagctctccttttataggaaaggagaccctattaaaagaataattaaaaaatacaaaaaatatgaaaaaaaaatcatttcaggctgattttggccgttgatgatgattcatgatgatttgatggtgaaaattgactcttggtgaaaatcgtcaattttttggactctaaatctcgtctgtcggatcattttcgagttatgtcagggtgagacataacctgatagatctttgaaatagcttcgaaatgcaagttgaatcgcatcaatcgaatcaatattgagtgagttatggtcattttagtgaaagttattcagcaccctgcgaccaagttgacaacccaacgcccaggttgacatccttatgtaaacctggacactgggtgagtgccaaaacgtcccagactttttttattttttgatgcttaagtaatgtgttgagaccacttagtcaaattcaatgctctggtgaagttgttcactagttctcgaaagactcaaaactccttaattttgttgatattccaccttgttgaaagggtgaaacatcaaagtaaaaatttggcctatcacgagttgtagctctcgtttactacaaaaatatagttgaattcttggaatagaatctacctttgataagcagaacccaacacaccaggccaggagtcaacctaggcgtgaggtgcttcttgggctccttctcaaggctcgtttggatacttctactgcatccaagattgcgaacggggtctcctgccctatttttgaccattttcagaagaatacttggagtagaatttgtgtttgaggagcaaaaacatgcgaactaggttgcatgtcaacctgggcgtagggcccagtgccatgtcagcctgggcattggagccctgttctggctactcagaaatcttatttgctccatgagaccacttgtatcttcattatttctgatgatggaaaaaatgtccagaacactttttttgaagtatgactagaaatatctcaggttgacaaaatgtcaatctgggcactgggcctagtgccaggtgtcaacctaggcactggatccaattttttgccactagatgactccgtttgattattagaaacacttgtatcttaacctttggcaaaaatggaaagtattcccgaaagacttgtcagaaaaaaaaaaactccttggaaatggcccaggttgacaaagtgtcaacttgagggctaggcccagcactatgtcaacctgggcactgggtccttgttgtggcatataggtcgatccatttcttctccaaaagcatttgtttcctcattttagatgaagacaaagaaaatactcagtatatgtcttcaatattgtggttggaagtgctccactttgacaatatgccagcctttgtgctgggtgcctagagcacatggtgccttaggtgctcaaaactaaaagtgcttagattctgattttttttccctcaaatatctttgtgataggtctaattcatttcccagtataatgtttgacatatttgcactaagacagacccagaaaccgaaaccctagtagggttgttaacctgggtgttaggcactccgatttcgggttgctgttttgttgtattttcaacttccagccttaaatttaattcttcatgtcttcatggtacaatttactgaatgatagtgagctgaaaataatttaaggagatccaaacacctattttggagttcccagagtcaacttgagcacaagtctaagaactcttcctaggccgactgtcatgactcaggactactaaattctgaaatattttctttgttaacacatatcaaatattaatatccacgtcaaagttaatttttgtgtaaacaacatacacaatatcatatgtaaaatgcaagactaaaataaactgcatttaatttagctgttattataaaccatgcattatgcatatgatatgattatatatatatatatatatattatttttactatatatacttattagtacaaagagctgaccaccaaggaccacatacatcaaattgataaaataaaataagtctattcttatatattatattattggttgcaccacacaaaaatacaattatttacgaagatcaatgtgcgaattgttttcattgacaatagaaaattaacattaatgctcattattacatagtagtaacttaatcataatcagccattaatgaaaaataaagactaataacacacgttgtattgaaaataaggcaaacttccataaagcatagaatagtatgagacaatctatctatgtgtattgaaaatagaagaagatttgcaaaaataagattaataaatatatcattatatttatctattttatttttatataacttgtgactatctaataaaaataattggtttaacatgttttttgtcaaaattaatagccaaaattaacactgctataaaaaattaaatttgtaaaaaaataattgaatttaaattttaaaaaatataataaaattgaaattaaattttatatattttcaatatatatgatagaattaaattagatttactcttttattattattattat

SEQ ID NO: 17715 - DNA, 10608 bp, Cannabis sativa
ggatcgtgtttggtctcatttcaacaaatagaattctaagtacttctccaaaggaggcaaataagttttgttgaagtcggtggtccaagccatacccttttacgccatggcttgcttcaagcttccttttttctttcatacaaaaatcgagtccctaatggctcgcttttggtggggaggaccgaacacaatcgtaaaatccattggaaaacatggtcctcccttagcttctcaaagtttcatggcggtcttagctttcgttcaatgaaagcttccaaccaggcaatgttagccaaacaagcttggcaaattcttcaggctccacactccttagttacaacattactaaatcctgctattttccccacacctccttccttgaatttggtaagggtcgtaagccctctcttgtttgtatttcttgagaaaaggaacttctcatgtcaggtattcgaaaatctgtaggtgatggtacaaccatttctatttatcatgatgcctagatcccaggacatgacaaactaaattatcttagacacctttcagatggaagtcgggtagtagcagatcttatcactccagccaaaacatgggacatccctcgcattcacaccttatttcccgttgacgtctgttgagctattctaaccatacccttaaccactatccccactcctaacacctactattggccctttacaactcatggaacttacactgccaactctggttaccacaaagcccatagcttactatacaacctcagccctacaacctcgaacaccacatttacacaagcttggtggaaaaagatgcggacacaaccaattccttcaaaaataaaacaatgagcttgaagcaatctggatacatcaacatggaagatgcaaagagtacatccataccattgggtgaacagttcgtcgaaagaacagtgtccgaccagtgctaaagagttggaggaaataatagatgtaccctatttcttcctgtcaaaagaacagtgtctgaccagtgctaaagagttggagaaaatgaaagatgtgttctattttgtcctattaaaagaacagtgtccgaccagttctaaagagttaaaggaaatgaaagatgtaacttttgtagtggtgttagggtgcttaatgtatgtaatggtgagcaccataccggacattgctcatgctttgagcatcctaagttggttcatatccaatccatgcattgaacatgggaaggtcctcaaatggttattaaggtatttgaaggacacatgagattatagtctgacctatgagaaaggaaaaagagaactggaattgaaagggttcgtggatgccaattatatgtcaaacaaagataccaaaagatcaaccatagcctacatgttcatgacaagccttaattgtatttgttggaaagcttagttacaatatgtagttgccctttccgcaaaagaagtagagtttatggctaccatggaaacgttcaaggaagcattatggcctcgagggatcttgcataaattgaaatagataaaaggaggagtaattgtgtactcagatagccaatcatttatctatctttgcaagaacctaatttatcatgaaaagagcaagcatatagacataagggctctattagatcagagaaaatatagaagaaggtctagttggattagagaatgtttgattataagataatccgtttgaagttggaacaaagttcctaacaattaacaagttctgacactgcctgaacttaatcaatgtcagaaattagcacactgagatacctggaacaccaaccatgatggttgcatactttcttcattaccatgacttttaatttaaaggaactaggtggaatttgtggtatagttcctctaaatgaaaaggtctcaagacgagtctttaagaaagttagtcctcgactgaaaaggagttttgaaagggtggcttgtccatccaaaaaaaatcttttagaaagctggtcgttgtctggaaaggagttccgaaaggctatagctagttcctccaataaggggtttcggatagtctgttccagtaggctttgtgcctacctgggatgttcttccagattgcgcttcatcagtttgggacatccgttggaagcgtgatacatgtctggagagagctcaatgccaagagctgagttagagttctcattgtaaggagcgagttaagttggttaagtcttaaacgaattaactacttagttgtttgaagccatcacctttggaattcatatcattgatctataaatacaaccatcctcttcatttgagataacacaagacgaaaaatactagaagcagagtacgcaagttctttgagagagagttttgatagagagagagagaggtacagagaaaagagatgattgggttttgagttttgtaaaggagaaatttatgtagacgaaggagcttctcagaaaagagtgttaaaaaaaaaacacattgagagaatctaaacagagaattgttctcaactgtattgtatatgcgttcttgctcaatcaataaatgatgtttcggtagtattctaaaactggagtagaaccataaattacatcgatctattacacttaaaccaatataatttttggtgttgattttataattttcttgcattgtttatttccaattttatgtgctctattatactctgatttcgccaattcttgaattgcattttgttattattgttattgctaattatttcttgattccatttaagttaattttaattatgcataatagttgaaatttcccacagttacatataaaaaaaaatatcacactttattatttaccacactttacattatttgtcacattaaattattctaaagtttttactgatatacaattagtttgaaaactagaggtggacataaaaatagtattatttaattatgtaagagttagcttcttttgattacatgtaaaaacaattgtaaattataatacgcttagtagttaatgaaaaaaaataaaaaagtacccaaaaaaaaaatcatgtctagttaaaatcccagaagaacaaatccaaaatatccaaagtgagaaaacttgaaaaagggtataaagagaatatgatcgatgaaaatctattattaaagagtcaatatcaaaatggtgaccagacactagacgttcttcatttgacaatgctagttttactaactctaacaatagtgtacctaagaacaaggcgaatccaccaaagatagtacctaattataatatatttgtttctatatattaattagtacacaaaatatatatatttttagttatattctcattaacttgttatttcaaaaaattaacttgttatcttttattattaaaagaaaaaacttctaatattacattcgaatcttcacaagcatttctagttttgaattttgattacaaattaattgcaagtgaaacttcattatccttaaataaacagtataattacacataaaaatcaaatcaatttgatgatatacatatattaatgtaataaagagatttcacttagaaacatgattgatcttcttcctcctcataccagaagaaccatcaatccccaaattataagtttggaaactaggagaagagtccttactatcgtcgacgacggccattaaagtcggcgaaggaaaacctctgttgttgtagctacgcgatctctgttccaagaaattcagagccggaggtggttgaaactctgatcgagtacggcggtgagatgagccttcaggcaaattatgaatagattcgtttgaaaggcggtggtagcttctgttggaggtgtcggaaaagcttctgtagctatttctgggcttatctttcttgagtgcgtgaagaaggtaaggaatcaaaccttccatggaagttttgcttgattataatttctttgattgtgtttgaataaatggaggaggacagaacagaaatgatgtaatgaaatatgaaagttgctatttatattagggtgagtagagggaatttcgttagtgggattaggtaggtaatggttggttaatgactaatttgaccctctaatggaaaagattatgttaatttagagtaagggtgtaatagtcattaagagaagatgagtgggaaatcataattgactcactaaatttttcagggtcccaactgggggcgttgattttgactgctctttcaatcttaatcagatggtaatggcggcttgacgcgtataaacattagaggataggattggaaaggaaaggaaaggaaaagggtaataaggagagagtctcaactcttaagcaaagggtaattaattatcataacccaaaaacaaaggatatgatttagttacaagaaatcttaatgattcagtgggttgacttttgcttcacctacaaattatttacttgtttgtaggataagatcaaaagagggaaaagagaattcaaaactggttttgaaaaagaagaattcagggctagttttttcttaaaatatgatttttgacattttggttttctggtccctactacaatttatactcgagtcattatttctagcaataatatggacaccagttgtttgtcatattaaattaatcacattgtaatttgtaaagacttatctgcttacttgatcattctatgttttgtcacgcactaattagttttatggtagactggtagtaataattaacgaattcaaaactggttttagttaagagccaagtgtccgggtctagtaggttatcaaaaaaaaaaaaaacatttttgagctcttatataaaaaacaataatattttttaaatttagtaaaaaaaaatatgtaattttacaagaaaataatttttttagttcttaaattaaatgagtcctaggcacaagcctttgcacttatatttgagtcaggcctacacgtgtattttgttcatgctaaaataaatttgtgtttaagcatttttggctaatatttatttttaagatttaaattaagagaaatttggcccctgcttagctaacattatttactaaaataattatatagtgaaaaagaattattttatattatagtggatgttccaaaatttatatttgtgcttccttccaattgcaacttgtttcaacctactccttggaatctattgttttcttttttacgcaagtcataaagtcaaagctagatatcaaagataacctaattaagcatgcaatatttaatgtgatgtgagagggagctatatattatgtcactacattaaatattaatttatatacccttgtcaaaatatatacgtatatatattattctataccctttttaaatatatatatacattatcatgatatcatatgtatttttattaaaaaaacaagagaaaagtgtaatgatttaaacttgtaatgaatgaccctaatgaagtggatgagttatgtgtgtgacaatagagatggaagaggaagatgaagactgggtggtggagaaagatatgataactgagtttggaaatctttgttatgggaagaatacgatcaaagagaagatgtaatgttaagttcatcaatatagtgtatggaagaatgtgaaagacaaaatctgatgcacaatgaaacaatgaagcatgttgagctgcctcaacgtttgaggtattttctttggaaattgttagaagcactatgcctaatggtattattaataattcaagtagttcaatcaagctggtagatttgttgagagggattgaaactatttaaacatgtagcaagatattaatgactactaagaatgtttagtaaaagtttgttacattttggtatctatataaagaccaactcaagtcatttcacgatagaatgaaagatgaaccaagtcttttgagttgttcaggtgtttaagagagttgagtctttctttgaggtggtgtttgattgaggtaatgaaatggagtgggatagaaatgaaacaatttttattttattcttttgcttgatttttttttaaagtgtcggaatatcatttcaataaaataattttttattattttagtagaatgactattctattttaaaatagaagaaaagttgtagtctcagttaaagttagttaaaactaacttttaactcttctcaggctatagttcgacttggtcttagccagttaaacgaagttagttatgacagtgtcattccaacaatcttggagtaaagtctataaatatagtactgttgatctcattgatcactaattctaattttcttctctaaagtaattgtatagactaataccagagaactcgattctcattgtgagttcctagtgtcatcatgttggtgttctccaagaattcgattaataaagattcaaatcaaaggttgttcattcagagagtagccaattgccagtaattaatccaacgttttggtgtggcttattttttttttgtctcaatgttttatgcttctttggttagttttgatcttggcattgcattaattcattcacgttcttgtgtttttgaggtgacttataaacaccacacaaaagaccaatttattgtaagataagaaaaaattaaataatttttttccatttcacttatatttattcctaagtttttaagaccatgtaacatttgaatttcaattctcaatttcatctgcggaattcagtcaagtgtttttctcatttaagcattaaggtgtcgtttaaaaacttgataaaaaaattattaaatttttttttggtggaaagagcattgcattagaaatgaatgaaatgaaaattgtttcctaattctcaagaaatcatattagttgcaagaattgaaaaatatattatttgtagaatttagttttagaatttcgttgggaggactagacactgagatacaagtctagaagcattattaatatattatttgaatacactactttcttctctctatcaatatgggacaaagttttctcatctatactgagtgaacaatagattaaacaatagagaaaatcaagttattagttaaggagaaaatagagtgtggccacacatgcatttccacacctgtggatagtaatagtactcctcttccaaacccattctccttattgacacttcaacaggcatgcacggttcgcattcattacattttgccttacataatttaatcacagatgaccctcttctccccttcccatgactcatttcttttggcatcatgttgttggcctacatgaaaattacaacataaaaattcttcaaccaaaatgaaaaattgagttactctttaggatttagaaaactcactggtgaaggtgatggagaattcgataggtggtatgtgcaaacttggcaagcatgaatgagtaaggtgagaaccaagattagtttccaaggccttgttttttcttggtgcatttttctacattaagagaaaacacaactcaatgtggtgattataccttaataaatacatttgattttttcctcacaaagccaagtaacatccaatttatatctgtgagtgttagtttttgaacttgctcaataacttttcagtgagttctattgaactagtcttggactcttatgcctagttgaagagtagttgaaacttttacataagattttgaaatggtcaagatgctttccacgtgtaaaccagtactgtcatgcatctgagtgtgacagactaatattgctgacatgttaagagtcactagtttaaactcaattaccccatggtctgcataataatataatttttactataaataacaaataccaacatggtacataaatacacaacatataaaagcatctattcatacttttaactcactatctagctagaaaatgttgatgagttcatgaagataaaatgttactctcagttggtaattctatctcagaagctaatctcacattaagatggtgcttaacttggcgttcacttggggagccaacaataagagtgtgttgtccaatgatcaagtttctctcccctttactatccacaaggttaagtactttgcacacatcaactttcacagtcacagactcattctttcctttcataacaaatactctttcaaaggccaccaactgcacatttggtgctccactcaagtccaccgagcttgccggcttccaaaacacaagcacaacatgagaaccatcttttggtcccctgttcattatgccaacaacaaggtcaaatgtagagttctggcaattcaaggttgaaacatcaatagcttgcccgttaagggtttcatgattcagttgagcacatgagttggaagctagacaaagaatgttgttttgattggaagtggattttggtttgattagtacagtggaaggtgcctttataatgtacttggcaaatgttgaatagcttaggccatgaccaaactcataaattgtttttccattgtagaatctgtaagttctaccagggaagttattactggtgttggctctcatgttcatgtctgtcattgatactttatctgcatattcttgagggtaccatgtaaaaggactccttccacctaacaatgtaaacaaagtactcttaattttaacaaataacatgactagtagaatcaatgttattgtaaacaagacataagaatacctgggttgtggtctccaaatatgacttgagctatagcatctcctccagcttgaccaggataacctacccatataatccccccaactttactcaaattcttggcaaatgaaacatcaattggaccagctgacataacaaccagaataactgttccattagtcgaattcgccacttgcttaacaagcatctcttgaaacccgggcaatgtcaggttctctctatctagtccctctgcttcaatggattgatcaagtcccaccaccacaaccgaagcatcggttgcagctgccgccttggctgctgcctcaatgaggctttcattgctacatttgacattaacacaccctggctcatatctcaaatctttaacatatttctttagcccttccaaggggctagtgtaaccacaaggtatgccagcatagttgcttatcataacagttgtggcatttgcattgggccctataacagccaagctctttgtaccctttcgagacaaaggtagaacaccattgttatccaacaacactattccctgctttgcagcatcaagtgccaaagccttgtggtcatcagtacatacatcagaaggcccaagttttccaaatggcagaaatttgggattcccatcaaaaaatccaagtctcataaggactatgtagttgtaaaccaaagcttgatctactacagattcttccactttacttagattaacagcattggctgtgtattttcctagataatctccacagttcatgtttaaacctgcatgattaagtactatttcatcacatttgaagctcaaaagtgtaatcattaacttggtcactaaatttttagagtacccaattggtcagaaattaatctcagtacctgctttcaaggcaagagcaacagcatcctcaggtgttgaagtgtagtgtatggcattgtaatacacttctactgagtcacaatctgaaacaatatatctgctcaaaagaaagaaataaaagccaaaattaaagatgtgataataaaagagattgcttaattgaattatgtttctctcttcttttaaaattatagtttactgcaacttgagaaaagtgtaataatggtgcttttcaaatcatgaagcttaatataagaagtgtgaggtttaaggaagagagatttattaaattacccatctaggccccactggcctctaatcactcctttgagcaagtctggatcagcacaggtgggaatcccattaaccctgttatatgaacacattacactactcacatgaccttcctccacacaacttttgaatggtggctgatatgtatcctccaaatcctgttttgtcacctgcatcaatattaaaccccaatatagctacattattaaagaaattcttcaaaaaataaaaataaaatgtaagcatagtagttaaattctatgctaatagtagaaagaatcttattgtatgaagtatggttccactttaaaattaattggttattggtagaatttgggatgaaagaggttaagatgaatgggattctatcttaaaattaattggaggagtagtccatgaattttatacatgttctaatctttccacatattagcaatgtgagactctctaacatttcctctcaagatagtggctattttttttgctcaccaatcttgcacgattcgatcacaagcagttctttttggcttaaagtggtttttttagctcactatccccgaatcacaagcggctctttttagtttgttttttttttggactagttattgtatttggatcggttactagttttagtttagatttgataccatgttaaaatttgagatgaaagaagttaagatgaataaaattctatctcaaaactaattagcaattagaaaaatagtctatgaattttatatatgttctaatctttctacacatttttttttatacttccaactaata

SEQ ID NO: 17716 - DNA, 3106 bp, Cannabis sativa
agtaaaaatgtaataaataacgtttaacagtaaaaatgaaataaaagtagaaaagacagtaccaagcgtaaatttccctttttatatcattaagatacatgctatttttctattacttttttatgtagattttttgttagttttgtgttatttttatagaacaccatacgtaaaaatgtgtaaaaaaaaatctttgaacataaacgtgttaaatttttacaaaaaaatagttcattatgtaattattctttttatatttggaagttacattttatataagtggcatttcgtaatattttttaatcaattttatatttttaattaaaaaagtgaaaatattttttaaaaatatattttataaatttgtttttacttttcaattttttagttaaacaaaaaaaaaaaattactttcaaatttttttaaaatatttttttccttattcaatattttagactccgatcatacctgaacttggtcgccggcccaggactaagaccccgaacacggatcctgaacttagacttggacccagaccccggccccaaataaccccaaacataatggatctcgaacttggacttggacttggatccccagaccaccccaaacatgcaccttggcccttggacttggattcaaacctgaacctgacctccgaccccggacctggaccaagacttgaacccagaccccgactccggactaatcattactaagattattcaaaagattcctacggtcatgaaccaacaaactaaattttgaaagcatatgaaaattactcgcaatagcttagacacaaactaagttgtccgtttccggtagaacccgatcccattagtgtctatctgtcaaactcaatgtctttttgataccaatgattttagcaatttttggcttaaaataaacctctcttctccacagtgaaagcttccaagacttagccaccaatattattacgtgctaagaaactcattctaaaccgactaaccaatctaaataaagctcaattaatatttacttggatctaagaaataccaagtaaagtccaatgcacacgaacacttacaccaaccataggtgaagacaagaaacttttgccaaataacatcattctgcatgtcatattattcacactactatcattgcttcttccaaagatccattaccaaatagttcctacaagccacctattgtgattcccaattacctcatttaattcaacttttgattctttcaaaaaaagaaaaaacaattattatatgtatgaatctatttttataatcatacatcgacagcatattttatcagtataatatattactatttatattgacttgtttatgaaagtaaatttgtgtccttctctgtgtatatcctatatacctccatcacattaagcagcctcaagaagtcaattgtctcatccttattaaatatatataaatattttgttaaattaaactataatatatatcatatactcacgttcgtaaaacttaaaatactttttataattccaataatatttgaccaaacaatgaattaaaccacttaactataaatatcattaacccacaaacactaccaccatagagttctagattcatttcaagagaaaacatataccaaaacacatactattattacatacctctatatacattgatcatattatttatatatatatatatcttccttagatctttaattagaatggctgagaacaaggatcaagaattggccaaagctaatggatacagccaaattgatcaagaattgggggatttatcatcagctgaagagctcaaaaagaagaaaatgaccaaaatagccaaatatattgtggctgcttttctaatttgtgtggttattgttattatggtcttggcactaactatcatgaaagttaagtctccacaagtgatgatattagagaatgctcatatccaaacattgaccactactaattcttcttttgataagagcttctcaacccaaattaggatcaaaaacactaattttgggccctacaagtttgttagaatttgtgaataaggtgaatgaggttccatcccaaaaccaattggctatgggaggagtagcccattcctcttatatattctattatctttccacacattagcaatgtgggactctctaacaaagttcgaatccaccaccctcaatctcatctacgacggagccacactagggcaagttgtcattcctaagggtaaagttggaaagatgtccaccaaaactattaatgatgtaattgttaggttgagttcggcccaattaccaaaaaacactactgggagtttgttgagtctgaatagctcggttaggatgagtgggaaagtgaagatttcgaccatgaaaaggaagaaatcgattattattaattgtggtattactattgatgtcgctcttaagaatgttcggagtttgcaatgttggagtaagaggccgaggagaaagccaatggcgcctaaacccaagaaaacaacacaaaagaagcctaagcaaataaagaaaacaacaaaaagagtttgaacaatgtattgagtattcattcatgtttagagtgttatcctctcattttatttgttttgtaaactgatgaataatagtattttcttttcttcatactttctacaaggcattaatttatatgaacaattcatagcaaaacagggaaagaaaaatcatgaatcaatgcaaaagatttctaatattccagtttatcacatatattcaaaaaatttcaaatttaattttagtattgaactattcaaacttttttgctaaattttattaatagtattttaatcaaaagtattattattttttcattatttattaaattaatttatatttaataaatttaaattataattataattaaaataatgaaacattaactaaaatatgtagcacggttgaagcaaaaataagaaaaatagctctttattttaattttttagctatttaaattaaaaattgactaaaaaataaaaaatagagtgatttgagaacaaaatagtatacatatacctatatgatatctagaagtcaatcttcttattatgccatatac

SEQ ID NO: 17717 - DNA, 3981 bp, Cannabis sativa
cattactttaatattatatgatataaatatatatttattgcatggttgcatgcatatcataataggatgaagataatataaatattaatatttttattacgcgcataattaaattttttattttaattttattttatattttattatggtatttttcaaaaccttttacaaataggtgcatacaaacttacactattttatcattaaagaattaacaaaagtacaagataaaaatacattaaaagattgtattttccataaataaaaatcataaaaattgtaaaaatatttaaaatttcataaaactatatatttttgttttgtatatttgtgaactaatccctacagtacaaaagggtatagagtgtaattttttaattttgggccaagagcccaaacccaagttcaggcccaaacccaagtttaggcccactttctttttacataaaactccaaccaaacctcttattaactgttcagtcctagctccgccgccgttatcggctccaccgccggactgtatcttcacctatcgaaaattctcaaatcaaagccataacaaggccttgtttggatgacccaaatattcttttcttactaaattgagttaatggctttcaaactctttacttgagctgttttttcacgtaaagaagaatgtggagaaccgccggtaatcgacgactctggcttggtctcagacagtattcaaggattcgtccaccgccgccggctggggctcagcccattatccgagtgtccaataacgtagcccgattgggtggcccaaaagaaggcccaaaaccatgtcaagttctgtctttgcctccgttccccggactccctttgccggggaaaaactcggttaccgttccgggaagatctcaacatgtcaccgccattagctgggttaagtactactttgatgaactacttgataatgctgttcaatcccatttcaacaagggtcttgtgagtttcatatctttaacccataaatttatcatttttattgtgaagatcttatttttatttggaatttttaatgacaatgtttgttatagtgacaatataaacctgttaattttcaagtttattcaattgacaataaagtttctgatattctaatttacttcaaaccagctttcggcaccacaatctattcagaatctgtaagatattggaactataacgaaacacttatggaaaaaaaaaatagaacaaaagtattttgatgtgttttctgagtttttaaactcagatgagaagtaggttgtaattagaactcctccttgaatgtaattatgccttatttttttataaatttattgggtttaggttcaggtaaagtgctcaaactttagtgactccatgagtgataaagatggagaagctaacacaatgaagaaggtagagaagttaatcacattggttttagtttattttattatgaaatcttttggtgtgatggattcctatttgggtttaattaatctacaatactacagatatgaataaactacagataaagcccaatgatgttatggaagaagggaccagagtttatgtacctgtgtcagttgcagagagtaggatttccagaagatttgatactattccaagtggaacactttacccaaatgctgatgagatagcttacttgcaaaggcttgttcactacaaggcatgtcttattagttgaattcctatttaaatatttctaaaacttatttgcattttaagtgattatggtgtttttgttttcttggggaatttaaggattctgctatacttgttctgaacaagccaccaagaatgcctgtcaaggtaaggaactatatacagatatgaaattatattcttagcagcatttgaatgttttgactctcttgggttctttctagggacacttaccaattcataacagcatggatgcattggcagcagtagcactatcttatgattacaatgaaggccctaagttggtaagtgtttggttagaacaatcattttgatagtttgatggattttgtctaggtcaatttcggagagaccatgcgtctcaaaagcttgggagtttgttatcttcagcaagttcaataagaatttcagaaatcataattttggtctttcattgtatctttgcttgttgtacaattaaattatttgtcattctcttaagaatcacttggttctcatagagattttgttttattaggttcatcgtcttgatagagagagcagtggccttatattgatgggaagaacaaaggaaagcataaaccatctagagtggttattcagtgatgccaaaatgaaatcgtcgtgtaaggtattcgacaattgagacaaaggccggtgaatttttaaaactaagatctgcactgattaattgctcttaaatttatggctgatatgcttaatgggtaatgttaggcttggaatgaagcatgtgatgctacatatcagaagtactgggcattggttataggttctcccaaggaaaaggaaggctttatttgtgctcctctttctaaggttccttagctttcttaacattactctttcgatatatgtaatttagattctgtttggctgggcttctgcttctgattttaggtgagtgtttttggagctttagaagcccgaaaacagcttttaaaagcctagccaactggggcctataattctgattggaaaatatgtgatttgtttgtttgattactcaatgcaggtgcttcttaacgatggaaagacagaaagggtcatcatagctcatcaatcaggttttgagtcttctcaagaagcgataactgaatatcgtgtgctcggtccaacgataaatggatgctcatggcttgagttgcgtcctcttactagtcggaagcatcaggtacagagtttgttctataaactgttgaatttaaatttatgttttgcatgagtaaccgagttgcaaaacaaacggtaaccaattttttcttttctttctgaagcttcgtgtccattgtgccgaagctcttggcaccccgattgtgggtgactataaatatggatggtttgtgcaccaaagatggaaacaaatgcctcgtgttgatattgagccaacaacaggtaagccttacaagttgcgcagaccagaaggtctcgatgttcaaaagggaagtgttctatcaaaggtccctttgttgcatctgcattgcagagagcttgtgctccccaacattgctaagtttctcgtagttttcgatagaaaatcagaaaaccgagaccctgcagttagctcgaagcctgatcttctgcggtttgtggcacctatgccttcccacatgaaaatcagttggaatcttatgtcatcctatttagtttaaaagatttggcatatgaattgaatcattcatacatgaaagaataggtagagttattattgtacaattatgatacaaaaacacttaacggaaaatgtgatcaactgatttgatttctgttaccccaatatacataagaagccttctgtaagcctaattctaagagccatcgaccgttttttccggctcaatgatgaacaaccaccctagtttctatgtcactgatcttgaaaatttcagaaacattcaacattgcttgctgaacaatcatttgatataaaaagacatttaatttgatgttaaacctgttctgttggcattggttgggaactaagaagcctttctgcctcatcatttgcttcagcttgtaacttccatctctgtaaagattaaaagggaatggctttaataataaacaaacactaaaattggagtatcttaagggtgaatttaataacattatgtttcaacttataaggacatgcctcttcaagattttccaactccattatctgttgtatttgttcagcaatactctcctgcaagtgaaaatcagagtgttcagaatttactatttcaaggttggaagaaatgtagacgaaccacttcatgc

SEQ ID NO: 17718 - DNA, 11347 bp, Cannabis sativa
  modified_base (5530)..(5534): a, c, t, g, unknown or other
  modified_base (8866)..(8866): a, c, t, g, unknown or other
atttcttgtagtggaatatgactccactgaatctcagactcacctacacaaattacccgtattggcgatcccaggtgctcccatctgttcacacacatgatcttgagggattctcactggagagcgtgttcgaccactgccaacaattcaagatccaactgatcgcacacaacaaattccaaatcatgagtttcaccactggcttcgtctagatttctaatgagctggttttccaattctatcttcgaaaacatgcttttggcatgtcgcacgatatatcagctcctctgctttgataccagttgagaaatatctgaatgaatattctaagttttattattaaagagaggtctttgtatatacatcagtactggctaacgaaactcttaggcaaaataacaaattctgttatttactagcagcctaactaaactcttaagaaactaacagataaaaaagaagaaaaactaatttgctgtcttagttttactaacatatttaactattgatattttataattgaaaccatatcattattaattgtgtggttgagattagatttacatatatagtgtgtaattagagtgcatgtatcattattcatacatacatacatgcatattgattcttattatttgaatgtgacttcatgcacacatgcctgcataagaatttgcagttgaaactgttttgaattatgtgaagagttgcattaatatgtgggctggttggaaattttaagatgtggaattgcacaaacactaaactatgtttctctttgaatagtttatgatattactatcaattctcgctgtaattcttgatctttcctgattattacttttggttataaaaaaaaaagattccgtacttgtctttatgagtactagattttcagtcatcttttaatttgtaaggttaattattattttttttttaattttacggtttttaaggtaagaattggcaaaaatgtagtttttattttttcaaaaaaaattattttgtgagaattattttaaagaaaaaaaagtacgagaaaaattaacaatagaatgtaattggttatctttgactttcacataatttttaatattttatataattttctctataattaattaaaagattgatttatcaattaataatgtttgatcaacttaattaattgaaattcttttatttaattggaaggatttatatgtttcatcaaatacctttaagtaaatagctatttagcttttatgattttttttttgtttggaagggagcttttttgattaaaggctaatccaccatacataatacaaacaatataaagataatgacaaactttaatcatttgtttatttttagaaaaaaaaaatcatttgtttgatatatatatacgtgattgcttaacgcttaatatatttattcagttaactataatgatggttcaacatatatattttatcacatacgttgacagttaataatataattaatatttgtgacatttatttttgcttaactgaaatttgtaattcaagggaaccgatattatgaccatgtctagcctttacttttaaaattaatacatgtatgttaacacaaattaaatgatcaaagataatgttctaattacttcttatgatcttatccatatatccaaaaccacaaacgtcttaaacaatcataacaaatttagtcctttctagtctaatccttccccttttaaagctgagaaaataacatttccccttcttttcttaattattagttaaggatatttgtgtttttttttttttttgctagaaattaagaataatattattgttacatctattatttattgtaaggccataaaggtcaacttagtttttcctaaagcttctctctaaaataaattttaacttggcaccagccgtagtactagctagtatatagactctttataaatacataatctgaacttgttcttttaacaccctcccaacttttttttttttttttgacttgcaactttttctcaatcgaatctaactagacgtactatctagaatcacaagtgtcattctcacaatttatgttcgaaaatattatacagagagagtccaataaccagtctcttcatcacaaaatcctcacagatctccaaaactaactcaactcatcacaacagagtcatgtacatatagaataattcacctttgccaagtgtaccacatgaacacaatcttcaactatacttctctacccaatccaaaagtaaagagccaatccaataatattctaacccaacaaaataaaaacatatagcttccatttattaattaagttaggttaagcacgtaaatattactgcattaaaataaaaattaaaaaacaaaaagaacacaatatacaagatcatagaaaatatataatacacagatcagttttccatttctcttcagaaaaatcttgatcaaaatacaaaagatcaaaactaagctctaattaaaaaaaaaaaaaaaactaatgataccatagtttagtaatgatcttccaacattaagaagatcatcacatcacattcacatctgaagacatcttattaatttaaaaaacaatagtaattataatccaaatgaagattaatatagtacaacgattaaaataacaaacactactaaatagatatatttatatatatcataataagagtcataatgatcatgcatgtatatatacggctggtgcatccatatatatatacacttctgaaaatcaccaaaatattttgcattgtcagaaacttcattcgtcatggtataatatgtatgagatctctaatcccttcttcttctcttcttcttcatcttctacatcaagagatcgttgacccacccgagatccggatccgaacccgacccggcattgttaacctcgtttagcttattaagcttattattatgattctcattaacaatatcattgtacctcttgctagaccaatggctgaaattctcagacccagatgggtaactcggagtagagggagaaagaacaaattgttgttggtcttcggcgccggagttgaacggcaagacgtccacccaaggatgattacggtcgccggtggtggcgaccgacatgggagaaattggtgaagctgcttcgttgaaattcatcgactctatggaactcatcagatcggtgagggcttccttgtaactaacagctccttgaccggaatagtgaccgttcgctgcggcagcggcggcggcggcgtaatgttctttgtaggctgaaatgggagaaaatttctccggcgacatgggcggtgagaaatgggaaatgcccatgagagtagaggtgggagaagagttgttatggcaggaacagaaagcgcagcagtggttggaattaggcgagttattattattgagggatattgggtatttgatttttttcttggaagtaaccggagaagccatttccgatgaagacccattagaatgaagaggcaagatccgaagctgacgaggagtatgggcaaagaaacaaacctttctcttacaattcttcccatctttacaagcctcagttctgtacctcgccggatgaagccaacactcgaacacgccgtgagcgaactcacagctatctcctctaccgcatccgccgcgtcggtaatccggacaaaccatgccggagtagtggtggcggcgcgggtctctccggcgagccttctctcccggatgagcaaaagggcagtcagtccagtcgtggctccgactccgggtacacctccggactttaaactcgtacatccgaaagtgatcggaagaataagggtcagatcctccggcatcgtcgtcggattctccttcgccggggttgttgtagggaaggaacttctgaaagagagcgctggtggtggtgtcgtcgtggcctggggagatcaacctcggtgacccatttgaaaacatgtcggctgcggcagcgagctcgtggtggcgtcggccgacgagctttctgggcggaatgttgatatctcaaaggagaaggtggtggagcttttgctgatcagaacaaactccggtggtcattatatacttatttaattattagctaggtgagatcagatgatgatgatatatatagtagtactgtatatatttattgagagagaatgagagtgagtgagtgagtgagtgaggcggtgttgaatataatgttgatgaggtggggaacaaagaagaaagaatagggttttatatataggagaacaaatagatatacaaaaattaaaaatgatgacaaggatggagaataggtatgggcaaataggtgcgtggctgcatagtattagggatcagcatgcaactttggctatgtggcaacttcacaatcccatcccaccttctcatctcttgtctccttccttattatcaaactcttttctatttttaatttttatttattatattattatgagtttgagtaatgtggaggtcacaaagtgtattgagtgatattatttatggttatggatagcttagctatagacacaaaaatagagttggggtacttttggggattatatattatatatatgtatttattattattacaattatgtgtatatatacatcttctacatttatgtagatcttgtacttgaacctaatagaacttatagaagttagtttctttgttttattattagacaccctaaccctaggaggtggaaggaccaattacatgtaatttattgttttgatcaccaagtagctagatagtagttattatgataaatttttcttttatcttctgtaaaaatatacatttgtgattttatccaaatcatcatcatcatcatcatgtattgtaattttgaaagtcgtaccattaaatttgaattggtactatatttgtctttagtggggtgatattattagaaaatgcttacctattattattattatttttttaaattctggagtgtatgcaaaataataataatagtgataataataataattttggagggagtttgtttcgagtttcgaccgtatgaaattagtatatatcgataatggtcttcgtgaattgattgatatacatgaaaaattgcatcattaatgttaatacgtaacttttctttgtgttgtgttgtttggccccttcgtgcatgtaacaaatactcataacataccatctcggtggtattatatatataatatacttattttataaatcacaccaaatatttttccaattattaaaattttataataaaattataatttaatagttactaaatgtaatatgaacacctatttaaaaaatatatataatataaacaccacaaattattcacacataaataatataaaacaacacacacaagtattttgcggtagtgttacatttataatcaagaatttatgtataagattaattctcataattttgaattataataaatagtgtcccattataatgttgattataaataatatcaaatataagtaaatagttaattattattattattatnnnnnttattattattattattatccacttttttttttgaaagaatgattatccactttaaattaagtaaataaataaataacattttaacattattatatatccaccggttcaccctaaaaatatggagcttttttatctaaatattagtttatttaggcaacaaatttgttaactaccaactacttcaataatttaaaattaagcaaatatggatcaaagcaataataattataataaataaataaaaataataatgaaaattctttataggtggcttggtgaaacctaaaaaagtacatcttaagagaaattgtgttggcacaaatctaataaaggtatgagtttatgagacttacctctttttaattaagctcttttggttaagcaagcagcgagattgtattatgtttctcattttctagtggctagagttatgaagactatttacaatcctagctcctagtttttcatgacgggcgagtcaaagattcttttttatttagaggtttattttatgggattaggagatttttgaaacttatagtttttggcttattagcaatggagctaatgtttctatttatcatgaccgatggaattctagtttagatggtaaaagtcttactctcctcgttttctacctgatgatgctactgtgaatgagctgttgctatccctttctatgtgcatgaggctagggctatacttgccatagctcaggatcatatttcacattttgataatctggtgtggcattttaagagatcaagtctttactcagtcaagagagggtactgggatactatacgtattcttggcattggggaaggttctagttccaatggtgaatttgaattatggaataaggtttggcgattgcatctccatgcgaaggtcaaacttttactttggaaggcctctcataattagttgcctactaatgataatataagtcactgtggtgtccctgctactactaccttccctttttgtttgattggtatcgagacatccttgcatgccctttgggattgtaataagctttcttctatccgtgaggttattaccctccatcttcaggcacctatttttctttgttgggaaatctatgagttctttcatgcttgtctagatgttatgtctattgccttgtttgaaaagttcatagtctatctttgaagaatttggtatcggtttaataaatgaatgaatgaaaaattttgtgtgaaggatgattgaccttttgtttgattgaagtatgtattatctacaacgatactcttatgccaatagttgtattcctagtcttgataatcttttagagaatcagtagtcaattgtcagatggtcttaaccacccgctaaggtggtgcaaatcgaattcgtgatccagggttgaatctagagttgggtaaatctgggactggggtggtgtttcgtgataatactggtttcgtcctagcttatagtacttggacttggaatggttatttttctcctggcgttgctggggctttgggtatctactctggggtcttgcttgcttgtcgtcttggctattagagagtggtgttggagtctgattgccttaatgttattaatgtcatttttcatagtaaggttgattagtcttatttaggttgtcttatcatagatatccttgcttattgtaatcattttattgatatttcttttatatatgtattgtcttaggattattaatagtgtaatatctcaataagcctagcagtaaataattaggagttatatttatattatcgattaatcaggtaataagttggattatgatcctactaatctattttagcataaattttaaatctgctataagtgggtaaataagcgtaatttattaattacgaaatttatatagcatgtgtgaatataatatgagatatatgttgaataaaaatgtaacaccctaacaattaggcacgtcacgacaactatatatgaaaccctaatcccctaatccgggattactagaaaaatacgcccgggaaattttaaactttatttgaaacagaatgaaaattaaacttgtaataaccttaaactttataaaccaaaagatacatgtttcgggatcccgcaaatattttcacaaaaatattacaagttcatttgacgagccgacctaagcggaaaaactagaattacaaaatacatcactagtagaccccaacccgcttggtctagtgtggctcaaacatgtacaagcatcaccaacccaggaaactgcaattctagccacacgaaaatcaatccaaatcacacctaattcaccccaatcatgcacatacttcaaaaccataatccatagttaaataggtattaaaacaaaccattaggacacataaattaagctcaaactcaacaatcatgcatcaaaaatcaacaactcaacatgagcaacaacatcaaagttaagaactcaaatctaacaaaataccactccacaaacttgagcatcactatcaaagttccacagcaaggaaatatcaattataatctccaaattctcacattcaaaactcaacctaagttcctaaacatccaaaacttagctagagttaacaacaacaagggaatcaaactagaatatcatcatttcataccaattctcatccatgcattttcaagaacataaacacataaaagcatgcttttcaatcctcacaccagcaacaaattcaaaaagtaaaaaggataagaactacctcaagctctctacacaaataagcaccaaaactcaccaaaaatccaagcctccaagacaattcctccaacacttagcaattgaagagacgaagtaaaagagagagaggaggttggtttatggctgaggaaaagtccaaaaaaaaaaaataatccttttttcttcaaaattttcttttattgaatatacattaaatggttgaaaagaccaaaatgccctaaggccatatataccacacatacatacactcaagggcaataatatcatttttatcacataccacattcaattaaatttagattattcatatatcaataacattctaatataaaattctaaaaatatatttcggccccgaacccagttcggcccaaatactcaattgtgactataccgcgccaacttgtcagtaaacacctcaaataggacaaaacaagtatacaatatatataataatatagtccataagcacacaattacattaaatttacagttttacccttctcgtgtcaaaattacaaaaaaaatgtccctggctcaccaacggggtcttaacatgtcctttatcaaattaattcacatataataaattanataataatataattccataataaatacacattacctagttagggttcgctaatctattttcttaatcttaggatattacaaaaaatatttttaggtttggcgacattggagactcgatcgagggccagaaatatcataacagatttaattaataggtttgacaggaatgttatgataagttaataatgtaggtattgggataattaggagtatgtgaaatttgacttagcgccctaaaaatataaatttttgagtggctaagaaatgataagataatcataaaaaataaagtttttattaacattattattaaagtttttataataaaacttataaaatcaataagttatatatatgatttaagtttgtaaactaaattgaacgaaatcttcttccttcttcgacaaaaatcttttttccttttttttttttaatttttaacccgaaacctagcgatttaagcttcggcaatagcgggatagcaaatatttggaggaggaaagcttaaggtatggtttaattttattttaagctaaaaatgattagttttatataggagtttcgtgaattagaatagttatggagattctgaccttatagaattgttctcgggtagtcatgggactagttccgatattttcttgtggaatctaaggtgattttgagttagaaattgagtttgaaacttttaaaagcttaattctgaacattaatggtgttttccatttaagggcttgattttaatttctgttacataaggattgttgtatttatagtatatatgtgccctgtgaagtttggaatgatttggataggttttggggaagttttggttagtgcaaaatttgggatttgcatgccaaaaaatggtcggctgttttggtaaaaacggcttaccgtttctttaaattccaaggagaccaaaaattatatttttatcataactttttacacgggtgtccattttggacgttcgatatactatttcgaagcttccgacgagctttacaatatggtgtatgttttagagatagaatataagttttattttagtgtatttgtactacggggtttggtagaaaaccctaggttgtcctttgcaactgttaagtagtgttttgggataaacacttattggtttatcattgttatgacatagggctcgagatcatcgatctttctccaggcaggttggccaacatacctgaaccagaatttgaggtaagaaaagtataatgtaccacatggcatgataggttttgtaattatcgattgcctgattaggcaatgacgatgtgatgacaccatgaatgtgaaatacgggctcacctgattaggtgatgtgatatacctggcgacgtaccgggcataggtacgggtggcagtgatatgagaatgctagttatggcacagattaaaattgttgttggattttttcctggcaatgtacagggcataggtacgcgcgttagtgacatgtgagtaccgggcataggtacgagctcgtctgattaggtgatgcgatatattggtaccaagttatggcacgagcttacctgattaggtggtttagtgatattatatatgatgctgcattatgacacaaacttacctgattaggcaatgcaaatatgtaagtatacctatttctatgcatatgactagtttattgactattatagtttaatcattttataataatgaaatgtataattagttatttaatgtatccttctttattatttttcttactgagtttattgactggtttattggagttattttgctttcttttttttttttaataaaaaatatattttacataacattgtgagtttcaaaaagaaaaaacttaacattgtaattttttcctaacattatttctctttttctaagagtaaaaggtaaatataataatataatattagttgactaaaaaattatttgtttctaaaaatattaaaagtaatatcaaattatatttttgtttgaccaataaaatgttattttacattgaccaactaataatattatttttagattaaaattttattatttaatttttaaaaacagtattttcttctttcctatttttttacaatgtgccgcaaaattatttttcctacaaaattatttcaaataaaaatatatcacattcattttattaaaattttagataaagttattttatttttttttttagaaattaatgtatttttagatagaaatttttacaccaaaaatctataaaatgataaatttattacataaatacctatacacggttaaaccaagttttttacttatcttctatattttattactattttaccacatgcacacacaattcaatcaaataaaaataaatatatatatatacatgttttttatttttcttagagttgttttcatgtatgcctatgtaatttgcatattgtagtggagtttatgcagttgttttttgttgttatttagttgttt

SEQ ID NO: 17719 - DNA, 7690 bp, Cannabis sativa
  modified_base (699)..(705): a, c, t, g, unknown or other
ataaaatattcatttatcagaatcaataatattattttatttccttaattagaaatattctaatatttattggataatatattataatatatgaaatgtaattataaaataaatgaatacattaattataaaagtataattaataaatatctaaaaattcattattcatatggagatggtatatcttgtaaggtcgtacaagagaattaagattatacaatatgaataaaacaagtcattagtatattaaagtaaagggatctttaatatagaactactaagtactgtttactatacactatactctattgtgtgattttgattcggatcatatgtggatagacatgttgtaaacgtgttatgtataatttgattatatatgactggaccgatatgtaataatatctttcattaacatttcatttaccatgaacgaattattcatgtcacaatgatgatcattggtagatatgtctgaatcctgagtattcatgaactcatgtttgtgtttattgggttctttgattcacttgttaaagtttctcagagaagatgattcttacaacttttgttttgggaatccaataacatgagtggctgtgaacatgatatactataatagaatctaagctttcataaatgattgaatattagttcccttatagtgttaattctggaagtgctaacagttggatccannnnnnnaataagttatagattaactgttcaaattgaactaatagtacataaagaattcaagaaataattacaagggttaaataatatttttgaccaactctaattatgaattaataattagagaacaagctacttgtaatgattatatcaatggactactagtaataattctataaatataattttatattgtcaaagagtgcaattttatatttatagtggagtaataatgaatttaataaacctaattattttattgatgagactcaatatcaatcaagtatttattggagctttaaaatataagttcacggtccccagattacctctatacaacactatacaaatgaagatataatttgtaagatgaattgagaaagaattaatttctaagagaaataatttttgagggaaaaataataattttatataaattattattttgtattaagtaaaaaccctaatttgtcttattagacatatatttattattgatgattgtttttattaaatgagtatgatttcttgattatggattaatgtatgataatttggttttaagtatatgagcatatttgaagatgtttgtgtgttgatatttactgtttaagcttttgcttttcttgttgagtatttatgactcgcgtgtactttgtggtgcaaataagaaaaggactgaactaagtcagccaagagttagaggtcttccttgaaaaatgtacatatcatcttatccgacgagcaatgctgagtagttagggttttgatttatgaccactttaataagtataagttctatgttgtgaaatcgtaatgtatcttttgtgaaaaaaaaaaaaaacatagaaaggggatcactaaccctagatatttgtattgtcaacgttcattttatattttaaataattataaagttttaattaaatcacaattttcgttaaaccattaatttattattataaattattttataaaaacacacacgtagcatccctacaggttagggtgttacataggacctcttcattatttttcaggggttgaaataaagagaacatcgtctagtatctatatttctaaattaaaatatattgctggcatgctcactaagctacatttagatggtgtaaaactaggaatgtcaatcgggccgggccgggtccgacccgccacaaactcggcccagcctgacaccactttggcccgacccgatccgcccgactctttcttttggcctagtgggtcaggctcggctcgagataatcaggtcgggttaggtattttttttaaaaaaatcagtttatttatttaaaaaaaaaaattccactattttatatttaatattaaattatagactgtaatatacaatttaataacagtaaattaataacaataataataacaagaatacaacaacaatatagtaattaaccacctaaaatattacataacccaggttggtattcaacaaaattcatccatacacatctcacattctctgtacatatatttgtatgtatagaaactttaattaacactacttcctctcaacaaaatcataactaatataaaacactcaagtgtgtgtatttacacatacacatacaaaccacatattgatgatcatcaataacatcgtcaccgtcatcatatatatatatatataatgatgaagaacaataattttaataaatttttttatttggtgtttattattgtaattttggcagtgtcaatgacaatgatgatttgcagcgttatggcagagagggtggtttaatagacagtaaagaaattgggaatggtttatttttagggaaaagatttaggattttttaatatctaaaatcgggccgggccgtgagcccaataaaaactcgaatcaaccggactaaagttgtcctgccgggccggaggcccggcccacccccgcgaaaaaagcccaaattgccattcttatataaaaccaagtcctagtcctacaactttttctcacaccctatctctcaacaatggaaaacactttcctgatcagactttatacataaaaactttgggtgaacttcaatatcttacattgactcagccaaatgtagtatttattatcaataaactaagtcgattcatccatactccaactcatttatattagcatgcctataaatgttttattcaaatatcttaaaggcactattcatgacggcttgtttattagacccacagctaaattttgtcttcaagcatacttagatgctcattgggcgagttgtccacaggtggctatgttgtgttcttgggaggaaatcttatatcatggtcaataaagaagcaacaagtggttgtacattctaacacagaaagtgaatttcgtgacttagccaacattgtcgttgaagtgaaatagttgtcatctatgttgagagaactataaattactctaccagcacctcccatcatataggttgacaatcaaggagtagcctctttagtagcgaattcggcctttcatgcaagatcgaaacaaatagaaattgatctccactttattcgagatcaaattttggcaaaagaagtaaaaattcgatatgttccttgaattgatcaagttgttgacattctagcaaaggccttaacaactaatcagtttttgtatcttgtagtcaagttaaaaatatgctcatcactcttaagcttgagggggtgataactaataaacattttgtattttcagtttattagttagttgttaaaattattttttagttgtcaggtttgtcacttactctctattttacaagttggtaaattatgctacaagttgtaatacagtcaagattctttgtactcatcactatataaatatattttttagcttaagaactcgtaagcttttgcagttctttgagattcattctctgaattgtaaaaattgtatagataaattattctcatagcaaataaaaattattttaaataaaaactcaacatgggaatattaagaaaatacatatttaaaaataaaacatgcaagtaaatatatatacttatatacagtaggtggtagagaatgtgccaaaaaattaatgaattaatcatatttcttatttttatcagttagatttaaataaggacagataaaatatttaattaaattagtagattaaatgcaaaaaaattaaaattctaatcaaagttactaaaaatatgtacatattaataacaaaactagtaaaataacatactattattagtgcattccaatatcaactcctacaaatttaaatttaatgaataatttaaaaaactgttaactaattattgggtaccatatcagtatagtattaagcaccttaatgtgtcacataacaataatagcacaaaaaattatttacaaaaaaaaaaaatagtataaagatcattcataaaaagtaaaattaaaaaaaaaaaaagaaaaaaaaattactaactaattattgcgtaccacaccgatatagcattaagtacagtaagagtactaataacaagtacaaaaaatcattttaagaaaataaaattaacaaaaaacaaaaaaaaaacataaaagaaaaaaaaatagtaaatagtacaaagattatttataaaaattattaactaattagtaattatttatcaaaaataatagtaaatagtacaaagattatccatacaaatggaaaaacacaaaagataaaaaaaaaattacaaacttattattgagtaccattctaatatgacattaagcacattaaaagtaccaatacctagtaaaaaaattatttactaaaaaaatagaatcaaaaactaatttaaaaaagcacaaaaaaatggtaccacaccgatatggcattaagcacattatcgatatagtattaagcacattaagagtaccaataataagcacaatgtaatgaccacatagttaaatcataggaattagtaaataattaagaggtttaattattattatgtattttgtgcctcttagtagaaattagggtttattgtcagaaataggccttgggaaaatattttctcaaatacggagatatatttgaatgctagatgcattatatatgccatatgtgaattttttataaatttttatgtttttcttcacaaacaactggaattctggttggttcaaggctgtaccaaccggaatttcggttggattgtatcgggttaaagaccaattttagtattttagctataacttttcactcgggtatccgttttagacgttctatataccgttttaaagcttatgacgagctctacgatttggtatataaattagtgccaaattacgtattttattttagggtgtctccaccacatagtttagtagaaaaatcctaagttcctttcagacattagaaaagtgtgctagagtacacacttatcagttgtacgtatgttgtgacttaggagcctgtaaatcgtcaagcagcagtttccacttagagttactgatatacttgcattcagaatcaaggtaagattagtataataattgcatatatgtatacatgtttagcatacatgttagttgccgtcagaataacatatcagggtatcagtgaggtgtacatagagttgcaccgagataccaatatatatatgttaggaaaatcaatagccatcaaattagcatatcagagtttcaatgaagtgtacataaagttgcacagagatgccaatagatatatgctaggctattagatagtataaattaactgcttccacatcagtacgactagagtactgagtataggttagatttatagttagtcatactttgtcaagaacgttcctgatccagttagcattgtaattaagtttatgggcgcttggttacgatttggatatatgtttatgtttatgattatacttttcttactgagtctgtcgactcacaactattacgtcatgtgcaggtatgagctaggactgaaccgttgagagtataaagctaaggatgaagattgtacatcagggtcttcaggacaatgttggctcacttttgttggtcgctagacgatgaatttcaaaatataaacaatttataaacttttgtaatttttaaacaggatcttgaattatgtaatttattatgtttaaatattaaagttaagtaatttaattaagttttaatcattcacgtttttattaaaccctttaattagtaaaggcgtgcactgtatttagaaagcacaataatatgtctaatctagtaaggcgttacaattttggtatcagagctgccatgttatttttttgaagatcgtcaatgtacaatcatcacctgagataagcttgactcatggtttggtaagtttttacatgtttattagttttatttgttatgcatgattagaaaatatgatagaaagcatgttagtagatgatagctgaataggagtatattaagttctcatctaagcggtagttagatttcaattacaatcgctacctgactgatctgactcatgaatgtgtatgtttgtcctatagaatggacgcctggtaagactcatgtagttgggctaaggtggataaaactggtggcggatggagagactaggttctcccttatactcaagatcatgaatagattgatggaggtggttataaaaatccaccgtaggctccattagatttggagcaaaggtccgttgaaatggaagctagaattcaacgacaagatgagaacattaagaaattgagacaataagggtctcatattatacctctatctcaatttccaattgcttttatttcggtgttctcagcagatcagagtattgctggtaactaaatagagctatctggtgggaaaaatatgatggaaggaccttcagttcttttgagaaacctagctgagatgaatactcctctagttgtgtactctatagcatttgttcaagattcttgagggactgtagttagtgatgaaataagtggctgatcaaagtaaaagagctctgtcggcatcagtgggttcgagcagagaaagaaactttagaggaaataaggacggggtgccaacagtgtatccttgaaagttttatacctatccaaagtgcatccattgcaagaaacatcatctgggtgagtgtaaagggcgagtatgttttcagtgtgggttacctggtcactataagagggattgtccacggatacaaaagaagggacaagaacttgaggcaaaatcccttccatgttggaaatgtttttgttgtggccatgtaggacattacaagagggactgtccatggttacagaagcaagggtcggaacaagaattaatttccctccatgtttgagtgttagatagtacccaaaccaagttgaaaataattcttcagtggtgtcaagtcagttccttatcaattgttttatttaactttgtgttaatgaattttagaattacccatcaacatgtgatagtcagaatattgataattggatagaacatgtgatagatatgaaataaggcttcgaactttgttatttagtggtgcattagttgtctccaaaagggtagctcaggtttataccgattatcgttgtaaatatcgtagttttgggtatcgtagaatatgagatattactcaaaacggaattattgccttaatctgctgctagtaatgaaggctcatttgtattataatattagggcgggatttttaaaactccaatttttgcgatgacaaaagataagaatccatcatggaatggatgcggaggataattagtaacggcaatagatattatcaggccaagatagcctttggacattagaattgtatatgagttcttggatatatttccaacagagcttcttaaattatcatcacaacaaggttagatatgttggaattattttaccaggaacttagatttacttacaagtatgttgatttaacaacctaaatatgaacttctaaaatgatagaaaattaaacacata

SEQ ID NO: 17720 - DNA, 1944 bp, Cannabis sativa
ggctattctactattttggtttataattattaaattaaaaaatttacatttaattttttaaaagataatatttttgttagtgggggccacattattgtgaataggtccgtccctccctcttcttccactgttaggccaccagctcaccctgtcttcgtttaatataagcgctcacggttttatttttagatattttcctaaaaagttttgcactaataataaaataagtacaacagatatattcaagtcaattctcacttattcatcaaatatgaaattagattgatacccaataattttatacacttacattaccaaaataaataaataaagaacatttttgttaatttacacatcatttattcctattataccattcaaaagaataaatcacaaatcaataatatcatttttccactaatattcctaccaaaacacatcactgtgtctaatatagacaaaagtgatgatgtgtgcacttaatgttgtaaatatatatctaaaaaaatgtgatgaccgtacaagaagttcctttaaccagcaaaagaagtatagtagtggcactgggttggatgagatggtacatagcagagtggtatatttttctttttggggtgagaaagttgagactcagacaaaaataaaaaataaaaaaactaataaaagaaaaagaaaaaattgatgtgtgtatatatataaatatatatttatatacgacggtccggtccgagtgtggttgtcgggccatgtttgtagtatacttcgattccttcacctcatgcttgtttggtctagtctttaatttgacaacaatagccttggtttcagagacttaattaattcagagacactaaacacaaaaagggtattttggagatatcacatgataatcgatatgactatttagagtaatatggtcgcagaggatcagagcctggagagagatcactgaatattaattattacgatttgaaaagccacgacatgcatatataggcatgcaaatatatatatatatgaccatacactactactactactagtctactatattaactagaagaagaagaggatattggtcaaactaatcccacggctgaaatcaaatcattaaaatctgacggttggggttaattaagtcttacagtagtacgtagtactgtacttttttaaaaattaaaaaattattcttggaactctaatttatactttttttttttttattttatttattatttaacttctcatcaaactcaatccatgtatttatacacgctaacctaacatgcacttatacttaaacaagttctctttactctcttttttttttttatatcttttctgcaaaagataataatttattttctaattattatacatataattaatcaaaattctggtcgtcagagttttcatagtactctttatataaatgcattgctcactcttttgaattttttctcaattagggtgaaacaagctgaagcaaacagtgaaagagtgcactaaaaatatccccacaaaggaaataaattaatatacgaccctttgattttcttttactttttttcattcataaaaacaataaacaaaagcgtggtttttttttttaaaaaaaaaaacatatattttcagtactgaccaagaaaaataatataacaagagaaaaaaaaaacctttgttgttcactgatgaacacatgaaaatgctgtaaatctcatttcatctttatgttgttattgtatttgtcggtgcatgagtctttaatatatgttcatgtatatataatataattaattaagatggatattaataataaataaaatcaaagtgtaattaattaattaattaaatagaattagaacatgtcgtggagaaaagccggtgacactgtagtggtctgctgactccatatcgcggttaaaaatcataagccatgcattt

SEQ ID NO: 17721 - DNA, 4679 bp, Cannabis sativa
cttcctttcaagtaatgaagaatccgatgaacagccttggagtgtttttctgatggacaatggataaactgactaaccaagctcactgcaaacgcaatatctggccttgtatgcgccaaataaattagtttccccaccagcttctgataccggtgcttgtccacagccttagcaccatcttctttttcgagtttctgattcggatcgataggagttgccactggtttacatccgagtaatccagtctctttcaagagatcaaggacatactttctttgcgagataactattccttttgaggatctagccacctccattccgagaaagtatttgagctgtcctagatctttaacttcaaattggttggataagaagttcttcagtgactccaactctactatgtcatctcctgtcatcacaatgtcatctacatacacaattaaaatagcaattttaccatgattgtgtttgtagaacatcgtatgatctgaatgagcttgagtgtaaccatgttgtttcacagttctcgtgaatcttttgaaccatgccctcggagattgtttcagtccatatatggatttctttagcttacatactctgccatccttatttagttcatcaaagcctggtggagcttccatatacacctcctcctctagctcgccgttaaagaacgcgttcttcacatcaaactgtctgagaggccaatccagattaacggctaacgagagaagaacacgtacggtgtttagtttggccacaggcgcgaatgtttcctcatagtcgaggccatatgtctgagtgaagcctcgtgctacgagtcgagccttgtatctctcaaccgagccatcagcatggtattttatggtaaacacccacttgctgcctacacatttttttccttcgggtaaagaggtaagatcccacgtgtcattcttcttcagggccttcaactcctcaaagaccgcctctctccatctcggaacctctagagcttcatgtatcgacttaggtagttcatcatccataatcctggtggaaaaagctttgaaatctggtgagagcttatgataagatacaaaattggatattggatgtgtttgtggtacatgatctgacacctttgcgtatggctatgggttcaaagaattctatagaaggttctaaatttggaagagaagtaggagaaagagaagtcgtaccttggacctcggttgagtctgatgattggcccacctcgggagctggtggaatattacttggttgagtcctccttctagaatgaacacgaagttcagtaggtggttccaagttgttttctacctgggtttcacgaggttgtgaatttataggttgtgaaatcctaggattagttacagaaataattggttccactgaactattttcaaccgattttggcaaagatatttgttcccaaaaacttatttcagaatcattctctcccggaattgagtttttctcaaaaaaaggttgtttttcaaaaaaagtgaaatccatactcacgtaatattttccagatttaggatcaaaacatttataccctttttgtgttggtgaaaaaccaagaaatatgcatttatgtgcccggggatcaagctttcctctattatggccgtgtatatgaacaaaagcaatgcaaccaaaaattttaggtgttaaatcagtgaatgatctattttcaggaaacatattttttagtgcttgcaaaggagtgatgtaattaagaactcttgtaggcattcgattaatcagataagctgcagttaagagtgcttcattccaaaaacgattaggaacattcatagcaaataataacgccctagacacctctaataaatgcctatttttcctctcagccactccattttgttggggagtatcaacgcaagaactgtgatgaataattcctttttctttcaaaaaatcacctaagattgcattaaaatattctcggccattatcggttctaagaacttgaatattagtatgaaactgagtattaatcaaagagtgaaaatttttgaaaacatttgcggcctcggatttttcctttagaaggtaaatccatgtgactctagtgtgatcatcaatgaatgtgatgaaccatctagaacttgaggcagtttttactcttgaagggccccaaatatcactatgcacgagtgaaaaaggttttgatggcatatacttcaaagaaggataaacagatctatgatgttttgccaactcacaaacttcacaacaaaaagatgaaatgtctttatttttaaaaagatttggaaacaaatatttcaagtaattaaaactgggatggcctaacctataatgccacaacattatttcattctcacaagacaaggtagtaaaacatcttggtttctgaacttgttcatctgaaggattttccgagaccaagtgatagagtccatcaacctccttagcattgccaatcatcttccccgaacaagggtcctgaaattcaaatccagcaaatgttattgtagcaatacatttgcaatcatgaataatacgactgacagaaatgaggttgcaagaaatctttggaacatgtaggacatttagtaatgtgagagatggagaaataataatagagccttttccagcaatagaggttagagaaccatcggcaattttaactttcaaatttccagataaaggataatatgaagagaatatggaagaactaccagtcatatgatctgttgcccctgaatctatgatccaagggtttaattttgagccggctgtgaaagttgcagggtatgtacctttttgagctaaagaagaggaggcaatgtaagatgatgagttaggagtgttggatatggaatgagaactcattagttgatacaattgctctagctgttctttgctgaaggcagacgtctctgaggcagatttcggctctttggaagtgtcttcggatgaggcatgaaaaccctttgaatcatgaggattccggttagatgaagggttctcggctggctttccatgcagcttccaacatttggccttaacatgccctggcttgttgcaatgctcgcagattggccggtctttatcgctgcgacggtcgttgcggcgtggtggctgactagagaacagggcagacggctcggtgggagctggtgagtgtcctccgagcatgacggtccgccggctctcctctcttctgacctcggcaaagacttctctagtactcggcagtggatcacgaccaagaatgcgtcctctcacttcatctaattccttattaaggccgacgaggaattcgaagacacgttctttttccaccattttctgaaacaaagccctgtccttcgcacagctccactcataatcgctgaacatatctacctcttgccacaaggtttttaagtcagtataatattgagtgacagttttctcaccttgtttcagcctccatagacgagtttttagctcaaaccactgtcctgcgttcccgagatcagaataagtctcgttcacagcagtccaaatgtcatgagcagtaggtaggaagagataggttcttcctacactcgagtccatagaatttatgagccaagacatgatcatcgaattctctgcctcccacctttcagaaccttcatcttcctcagtgggcctcgcattggtacctgtaagatagtcgaattttccacggcctcgaatgaacagtttcaccgattgggaccactgtaggaaattgtttccattcagcttgtgagaagtgatggaaaggttttggaaagattcagtgtttaggggaattgagggtgagcgaatagagctcatagaatcgataccagaggtatcctcagagtgtttagccatttaggctcagataccataaagtcagaaaagaatgacagaatggaattaattttattcagccatttaggcgtgtttaaatagaaaaatacagagtaaatgctttacataaaaatagcaactaattgatcctatcttatcaaaaacagattacagctattaaaaaagattacagctaattacttctaaatctaatagaataaaaaatactaaataacaatcctaataattactgttaatattctcgacacccctcctcaagctggagaatagatattgatcattcccagcttggatagaaacccttcgaacatagcagtaaaaagtcccttagtaagaacatcagcgagctgctcagatgatggaacaaagggtatgcatatatcaccgttttccagtttctccttgatgaaatgtcgatctatttcgacatgttttgtccggtcatgctgcacaggattctgagcaatattgattgccgatttgttgtcgcagtacaacctcatcggtttatctccttcaaccttcagctcctctaagatcttccgaagccataacaactcacatactccttgagccatggctctgaactcggactccgcactgcttcgagaaacaactggttgtttcttgctcctccaagtaactaagttgccccagacaaaggagcaatagccggtggtagatctcctgtccgtagaacttccgccccaatcagcatcagtgaagatctgcactcttcggctcccatctttgaaaacataattcctttacctgggcttcctttcaagtaatgaagaatc

SEQ ID NO: 17722 - DNA, 4139 bp, Cannabis sativa
  modified_base (4027)..(4027): a, c, t, g, unknown or other
aaatgtttaatgggccggcccaaagtatttttgtaattttttttctttttttgtatttttttgtttttttcccaaaatattaaccgaaaatgattaatattaaaaatattaccatgatcaaatctgtctactactttcaaatgtttccaatttggaggccaaagtgttgggaaaaagctttaaccaaaacttgagcataaaaaaatatggaaatatcctttaattgattatgagcctcgacttctcccttcaaagccgaaactacttaaacataagttgagtttgtgacccaaaaattctctcaattgtttttgatccacacaccagataaaatggacacatccatgtttgattattgtgggattttatttgagatttttacaaaaatattaaattttagtcaaaaatttacaattttacagtcacacagaattttttacaaaagtaatgtttttttataaaacaacaatacataacaattaaaacaatagtggaacaactgaaaaacaattgtggaacaaccgtgaaaacttaatacagtacacagtattataaaacttacacaatatttttgacaaaaaaattctatcccacagtaaaaagcaaaaaaaaaaaattaaaaattttcgtatgtagtgtaaaaatctattttattttattggttggaacaattcttgtgagatgaagtaatgatttaatggttgtactagattatatctatgttaaataagttatgtatttaatattttgttccacaatttttttgaagtcatagttaaatttagtattaaattaacattaaaaaagtacaattttagcactaattattttattccaatcacgacattaaaatttatattatttattattatattattttattaaattatttcacattataataaatataaataaaaagtttaatcaaaaatatattattttggatatcaaaactaaaaaaataatataatttatagtgtcccactatttttaataaaacaccatacacttccacatatataagataggataatgtttaagtagagtcacaaaaaacgtctctatatagagatattttttttttttcattatgtgtcaaactattattttatataataattaattaattcctttatattatttttatttctttttttgaataatttagtgacccctaataaggaaagttgctaattaatgttatcgaaataaagtcatatgaactgtggtaaaaaaattagtattatttgattaattaattgtacaatcaaatatatttaaaactttaattttatatgtccaatgtgttcataatatttaatctctaagtttcactatatatcaaaacaaaaatattgcaaaagtgtttcaataaaaaaaaatattgcatgtaagacacattattatttgaagatttttttagtaaatgaggttttagggtcctcaatgttaaatattagctaacttttctcattaagggtcactaaattattaaaaaaaagaaataaaaataatataaaaaagaattaattaattattagtattaaataatagagtgacacataataaaagaaaatattttatgtagagacattttttgtgactttacctaaacagtttcgtataaaataatatttaaaattatattaaaacaattttatattcatactccactatattttgggattttaatgtcccattaaataactccttcaaaacaaatacattttttttttatagtttgttcggaaaaaaaatgtttataaatggataattatttatgaatgtcagtatttacatggctagtagtcagtcaaagtcaaagtcacataggtttattttgtcaaaaatcttattatcttgtttctttcaaccaatgtctatttgtgtattttttttttttttttgagtaatgtgaaaactttttaaggaattaaaaaaaaatgtgaagttaattaaaaggttatgcttttaatgcaatcttttagtggataaacatgtttagtgtgctcctctttgaaaataaacatgtaggtatattctcttattatacttcctatgctttttctatcatcccaaaatcttatattattacaataaaaaagtcttatattatttacaatctttcatattattagtttacttgtatatattatttcaaacttagtgtatgagatagataaatgtgatagattcaatattataatataatttgagatgaattgtacaaaagtaaattaatgtgtaggaaaataaatcaataaactttgacaataacttttcaaatatgttattttataaacaaattaatattatgaagaattatgagatcaatttgagcttacttcgtgtctttttaaggatttgtctatggaattggtgtaatttattagccgtatgaggggaaaaatatgaatttctcttctcaagttaaaggcatttgttgtttgattttttaggggggtataatagttctttttaaagggattaatgtgccattttgttttggactaaaatttaatgtgataaataaatgaaataaaaagaggcaaacgtattacacaagaaaattttagtggtgccatatatacagtcactactacaaaattaattttttccaacggtttataactgtcttttatactattttctaacagttcttaaaacttgagctgttaagcgtggaagggagaagagatggaggtggtgatgtggtggagggtggagggaggtgctgatgttgtgtgtggtgaaagcaagcacgcaacagttttgtgcgaggtgggagcaaggccgcaccttgttgtgcgtggtagaagcaagtcgccgacggtgcgtggtggcagagggtggagggctggaggcggtttagacaagtgatggctggaggcggcttacacatcgaatgtgatttaaccttaaaatgtaaataccaattaacttctcaaaagtataatgtttttttttttttttgagataattaaaaaaatattatttatatataatttattttttaatatttaaaagcattattcttttaatgaaaacaaaattattttttattattgaaaataaaattattgacattttaaaatgtcattcaatttaattagttaaattatttttacaaatgtgattatgttataatttagtgacactttaaatattattaaaattaactatttataaattggtaacattttgtattaaatgtcactaatacatataaatgctaacaatttcaaaaaaaaaaatgtgattaaataaaatgtcttttttttttctttcaaaaatgatatttttaggcagataccattaaaatttaaaatactagtattatgatattttttaggactaaattcaaaataattatataataatattttataatgttgtatttatacactttttttttttttttatttttctttttgtttaaaattgctgaattttttctgttaatcttttaattaaatacaaacttgttaattttttttttttaaaaaaaaatttgaaacttttttttatacaaaaaaaaaaacattttctaacagtgatagtattcccaatagttataacgcgttaggaatacttactaagtattcccaacgcgttataactgttaggaatacttggtgttcactgttttcttataaaaaatttcatttagtattgcctacggttcttcactattggcattagtttttcccaacggtttctttgcttcggttctaaaccgttgggaaaaatcttcccatacattttccaatggttttcataattgacccccttattaactgttggaaaaagccaattttgtagtagtgagtagtaaatttggttaaattaggggtgtttttatttgagaaaattacatgttgacacgtttttttccatttaattctaataataacattactttttaaatttttgaatataccgttatttataccgttttttcattttaaaccattttttttggcttgttgggcacgctgagttgatgggggtgacgtaagtgtcagtnggaacagatggaggtcatgtccaactgggtgcgtgggcacgtttttcaatttttgaattgattttttaaaatttttacccaaaaagtagtttgtaaacctgccaataaaatt

SEQ ID NO: 17723 - DNA, 3328 bp, Cannabis sativa
ataaataaatatcatcttgacttgcagaggtggctaagcctttgaaaatcttctaaaagcttccatcttatgttgataatatgttgaatgaagtctcactctaggggaaacaataaggtactagaaagtgtcagtggtcttgtgcctctccttgcatttccacttgggttggctttgataatatcttggaggtaagttggcacttgtagggttttaagcttctaaaatttccaagaaaacctcattttattgaactgtacatgagcattattgacactatctttggtcagtgctcgcataggattaattcccatttctctaccaaagcatctttcaatgggcttccctcatgtgttgtgtaaccactaacattggaaggagtcattagtagcatggcttcctcaatttctttgaagtgggtgacctctgacaatagaaagtacatgtttgtgtagcatatatatatatatatatatatatatattctcctcctgatcatatgccaacattgacattaggaagtttcactggtaaaatgtggctttggtttctcttagaatatgcgaacattgatcaaggataggccttttggttgcatatgtaagttatgttgctttaagtgttgtgcctatgcaaccactaacactttgaaagtgccttggattgtatatatatggtccttatcttctagccccaatgattttatcatgtcttatttatctcaaacaaattaagtttttcagtcatgatttgttggaattcttccttcttgaaattttggtgaacaatgaccgtgagatggttaatgtctttgtgaacactgacaatgttgacctttgtgtctttaaagtgtactcgcgcggcttgcgaacccttatggccatggaaaataataatgagtatttattattactttattatttcaaaatttgagtttaaatgtgtaaattgaaagtgtaattataatctatattgaaagttcttaaacctgtgatgcttactattttcagtttatttaatcatgtaaattaagatttaacataagctagcaaacatcacatcaagaaatttacaaagtttattgcaactgggaacaaatttcaaccaattactccttaagtttatttggtaataactccactaatcgattgtgtgatttataatgaagcaaaacattgttttttttttttttttaaatttttgcaggtatgatgtagcccttgcgactaatacaataggtatttataatattttgaactttgcaaagaagtgtttgaaattaaagaagctactccatttgtcaactggttagtaatatattttcattaattgttgagtatataatttagtcttacatgtaattttctatgactataaatctaatcatatcataacaaaatttgttacaatataagcatcatcagtaaaatgtcctaacaaatctaaaatgtatatctaactaaaatattagtccaaaaatatgtgtttttttgtatagataaaatagttatgtttatcattaaatatagattatgactaattttacattagtcacacttgtgactaaatattactttttaatttataattcagcttatgtgtgcggtgaaaaagagggaataatatcagagaaagcatttgagtttggtgaaacgctaacaaaaaccttcaccaaacttgattttaaaatagaaaaagaattggttgcacatcgattgtctcaacttcgagaaactaaagcttcggaatcagccattaatgccaatatgagagagcttggaactcaaaggtaatataatttcttactatttaaaattataaatattaatattatatatattgacatcaatagagatgagaaaaattcaaaattaaaacttctttatttttttgtcatgaaaagaaaaaaagtgttttactagtccatcagtatacttattgttagtaataacaattagtttgttttctgttagaaagttagttaaacaatttctgttattttctctttctctgtgtattacttgtatatataaataagagcttagttcatgagagggtgcagttagttgcattgttactctcttatcttttctttattctattttctactctggtgatctgcaccacaccagtattcttgttctttttttttttattaataatatgttgttattaattatgatgtattaataagttgttagacgtaattttaatagtactatttgcgtattaattaaataattaattattagggcaaaacattttggatggccaaatacatatgtatttacaaaagcaatgggagaaatgtgtgtagaacaattcaaagatgatgtccccactatcatcttacgtcccacaatgattgtaagcacttataaagaaccatttccgggttggattgaaggtctcaggtatatcatcacttttgttatatatgcatgtaattatatatatctatataacaaaatatttcacctgttaaatttaaaaataaaattcaaaacattaattacgtataaattaatactcacgcagaacaatggataccttaattgttggcattggaaagggaaaattgccattcttcttgggtatacctactgtcgcacttgacttggtaaatactcttttattcattcagtgacatacttatttatttatatatatattaataaaaggccggccggttcaacaaaattatatataaatattgtatatgcagataccaggtgatatggtagtaaatgcaatgattttatcgatggtatttggtgagggtggaatgatttaccatgttggaagctccatcaaaaatcctgtttatatttctgaaattcgtaattacattcatcgttatttcattgaaaatccgctctttgatcataaaaaagaaaagcccatcacagtacataaaattatacttcttcaacatatttctactctaaatatttacatcgccattcgatacctcctacctttgaaggtatgtaattaaatatgtactatttatatattaattaattaagaaacaatactaaaaaattttgtttacttgtaaacaaaacagatactggaaatggtggtaagcttaccatatttgagatgttacaaagatgtttatgccaaaaacatgaggaaacttcaaaccataatgcgtttcatacaaatttacaagccatatgtcttattcaacatgatgtaagtataagtatatctttaattagttttattaattgtaactatatattaattaattgattaattatataattaattgttaattgcagatttgacgacacaaattgtgaagggctaagagaaaata

SEQ ID NO: 17724 - DNA, 3453 bp, Cannabis sativa
attgagtaataaaagtattatttttgttgacatacctcgagttccatcaggagaagccactaaccctctgaatatgcaattaccatcctcatctttgctagcatacccggcaataggagtgcggcaagatccatccaatgttagaaggaaggccctctcgcatgcaactgctagtctcgtctcctcgtggttcaatgaggctatgtaatttgcctgcaagcccaaagtaactaaagattaaaagaggacgagaagtatcatgaggtgaaaatttttagacgactactgcaagaatattaagttattagaaaaagagattgcttcatttttccaaaagaaaaaaaaaactacataaaataaagaatgtgctaaaattatggcaagggactatgcttttgagcccattttgcccagaagagactatgcttgcatttacatctatccaatgtgtcagcacagaaaggacctagtgtttaaggtgaccaatgtgtcctaaagagaaaaggttttacacaggtaagatgacacatgctctgggtatcagtttgataaaatttcatatgcactgagcaaggtgccctgctatgaactccaacatcaaatcgatattcaaacttacaaagcatagactatcacatccaaaaccataaccgtttggagttcagaagagaggacagcaaaactggtggcttcaaatcaagtacactactagattagagcggcaatgtgaataatatactgagtttggtgcatattataggacaatatgaggtgaaaaataaaagaatttcaaatttgactaattttatcaaatcataattaaaaaacaaacaaaaaaaaagaatattaattacatataaattatgttaacaactaacaaattaaattaaataattttcattgaaaataataattttggatataaaataatattccaaaaatgtttatgatataatttataattttgagaaatttttaacaatatcttttttttttcgttttatttacaaatttacgaactaaagttttattgacaaaaatacactttcaaagttttaacagtacaaaattacattttgctcaacattaaaaaaaacaactaaaaaaacaactacactacaactataaatcaactataaaacaactagaaaaataacttgatgacaactatgatacacctataaaatcacaaaaaaatatagtttattattttcactgaaaaagtattttataaataaaaaaattaaaaagtaaattttttccgtgttgaagtatttttgcaatttttttcaaatttttggtctattttgtaaaattttttttataatttttaagattaagaaagtatagttttccaaatattcacatatactatataaagaaacaactaataatagagaaagaaaaaagttgaaaataaaaaaaataaaaaatcgataaagcttacaattttaaaaatcgacaaagatttttaaaattttaattaaaaatatatgtacacttagtatagaaacaaccagttggacaaaaaaaaaaggtgttctagtgggggtgagtaaatatagttctcaactagggggactaattcgctgtccagtcctccaaaacagaccaaacatgggactagacaagtattagtgaagggcaacatacttgccctaactatcatatggaagcttaaaaattctttaaaacagtaataaacttttcatggataacaaattactaaggggaataactaggtcatagcaaccaacaaactaattcaggaggtgaaattagagacccaccattttatcgtcatcacttcgacaggcaatcccaatagcaccttgagcaacagctggaagcatttcatccattggaagaatggaagtcacattttctgtcatatttaagcgcttaagtccagctaatgccaacaaagtagcttggacaaccccttcactaagttttctcaaccttgtctggacattgccacgaaaattctcttctacctgtcaagaaattcaaaaacataaacaagatgcaaagatacataacaattccaaaaaaaaaaaatccaattatttattactcggaaaataaaaaaaaaattcagtcaagagagctagaacagaattggcaggggattaggatcttagcaatcaatctatcccatttatttcattaaatggtgaaaggaacaaaacagatttttattccacttttcagtttattagaacgagtaaagaataaagtgactgtttagctaattaaccctgagtcgcacagaaataattaacttgggacagtttgaatatcctcacaactcctaatatgaatataaataaatgtaacataacccattaagcagttccttagacaatgccacaacaaactatgggtctacatatgccatatgtcaatgattatacatcaaagaattaagtaagtccagataaaaagcaaacaagaagcaagagatagcaacaaaaatttttccccattgacaaaaactgaaatccacaactaccaatcatgagacctatgataactttaaagcaattgaccactgttaaattattcctccatggtaccaatataacattgtaaaaaaattgcagtgccaagcaactccaaacacaacagtcaactgtgactgccccaagtactaaagttcatcctttttaagttgtgagttcacaaatgaactatataccatcacacatgaactgcaaacatacataacggttcaaatcaactttgatcacaggcttgtcctaaaacacgctttgaggcacgttactttcatgtacattaatagtatcttaccttgagtgatggaaatctatggagtatctgtgatttccgtctaagtgaagcagtaccaatcacgctcccttctgggagctctgcaagtgaggcagcactcaacgagataaacgcatcacgaacatcttcacgaggaagattgcacgggagaattgtcttttctggcaagtaggttggaacatctttcattgaatggacagcaatgtcgatgtcgctatttattagtgcctcatcaatttctttagtgaataatccctttccacctatgtcagcaaggggttgagttagtattttatcacctgttgtttttataattacaatctcaatagctccttcttcagctagttccgcatgttttgccatgagtttatctctagtctcgtaagcttgggcaagtgctagtgggctatcctatatccagatacaatattagtaactcaccaataaactgtttaactaaaaaaaaaaacactgcaaacaaaacttagagagtataaaatcacaagcaataagtacgtaatataatcagaggacattaaaatattaaggtataaagcaatagttccactaaatgcttcaaccatgtttcttctacttgaaaagtggaaactctcggcaatccttagtagtatcaacata

SEQ ID NO: 17725 - DNA, 3064 bp, Cannabis sativa
  modified_base (946)..(946): a, c, t, g, unknown or other
agaagtaagtactggggatgcgatcacgaacaacgatgaagaaatagaaaggttgaaatgttgtgagaggtaagagtaataagaagagagaggaccgtgagttccttatatatttatatgttagtaacatttggaaaaagaagatcacctaggtgaacttgtcacattaaaaattggtggaattattaaaaagaattaaatttcacatgaataatcaaaataatattaaaaatatccccctacatttgtaatatgtattaaatttgtcaaattattgagtaaattaaggcactaattatatgcattgaagaattattaactctaatgaataagtcttttcactggtttcaaaaaaaaaaaaaaaaacttataaaataataaataaataaaagatgctttctattcaatcaaagaaaaattatatgtactacaaaaagtaaaatattatatgtcaagatcatttagctaaaaaaaacatgtcatttatttattcattggacatgagaaaaagtatttgtattcatatttgtagctaataactagggattaattaataattgttgtatatatatttatatatatattaactaaacctaaaatccaatgaacgagtaaaagatattgctctacatggttccttcaacttcaattaaataattgcttgccatttcaaactatagttttgacaatcatgcatatatataatattttttcccattctttcttatgtttatctttttcaagaaggatgtcttcaattttaagtaaaaatgtcatgtatatgtatgctatttcaagctatgcatttgcattcaaactttgaaataattttaaaaggaaatcacattgacagtcaataatttatgttcaagctataatgacatcttattccaaaacaaaaacatcttcttctgtcttcttcttttttattatatatatatatatntatataaaaaaaaaaaaacaaaaaggagtggaatcttgttggacaaattgatatcttactgtaaaaaaatttagaggtatttatatatttgttaaaaaattgtaatacatgcaaggaaaggataaaggaatttggtagtgcaatttaaaaaaagaaagtgagtgtaatttgaggaataatgttaggttatgaattgaaagggcggcagccgccatattctaatttccatcctaatttccacttcaatgttaaaataatttattatttattataaattattatgaataatataaaataaataagaagagaagaagatgaagagagaaatataaactgaatgagaattttttagtattttattttaatggagtaatcttttatttatagaaatatgagtcatagattaaaaaactaaggaggggaatagtaattacaattaatagaaaagatttgggtgaattagaaatccatatatatatatataatatttcataacacttccttagatgtctataataactgtctcattaaaaatcttaccagaaaaatttagttagacaaaaactcggtcaagagaaaaaaagtatagtatgaattaactcttccttattaaggcattcgtagagatcttctaattgacgaattctgatcttatatgtcgtcttctcaaatgttgatgttggtaataactttgtgaatacatttacaagattatcacttgatcaaatttgttgaacatcagtcgatatattatagatcgtgtgtaaagaagaattttgatgaaatgtgttttaattatatatcctttaatgtaccctcctttaagttgagtgatgcaaacaatattatcttcattgagaactgctgaagttgatactattttattgagtgtaatccatatgtttctcgagtatgttatgtcatgatatcactcccacacattctctaattgctacatagagtgcaagtatgttagcatgatttaaaattggcttgttaaaaaccttgtcaagaatatccagtgagacaaaacttgagctaaggaaaaaagagtgcaatctatatttcatattcataattatttgcaaattgccttgtaaaaaccttgtcaagaaaatccagtggtaaaatccttcctttttcgagtaggacttcttttcaagtcacaaaggagattttatggggagttagaacaggccaattccttgaagaaagttgagagcattttgtatctatttggatttatttggtaggggcaaactccaaagtaatccacaatcaaaataaaccacaagtgtaaaggtaagtaaacacccgcattcatgtgaaaccgagaccaagcactataataagaattatgggaacaattaggacatctagatcgtggtttctggacaacagtctctggaagaagatagtcatctctgattaacttaacttagcgttcagagatggtgttgaagacaagaggtctcaatttaaaagatcgatctctcgagtcatcactcttaatggcagtcttaataagctcagttgccatcacttttctaccacgtgctttgtctagattcttgaatttaggcactgtgagcttggccctaatgtactgggccacgtgtggatcatactcattagacattcttcaacttaccttcatacgaggcatgatggcctgaagagatcaattctttcaactcagaacagttgaatatcaattcaagacaactctttttaaccttgtaagggcaagatcaaggtgactgcactaggtaggaaagggagatttcagttcaaacagctcacaaaaaattatattttttatttttggaggacttgtcgaaggaatttaaggatttgtaattagttctagaatccttaaatcaaattaaacaaaagaagaagaaaagaaaaaaaaaatcgaaaaaaaaaagtctaattacaaatcataatgcaattaagatgaaagtttgacatagataaatttaaggattatgagttgttaaatttaagcaattaagattataaatttaaattttttcatctataacaactcataatgcaattaagatttaagcaacttccccctgaactattaagattgttaaatttaaggacttt

SEQ ID NO: 17726 - DNA, 2343 bp, Cannabis sativa
gtccccacttgtcaacacatcattcccacccatgctactagacgccatatcgacacaaacaaaacaaactcaagaacagcaaaccctcaaaatagagagacaactacgtatcaaaagatacgactacaaaaaaaatatttatagatatattattcaacaagttaggaatcatgttattagtttccactttttcatacttttcaaactttaatttgcggttttaataagtaactaccgtttcccggacattataattagtgacaaagtttcaaacattgtgattttttctttttcaaacattgtcaaatatatatatatatatatatatatatatataaaagtgaaaataattcgctggttacaatttcagaatgtatatataaagtgaaaattgattagtgaatgactaggaaaagactttgaaattcatacgagaaaaggcaaagaaaaaaaaaatagaaaagaatgaaaagaaagatagttacaaataatataaagtaatttactaatttctttgatgacactctacagtaaaacatgggaccgaggaaagtaggtattgatgattgacttcattctaaagctcccccaacatggaattacccaatatataaccaataaccttaaaccacataaacctcagcatatacctatatataagcacatgacaacacacactcgttcactacacaaaacaaacatacttattaaattccccaaaaagcaaataataactcaaacaccctttttccaaattctagttctttattactttccaattttgatagtggtcaagaaataatgggtgttccttctcctcttcaatcttcaccacatatggtggttttttcatttgttataataataagttctatttgggcctttccgatggctgcagccatcactaggcattacaattttaatgtatgatatatttgattttattttttttttcatttttacatgcacacatataaaaatgtatagctatagtaattaaggtaattatatatagcatatatatttatatacattgcattgtgtatatgcagataacactgaaaaatgtgacacggttgtgccacacgaagagcatcatcacagtgaatggtgaattcccaggccctcccatcattgctagagagggagataggcttttgattaaggtggtcaaccaagttccaaacaacgtctccattcattggtatgtactatgtaataattaataattaatattaaataaatcatattgcaccaaaatattacatatatatagagtttgttttaggacactagtgcctaacattgccaataggtgactcctttaattcattaattagtgatattttttaaaaattattaaactaaattatataagatttaatgtttaattgcattaataacaatataacattgtagtaatatttctcataaattatatatatgagtgaatattcatggctacattaaaaatatttatatgataattattatgacctattataacatgttattaattggtaaaaattttatttttatactcaaaataattataattaattatatacttaaaataacttaatttttcgtttaaaaaaattaatttttaattaaaatatttgatatataagatattcttcacaagtatatgtataaatattttttatttttatttataagaaaataaataaaatcaaggttaatattaaattatagatattttattaattattttatttaattatttttaatgcaattttatttattttttaaattaatcacaatcgttaataataatttaacaactaaaataaatgtaataagagtaattatatatataaaataaaataataatttgttttaataatgtttaacttagataagattcttatttaaaaaaatgtgaagcgttactttctgtaatattttagtttacaagtcactcaataataatattagttcatatatatacaaatatattttaaataatatttataacattggtatagactatcattgtatattatgggcccgtttggtacctcgtacaagagttgtattatattaaataataaataacattatgtttgaataaaacaatatattgtattaattattacgaccaaattttataaaacaatatatggtgtattatttaatacataacaaatggttcgtattagcttgtattataatatttataaaagattcagggtcaacaccgatcttcgacccggacacggatccgggacccgaacccgaacctgaatccaaacttgggaccaagacctggacaccggaccccagaccctgggacctggactcggatctagacttggacct

SEQ ID NO: 17727 - DNA, 6097 bp, Cannabis sativa
  modified_base (1176)..(1180): a, c, t, g, unknown or other
  modified_base (3497)..(3508): a, c, t, g, unknown or other
tatatatatatttatataatatggtctctgtttggcttttatatatatggatgagtcagatctcaactgaattaatttaatagaagaagaagaagaagaagaaggtgtagggtatatatatatatatatagggtcttatataattatccccatgtgaaacccacaccattacatatataacatattattatttctttctttctttcttccaaagaatctaattatataaatatatagatatatcagtcccacaccaattacgtcagattttaaccctgtctttaattctcacatgtgacatccacaaccacaaacatatatactcttttatatcatcatatatttatatttttaaaaaatatactagtaattctcttactatattatactaatatctgctattttttacactcaaaataaatcaatacaaaaacctattattattttcatctaacaccattcattattttatttatttcatctaatatacaagaacttagaaaagataagttttataataatttttttcttaaattggttaccatatttacttgataattaatttgacactaataataaatttcttgtttgcaaatatattaggggacaaaatacatttcaatatatttattgtctaataacataaacttttataaatagaagaaatctctccactttaccttttgacttttctctaaccaataacaataatattaaaccacccacctctacgtgtatatatatatatacgtatatattaattattatatatatttgtcatatcacaacactgttaagattacttagttggatgataaaaaataaaataaaattgttaaattagctagatgcttttgttagtataagaaaaagataagatataaaaaagtgcatgcatgcagaaaactttataatagatatatatattatatgacactgcaaagaaaagataaataaaacttttgtaaatttttgatgtctttatatatttattggaacacaacacagtacagctagagacccttcagcatatttttatgtgttgttaggtatgaaaggggcttgttatggatatggtgtaccaacaagcttataatataggtcggtttggcctcatttcatttctactcattaatacattatatatatatacaccataataataataataataannnnnataataataataataatagaatcaacagtgtgatagtggcagtggtcacttgcttggtaccttgtagagtgtttttttttttttttaatttattttaccacgttgtgttatagttataatattattatatccgtaaatttttttaaaaaatttaaataatttatagtgtcgaaaatatatttgaaattttttaaacatgtgcgtggtaaattaaattttaaaaatttaattaagataatgttacaactataacaaatatcgtcatatttttttttaaaaaaaaaatatttagtattaacatgtattttcggatacaataattaaaaaaaatattatatataataggaaattgtcatatagaattgaagatcattaacttttgtgtacttaaattgtattcatttaatttcaacctaacataaatttaataataaaaaaagattgatgattaataggatcacccatcaacattagcctcatctataagagtggcaaaatggatatcaacacaatacacaaatatgaatacgaatacgacataaattttatgagttggggttgggaaaattagacgttgcttaaaaatgaagcgacacgactttatactgtgcaggcagtatttttttacttttttactgtgttttttttataagtttcatactacagtatactgtgttaagttttcactgttgttctactggtgtttttaattagttgttatactattgttttgagttgttctgttttgtgttttactggtgttttataaaaacacagtatttttaaaaaaaaattctgtgtgatagtatttttgtaaaagttaatccaaatttcagtatttttgtaagtttcccaaataaaaatagatcaaacattacacaacccgcttaatatgaatttgacacgtaatttaatgtgattttttttcaataaaaaacattttttaaacataataaaaattataaataatacaaaattctacatagaaactcctataacaactaacgaagcaacctaaatcgcaaccaaaatccgtataacaacccacatagaaactaccgggaaaactacctgaaaaacccaaactgtaaatttgaagaaaaaaaaagttaaaaaataatatttgagaaaatttcccaaatatatatttagtgatttatttttttttttaaaaaaaattaaattttctttaaaatgaaataaaacttaatattttaattttttttatttttattatatatatatataaaaaaattatatatattgtatgtaagttttttaatagaacataaatttatcattttttttttctcctttaactttaataatagcgaaataagttaaagtgggtcaacacaaacacgatataattttttacaagttgagtttggattgagaaaactagatatgggtcaaaaaacagttcgacatatgcttaacacgaaatatagaaatgaattacataaaatataacacaaacacaacacgataatacgttttgccaaatatttacaactatatacttgatgtatagatattaatattaattcagtgtacgtacgaaatgtctcattcacaatcaccgccataatatatatatacatttacgaatattatatatagtaaaatttgaatattaatacacctgaaaatatatgctataattgattcaattttcgtattaaactcttttatatcatataggactacatgtaatttattacaaggctttcatgaaggatcagtcattaatttactttattatattgattaattatgtaatgtgcatttgtaattgtacatatatatatatatatactttgttcaaattctttgatagctagaaatgagctagcttggtttcttgtttgaaggcatcactcgcttcttccgtagggttgcccccgatctgagctcgttgaggtaattaaagtttgggaggcgctaagttggatcaaacaaaaaagatagtagttactagtttgtgacccttgaaactgactgtttggtcgtggtacgtacaagcgatataaagcctcattaatatgatttctttattttgtcaaattattaaagtgtaaatccttgcttgtttggaaaatgtttccatttcttttattaaacattagtatactcattcatttacaaaagtttttaatttgtatccataccgtatgtttagtacgagagatgttccaattaaattacacttttctgtttagtagcaaaatttgaaagttaataaaaattaattatctgtaaaaaaaaaaaaatcttcgggctttgaaaatttcatctatttattattattattatnnnnnnnnnnnntattattattattattatagaataaggtataataatgtttacaatttggttcttatttattaatttggatatagtattaatttttcatattgactatgcaaaaacaattttttctctccaaaagtgcattgcatgcatatatatctcttttgaaaatataaagaaaccattaaaactaaaaaattgaagaagagaatatataaagaaaaagtttggtatttaatatttcattattattattattttatataatttcactacacatgtatacccaaagattcattattatcacattttaaatttagtagtatgaatcaattggtcgaaatataaaatattcaaattaatttaaactttaataatattcaaattaaattctcttaattaacatgaatcaaacaaacaaagacaatattaattggtacgtatactctttgcaaattaatagagaaagaaaatatatttaataaatatacaaaataacactcataattaataatatcaatcatcataatatagctctaattaatcattaaatcaattaattaataattaaccattattcattactacccaccaaacttgttgacattaaaaatactatcatcacaagtactggttataattataattaattagtggtagtaataatattcatcatacattgtacatcttaattataacttttttttgtgttattattatatataattattattattattattatgaaatgcaacatgcattaggattctcatcactaaacaactgaggagctgggattctttcaataacatatagaggttgataatagtgaatcattctcttcatattctcttcatcaacacttccatacccaccattattatggttcatcatcatcatcatatcttcaccattattattttccttattttcttctttacttgcttgatcttgatcttcttgtggtttttcctcctctttctttacttcttcttccggcggtggtggtggtggtttattttcttcttctttcgatggtggtggtttttcagcctcttcttctttcttttcaggttcaggttcaggttcgggttcaggctgaggctgtgggataatagtggcttgtttctttgtgcgtcggtaaacatattccactaatttggttgcgtccattgttcctgttactatgactttcccactactcagctcagttacagctgtttgaactcctacattattataattaaaaaattatatcgttatacataaaatatgcactaaaacattacacacttgcaattttaaaaaatcactatcacaatatactcttaatttttttattaaaaaaaacaataaactttgttgttgttgtttttacctctcattttgagtatcttgctcttaagttggtttgcacaagcctcacagtgcatatttacactaagttcaacagtaactggtccatcaacctgtagtaataattaatattgtaaattaataaattaatttccataaaattaatatataaatatatacaagctcggttttagacatatacaggttaggcctgtatctaaaatctacttaatccaaaaataaaattaaaacgacccattaattttaccctaaataagagctagtatttttttttcaatgatccatttaatttcaaggtcggccctattatatatatttatatacctgtgaagtgacaacttgaggcataggttcaccctcagcagttggtaatggggacaacactttagctcttcttttagtctttttcatgattttgttgcacactgcttgaggctccactattccctttatactcacttcatttttaccaaaatctataccaactgcctccactcctaatataaccaaaatatattaaaaaataataattatatcaaaaattaattaactaaaaaaattatgttaattttaattaattaattaattaataaattacctctaattttcattaaagacctttcaattttcttagcacaacctacacaatgtaagtcaataaacaaaataaaaggagatggtggtggtggtggttgtggttgtggtttagcctcttcttcttctactttcttttcttctttatcttctttcttctcttcaattacttcaattggcttagcttcttctttagcttgttcctgaaaatatattcaaaattaaagaaattataattttggtattagtaaaaagaaaattctaaaaaatggtaaatatatgcaaaaaaaaaaaaaaaaaaacactaacttgttgcttagcttcttcacccattatttttttcttcaataataatgtaataaccttttataactgatcaaacttgaacacaaaaaatgtatgagagaattatatatgtaatgatatggatatatatatatatggagtgtactatactactagagaggtttttctcttcacatgaaaaggaaaactatgtgaaattattcctcttcttgatcacatgtgttgccactaataagcatacaaaagaaaagtttattattttattattactatattttttttgaggatattatttcaagttccaaaaagctgaattagctagtaaaa

SEQ ID NO: 17728 - DNA, 4639 bp, Cannabis sativa
agagtagaaagctaagctagggtcaattattcaattattcaaggttataattgtaatttcatcgtcaaatttttaactgaattgatattttgttaattttttataaaaaataacatttattaacttaattgttagatttaagaccattttacatcttagcccttctttatgttgtgtggtagtatttatgtaatttttttaaaaaaattagtatttatgtaaattaccttgtattaaaatcaataaaagtaaatataaactcaaataaaaagttttaacattacttactttaacaaatccttatttactctcaaaaaataatcaaataaataaattctataaggaatacatcatatacacaaacaattctatcctttacatcatgaaattttgctggaagatatttttaatttaatttaatatttgatactacctttcttttataaaatcaatcaaaaggaaacaacactacgcgacttgcttgcagacatgaatctccggtaaataaataaaaaaatgcggactaccgtacacttgaaatttgttgtaagatataaatagcgtacattacaagcactcgagtttacattatcaactcttgtcagaatataatatatcagtactaattcatctttgtacaatgtatcccaaagaagctaatgttacacaaacaatagttcaactcaaggcacttcatacatcacttttaggaattaagaactagaaaacaaagattgaactttgagaggaaagaaaagaaatgaaacagaacatatttattcacttcatacagttgaagcaattttaaggacctgttaagattctacccatgttttgtggatatggatatgatgaatggttcaaagttgatatttcaatattttctctagatccaaattggttcaagccattacctaggataccgtagaatgtcgtacctccttgagctacattgacattggagttgtgacttcggctttccatttgttcagattgcgcagtaggatgttgctcgttggacctattatcagtagcagaactaattccaacccctagatcaaggctaatggtatcagtttcctccggtctaatccttgctgggatgcttgcagccattgatcctaccaattcatggctgctatttctcgcagcagggacatcgtggttatgttttccttcatatgttgttataactgctttaggatcatgagaagctctctccacatgttttctaacagggcatccagcatttgtgcatttgtaataactcctacacaacaggcaagcatgattaggatacatttgacaacaggacatagctaaataggggagcagtctattggctgctcttttaaggatacaactatgtcgacttcctatctatatcctctccataaacattaatgtgaaaacataacataccttggattaggatttcctctcactactttctggccatatttccgccagcggtatccatcatccagtatatccacctcactcagagtttgaacaacaacacgtggttccctgataggcttaaccactggagtgacatcaatgcatccgatttccattttcctatttaggcaacattttataggttatttattagaccaaatctacagctcatagctcactaaaaaacatggcacttccttagatgatcatatacctccgctttgagaatggatcatcatcatctgcatcatcactgatcctatttcctgtagcttctacaatgtcatcaattgttgcaataggagattgatctggagtaccatttggctcattagtattagacccctgtccatatatgctagacttgtctgcatcagacaaaagaacgtacgcaatttatactatttatgaaaaaagaaattatgatggagagtgcgagaagagtgaaacaatataactcagaagaaaaaaatccacctaccatcacgaccaattatagatgaaaacttgtcagatctttcttcctggttagacataatactaccagtgttgtatcgcctactgggttgaggtttaggatgatcatgtgtgcccttgtaaacaatctctgttatctgtccatcatgggcacgctcaaatagttttttcacttcacagttaggatgggtacatttgtaatagctacgcggaaattcacttcctttgacatgcttttgtccatacttacgccagttatacccatcttcagaagatatgactgaaggtccatttcccttgtgatcaaattgtgctgtttggacaccagaactagaattgcccctctggtttaattcatctgaatcaccatcagcagaagcaacaacaccacgcgctgctgatgaaaagcccaactcgtttgaattgactgccacctcacttttaactaaagatactgtcccaaatgattggggttgactttggacttgcagagacactgcatttctctgggtatttatttctgcagtaaccttcaataaaaaagaccattaggcaaaaacactgttggcacattcaaaattttcaaacaaatattggaaacgaatagacaacataatcgatgaacttgaaggcctcctcagtatcatcttttttttctttttttttttccagtagcatatttctgcagtgaaaaaaataatgtatgttgtatagatatgtatgagcagcagacatcaactgaggctagcttaattggttgagattcagagtgtgtgtgtgtgtaactgtgaagagggtggggaaacgattaaatcctaagatggttgagtgctcgtttatacaattctttggctctattttgtatcataaaaggaatcctttcaattttctcacatatatgaaagtagacaattatggaattttctattttgtatcataaaaggaaccctttcaattttctctatatacatatatgaaagtaggcaattgagtacccgcggaattttcttaacctgtttcattataagaaagagaataaaccaattaagtagcatttctaaaagaaatttgcatacaaaaataacactcactgtgcttatgcaatgcaaaaacaaagaacacgatccaattaagacatcttgcacattatgtgtttctttatagaactattcaaacagcatctcattagaaaattaccatatttgacagagcatgaggtttaaactcaaaggtacttgaacttttgttatcagaaacattgatattagagtaaaccgtagtggttgaatatgcagcagaaccaacagagccctgcgccatttgaggcttcataaaggtaccagtagttggggaaggttctgcctgcaaaatacattcacaagggaatagaaagtcagaatattcaaaagcatcaccaatctctttcaataaaaaaagcatcaccgatcgatcaatggttacaagcttagaaaataaaattttcagcaaacaactagaataaaaaaaaaaaaaacagctccgttgagggtaagagcaaagaaaatatagacctgtatgatcatattttccacaaagtttctgaattcccagttatactttagcaaactgcttcacatctactcactctcaggaaactctgatactaccctcctgattggggtcgcttaacaagacttaaaacttagctaaccctctaggacaacaacaaaactttagcaggaatagacgaaacaaaatccaatacttcaaacaaagcccatccatgcaaagggaaagaaaaacaaaaatctttacattgattttataaataacctagagcaatagatgttgatcaaataaaaattttgaattcagatgaaatcaatgacgatatcatctgcaatcacagatgatgtccttttatgtgggcgtcatgacccaccacaccatgtccacccctcctcttcataatgatagtggcacactttgacattaacaagttgcattctccctgctgatgcatttattccttattctacttaataaataaattaaaagttttcccgtacgtccactgacatggttaaataaaagaaacaaaaaggccaaagcaccaagaaggccaaaataacaaataaataaatataagtatagaagcagaagattcattatgtgaaaaaacaacactggcatacaaaacaaagagataaaggcttcagattactatcagaaagagacacattccaaaggtattcgatggaacaatctattcgagcataaagtaaagaccccaatactagcaatactctaatatcaagcatcagaatcttagggtcccaggcatgagaagcaaccaccatacatttaaaaataacaaaaaaaaaaccttaaattggtgagagatatcacagtataagcagcaaagaaagatgttgaattatacatctattgtttaatgtttatagacaacaagaaacaaaaatagtaatcagaattttccagctttgcttaaacaatagagcatctttaggttacttataatcaaaaaatcacatcatcattcagcaacatataaattctccactactacaaacgcataccacgcggcgatatcatgggtcagagaaaaagaaaccaaagttaaacggcacaaaacaagttcatacatgcatcccgtttggtcactgagaaagtacaatagaataaaaataaactatttttt

SEQ ID NO: 17729 - DNA, 1252 bp, Cannabis sativa
aaaaaaaaaaaaacaagaaactagggtctctcgacatccttgctacgcccccagggactatgttccaacagcccgaaactcaaaacctaaagccttctctccctctctccctcttatcttgttctttctttggtgcatccctttacttctctcaaatgctttccaggttcaaccaccaatccccaccaccggacgatgttttacaaaccattttggatattaaaaaagtaattatttttttctttgggattttattcattagagctcaaagaacagcttggtgactttagaaaatcattggttgtgatgataacgattttatgtatttgattttaagtggtgatgatttgtttatatcacaatttttctcaagctacatgtaaggattttatatttcgtgcttttgaaaagctgaacaagtcagaatttcaatcttttctatgtatactttggtgcatttgatctgaacaaaatacctgaatacatggtcatacacctaagttaattgctacatgtattattgcatttgatgcttcttatttggcaaatttcgctcaagtatgatctgggcagcaacaacaacaccagcaagttttgaatcaacaactacatttgctccaaactcagtcgcatcaacaatttttcgatcagcaacacctgcatgcatcagccttccttgttgcagcaacaagcacaacagcagcctcgagatgttgcttcttaactcaaagttctagttaagcaaaatggttggaacctcctacaggacgtctgaaactcaatactgatgcaacttttaatgtagctacgaaaacggttggtattgacactatactttgaaagtttgtgggtgcatggcatggttgctacactttcaaaatctgttagggtcattacaaagttgaagaaatgcaggctaaggttatggctttaagtttgtgatggttattagtttggagtttcaagttgattatatgaaatggattctctccttagtgttatggacttcaatctacacagcagcatttcacttcttttcattctcttgaatgctatttcacctttcgtatccaatttcccacgaggacagattccacattttaatagatctgccaatatcaaggctcacttgtttgttaggttcactcttaaggtggatacagatacagatcttatttagttggaagacactctccgtccactaataaatgttatgtaatcttttatatatttttgtaacataccttactct

SEQ ID NO: 17730 - DNA, 2817 bp, Cannabis sativa
acggcgttccaaacgagccctttacaatctattcaatattcttttttcatatttgtttgaaagggattctttcatctctctagggtaaatgtatattgtttcaactaagtatttaggatttaaattacattttggtctatttttaataattaccacacaatgaaataattgttattgccatttttttcaacttgactatttctttttgcaggttcacttttgactattatcatacgcgttttttatttagtatttattttttccgaataaatattgcttattaatagatatgcaacttgagaaattatcttatctcttcatcctatgtgtcataaatgagtacacatggaaaatgttattccaattacttcagtggaaattgagaagcgatagagatagtgtactgtacttggtaaacttaattagcaacactatcataataaaattaaggcatacaaaaaaaaaaaaataacaataaattaaaaacaaaatttaaggcatacaaaaatcgtgggaagatgatttttaatcaaatacagcatgcctataacttccagtcttccgtaccatatttcattttttaaataaatccattattttaaaccaaaactgaaaaagtacacaaataaaaaacacacttttggctggcctctaggccgttcaaataggtttatatattaaccacatttaaatacctttgggtccacttggatacttcgaccatattgatttccttggtttagagaattcaaagaaaaaaagaagagaaacagaaggccaatattctgacattttgtgtatttaggttaggattaggacaaaagaaaaatcccacaatgtgctgcccagattagcattaatgattactagaaaaagctttgagactcctttaatcaaggctttcctaaagagatagagattgtgagagatggcaggacgagtaagagtttttttttttaaaaaaaaactgacgagtaacagttgaaactagaaagtagtggaaacattatggtcaaagtaagcgagctgaggttttaggcaaaacttttatcacacaatttattagaactctcctccttcccaattcccaaacaagaacaagttgttgcttgcttggtctggttgctagaatagatcaatagaaagataaattaacattgttccaatatttaattaattaattaataatagacgaaaaatatatatacatagtcaaaaatagtgcgttaaagtacttcatcccccattgcccaaaactagtcataatcaatctaatcggtcggggaagtgagaagaaaaaacacaatatccctctcctttcccatcccatctccactttttcaaccccaaaaacaattttaaataaatccctcccaaaatcttaggcggtgtaatgctcagctacccaataccaaatattttcatttgtactattgacagattcattctctctctcatgtgtggtgtgtgggccacactttagctccaaccagcggcgccattagtctttacttggtttccaagctcacccacctctctctttctttcactctctctctctctctcatctttaaaaactacatcctcatccccattataataatatttaaaaggaaaaatctttatttattttgatatttatcaccttctctttcattccccccatccctttttctcctgtccacctcttaagcccatcctttcatctctcattctttctcctcctccttctgctactcttctactacaacctctccaaacccaaaccaacctcaacttgttcttgttttttttttcagtctctattattaatattaataatattatttttaattattattattattgatattatttttaattattattattattattattattattattgttcgcaacacaactccctaccataacgtccctattccattcttctcaggctactaaccaaccaatcatattatatttgtattaaaaaattaagagattaaaaaccaaaaaaaaaaaaaatgaaaggagagtatgcagaacagcagcagcagcaacaccatcaccaccaccatcaaccaaaaagcaatgaagctcacaacatgttctcaaagcttcaccactctcatcatcaccaccatcaccaacaccaacaccaccaccaacaacaacttcatccttttggaaaccctttacctttccagataactccaacaagggaatgccaaacttccgaagaagatgacaccagccgcagcagcagcggcgccgccgcaactgcccagagacccaacaacaggtccctttccgatgtcaaccaccccggcgacggagcctccatagaggtcgtcaggaggccaaggggtcgtccgcctggctccaaaaataagcccaagactcctgtcgtcgtaacgcgtgataccgagccagctatgagtccgtacattctggaggtccccggcggaaacgacatcgtcgaggccattgctcgattctgtcgtcggaagaatatgggtctctgtgtactcaccggatcgggaacagtcgctaacgtcactctccgtcaaccctcgaccactcccggagccaccgttaccttccacggacgatttgacatactttccatcactgccaccttcgttgctcaaacgtcgccgtcttgccctatccccagcggctttactatctccctcgctggtccccagggtcagattgtcggcggactggtatccggtgcgcttatcgctgctggaaccgtctacgttgtcggagcttcgtttaacaacccgtcttatcaccggcttccggcggacgatgaggttcggaact

SEQ ID NO: 17731 - DNA, 7962 bp, Cannabis sativa
  modified_base (3580)..(3588): a, c, t, g, unknown or other
  modified_base (5647)..(5647): a, c, t, g, unknown or other
  modified_base (7816)..(7838): a, c, t, g, unknown or other
atccagcggggcggggcggggcagatccttatatgatctggatcaggtcggatcagatccgacccgccccattgacattcctatttttgacgtggtgatcagagtcactcatgaataataatgcagcaatccacaatcggcggcggaacctcctcgaaccaggatagctcattatctaaccgaaggacatgtttgtcaaaccatgagctgaacaattcttatcgcgagccacatgagataaaactgcccccaaaaatttagaaaataaagctataacatcctcaaataacacccccaactcattagaaaatatccttcctttgttgatagctattaccagagaaaataaatttgaataaacttttctaattgaaattttgcacgaatgagcccaattaagtcctaccaaagagccaaagtttcggcttgtagtactgaaatactacctgaaaaaaaaaaaaaagccaaaaaataataggtattagaaaagacaatctttgaattaaaaataataggctagattcagattaaaacacctaactgaaatagtctaaaactcaactacaaaaagagaacaaaaacccaactaaaacctaaggagaactggccaaagatgttaccctttggctagtagcaacaaagaactcaaaacaaaaacacaaaaactcaaaagaagaaaacctatagacaaaacgtaaccaactcaaacaaaacagtaaaaaaagaacttgtaacaagcaaaacagtaaccacagtgtgaaaaacagaaaaagaagacaaaataaattgcctaataaactacaacaaataactagaaattagtagaaacactcgaataactaaaataagactaaaaacgaaaataaaatacaacttaattaaacaaaacacaaaccaaaataaagaatcaaaaaatcgtaggaaaactagtatcgaacttcaaaatttgatacaatattaatcaagatctaaagcaccaatggctaacttaatattctaataaattagcacattttaacacctcaaaactcaaaaatttgtttctgattaatcttaatgctatcaaaataaaagaaaaagattattaaatacttgtacaaaaatctatcaaaattgccttaaaattaaccacatgtccaacatttgagaggcttgcataatattgacctgatcagaggcagagccaaatgtgatcatgtgggggcacatgaccccactcaacttattaccaatttatattttgtaaaataaattttaattatttttacttttgcccccacaaattttttatttttaatatttgttcttatataatttataatttttatttttatctttgtaaattttcttcttcatctctataaaatttgcatttattttctaataacaattatattttcattaatattttttaacaaaaaaattgcccccctaacaaagctggctggctctaccactggacctgatcctattatcttttgataggataatagtccctaagccaactaagcttgtagaactcaacactgatgcatcaacaataaatattgtgtgaaaattttcttctagtacacttctaggtaaatcgattgaacaactcccaatcatcaagtttggatactattcttggaaccttcatatgctgataagatagactcataataactggctatccaatgaacaatctgttgtagttgtcttagttgttgtccgtgaataattttatttctctcagtttatattgccaatgcattaataattattttttcaaaagattctctttctaccacttcagatgcataaagtagcacatttttaaaattaattacctctttcactttatgacaaagtgaaattcaggaacttctaaatttcttgtgaaaagagacaccaaaatatagcatgagcattcgacttacctccaaaaccacatagttcacaaaaattgtttgtgactatattttttctgttcaaaccattaccagtaggtaagattttatgaaaacctctccacgaaaaatgaaaaaatttattggaagttttcaccataataagatagttctattcacattgtgttttacattattatctatttgatttctatttatttaaaaaattactatttgtgtgttgtagaaacgttaaagaatttttatataaaatattgtattttttttttcaaactttacatttatattgtggtaagagatttttttatatttatactatttataccttatttttttttttcatttttactattcttttatttatttcaacttctataattttttttctcctctcttctctctttctttcttcttcttattcaatgctggccttttttttaatctctctttttgaccttattttttctcctctaatttttttttatctttttatatatatatatatataaatataaatataataagtataactcattacatcttttttatttgagtaaatactattttagactctgtattttaccaaaattaccaattggactctttgttttgttaaatgataaaatggacactgtatttttcaaaattgtacaaataggaccctgaactggtttttcgtcaaaataaaacttaataataatccgatctagagatgttatgacaaaactagttacattttctgtatctgttcgtgttagaaattatcgtaaagttgattatattaaaaaataaaattgttgaaaattgagctcacggtcttatttttaccatttaacaaaacaaagagtctattttgtcatttaataaaacagagggtccaattactaacttttgcaaaacacagggtctaaaatagtatttttcttttttttttttaatatgtttcactctcacaatgtgccttcttcctccttgtcactatccatttataatttgaatccttgcaagttgcgtaaaatgcatcggtgccaaacttcctcaccatgagtactcaaaattcattttcaatgcaaaccttcccactatatttttcaattcagtcttgtttatgtacaacttaccaacatgtatttttcctgaaggcgtaccactaagagaagttgtataaatattattttcctccatgaattcccttatccacacaataggtttgaattttgtacaaactttaaaatcagatggtacagcaatacgaataggacctggccgactgctactagtgctcggtgtttaatgattttcactacaaggggttcttttttcttgctctgtcctctaactccttggcagtagtggaggtagttataacctcaaagcagaaacctctacaacttcatcaacttgcaactctacatcatcatcctcgttcaaatctaaaacaggatcatttttgtaaaaaggagtatcaaactcatcaaactggttacgtgcattgtcaacctgtcctcatctatattagtaggggtctgctcattcaaatataccgctggatctatttctagaacaaaacttccaacaacacttcttgggagaatagttggaggagtaggccccaaaatcgcatgtctcttaaccttagtcacatacagtggcagcaagttctccacacnnnnnnnnnccttcattcttaagaacaatcttacctgactatctttcactaaaatctccggcagtatcatattgcctttcatgtacatgtaacacacctctactttcagtttgtacacaagagggtctatatccaactcttcatacaaattttcctgcatcttctataaagtagtgtcaacctcaaatattaacatcttgcttttgcgttattaaatatccagttgaaaccttcaactgcccaagcctcatcataaagttcaactacaaatacagttgaatctgtaaaaaaagaaagaaaaaccttagttaacaaaaatatgtcgagaaatatcacaagtgatatcatgaaatgttgatacatttgtcgccacatatcgcaacatgtcgataaatagcactccctaattcaccaatatgtaactcaaacaatatcaacaaatatcgcaaaaaatgtcaacaaacatcgcaaccatcgtagttagaaaacatagaattaacacgtcgtaaatatagttgcaacttgttgcgaaatatcgttaaaattcatccctcgcaatcagtatgctctaatgtcgctacatattgtaaaacatgttgccaaatatcgttaaaagctattcctaacattcagtatgctctaatatcgctaaatatcgtgaaaagtatcgaaaaatgttgctaaaatacgtaaaaaaaaactaaaaaatgtagaattcctagaagctcgagtttcaagaacaatacaacaaaaataaaaagattgatatatgtagatctattcatttcaacgtatacaactaaaaataacttaatccaacaataaatactaaataaattgcatacctattattttttttaagaatggtgctctgtcaaatgattatctggcaaatgaagaatccggcaagtgtgtgtgtgtgtgtgggtgagtttgtagagataaaaagagagtgaagggaatttaaggaaaagggattgggttttagttttgttatttgaggggtaaaattggtggtcaaaaaatgaagtagtatattttatttgatgttttagagaggagtatataattagaacatgtatttattttaagcatgcattgtcaaatttctcttttattatatatatgtgcatttattttgttatttttatgttatgttttagttatttttaagtggttttcataattttttttttgttcacagttatttttttatccatgtgtattttttatgttgtatatttttagtttattccagatttttttttgttgtatgtatattattttgtaaatgtagatacatatatttattttttttttgacaccttttttagaaatacaatgataattttttttgttttttaattgatacaatgtacactagtagatattgacatattaaaattatattgttatctatttaattttttattgttttaattatatattacctattatatcatataccccattttaaaatcataaaatttattatttctattattaatttaactatttatttaacttttaaaaaataaatcgttattttaactgtcactaactcaaaaaagaataaaaaaaagttgaaagtatgaagttttaataacaaatttcatgaaaaaaataatatagtagtataaaaagataaatcaagttatcaaaattaagtaaaaaaagaatttcgtaatacaaatacatgttgaggagttgataatgttatgcatattgtaacgagatcgatgtcttgttatttctctttgttgctttgtagccatctttttcttattttatagttgttttcatgttattattaaggtgttacacatttgttttttagatatcatagttatttttgtattttactaaaacacaatattttttaagaatggagtatagtaaaaatataaaaaaaaaatatgatagttgttgacctcgcttttagccaacgacattgagtcaattaataagcgattaagaatgtaattaagacagagcaaaaatcagtaaacaataaagaacacaagattttttaaagaggttcgttccctttagttcggtaatagcctantccccttagattgtattgacttgagaacaaagaacacagtgtttcctctctcaaagctctcacaatgaaatctctgagtattctctcttatatctctctctaaagagattctttggaccccttttacaatgatgctagatcactatttatagggctcaatgcatgagggaaggtttcccttttgcttacaatatctataattggtaagaacatacattacatatttagaatacatgaaatgggagattgaaacagcttgccatatccctttgatataatcccatgattataggaattgcttttgtgcttgagcttcacgatatcagccttggaatgattaagtcttgatacatggctcagatcactttttgctcgggtcatctacccttgccctgctcggtcaagcaggctttgtgtgtgcagatgtattactcgaagtctgttcgaaacatttctccagcaaagtgtaaagaatagatgacacgtgtcactagtacatagtgccacatcataatgcaaaaaatgggataacattttccccccaagtctgcacgagatttccgaagtcgcgcgtagacttcacttagtttgaattcatgtttgaataggtggcacgtgttcgatacgtctgttggtaatttgatgtgattctaaccaaagatctcttcaatattcgctcataaatgctaatcaatttgtacctcgaaatcctctagagatttgcatgcttttgacggtttctcttcttcaggtacttgattacttgattttccaacgtatacttttgagaggaaatcgaggcatttaaatttcaaaatgattacaatccttcactaattttcttataaatagagcaaaaagtcctaataaaccacttttagcatcttcttacttggacgatttcagagtaagaacaccttttttttctctcaaatccttcaaagaatttcgagaaagtgccaatcagcatcattcgaacaacctcaaagcttcgaacagtgagtaagttcttcatcttttcctcctttaatatttgaatctttgattttctgtatttcatttttagaaaatttgatagtcttgaacttgttctaggaaaaccgtagagaatctagatttaggaataagagattttgaatgtaatcgaccgtataacttgattgtaattgcattctgactttaatttcacaaaattcgggtttcacttgcccattcggggtttagtgaaaactaactcttaatctgaagtcttgaaattttggggtaaacctaaatcatgtaaaatttctccttttaatcctttggtcggacctggtgggtatactttatttgtttttgttcgatatcccggccaaacactcatctcgtgtcctaccttttgtagatgaaccctggtgagttttggggaggagaacatcgtatcgactaggatcttctccaacttctgtggaccaacctcgtctctgcgttagtccgtcctcattaagtgacggtctctctaattcaaaaatcaaaatcaaaattacacaaaataattttgataattagatttgaaatttctaaacaagtgacggtctttctaattcaaaaataattttattctgataattagatttgaaatttgaaaaataaaaataaaaataccaaattacacaaaaaattcaaaattaattccatgaaaaatcatgaagaaatgaagaaattggaaaaaattgcataccatccacgcacgtgctaagcggaggctggccgagatttcacgcacaagaaggctgctaggagcattcctgcacgcgcatggccccgttttctgacaaattttgcccacctgaccaagaaaactcggacataaggcttgtccgaagccgcgtgcactcgagaaacacaggcatctgcgcgcgcatggaggtgtcacacctcttgattttttttttatttttaaaaaaaatcataactaattcaaataaaatcgaaatcaagttctgtaaaaaaaaatgaattgcttaatcttttccatactatccaagaaaaatatttccagaataaaattctaattattttacgtaaaaaatttgcaaacatcaatcaaataaacacatagatcaacatgaatcacatccaaatcatacatacatcgttttaaatctaaatttcttgaaagtaaatcannnnnnnnnnnnnnnnnnnnnnntgttggaatatattttaccagaacctatatttactaacaaatatctttttaacatcctaaatatgaatttctaaaacgatgaaaataaacacatataaactatgagaaaccttacattggttgc

SEQ ID NO: 17732 - DNA, 7400 bp, Cannabis sativa
aaaaaattgtcgttgaaatttcgtactctgttcttgatctgtatgctccttaatttgaagtggtttggggaatcttgttgagtttgaaatggttttcaagtggttgattcttaaaagagaattttggtgttggatcgtttgattttgtgcaggcgactatttattgaagaagataagggacttgggttttttggttatttgatggtttttactctcggctgattatctgttgcgaatgatccaagaattttatcaactgtggggtttgtagaggagaaacctgagcttatagaaagtgatagatttttttcttatgaagttttgattttgcatgagactgaaagaggaaggatcacatgggtaatttactttgatactggagcgattatttattatgattttttacctttaatctattgaacgtaatttgctcaaatcttatttatttaattttttatttgaaagggtgttttgattgaagaaatggagaaataaatttatgtgaagattttgggtacagatccacttttatgcatgttcttgatttgtgggctgaagggtgaaggggccacttaacagctcagtagataagaagtgttttttttaatggctctaaataagtctgacaagttgtttgatcccatgatcaatgagtttcatggcccatcaggtcgttggatcgagcaagaatcaaacccagtttcaactttgggaaagaatatgaataacaacgtgtcagtgcagactggggaggagttttccaaggtgtttcttcaggatcgtcttccagctagaagggttgcatctgtcactgatactgttcaggagcgtgaaaaaagggttgggtttattggttatgagaactctttgccgggttatgaggatctttctcgtgtccttggattgacgagaatggattctgagaatgcttctgaaacacctgactttgtgtctgcaaaagggtctttgagagagattgatgttgaagcttatgctgatagattgaacagaaacaataagaaggagaatggtgagactggtcatggtggtttaaggaaggttgttagtgatcagaattgtgataggactggcggtgtcactgttataccaagttacaaatctgagtctcctagttcaaataatttcaatggatcagaagtattagatggctctcagtcagggaagataaagtttctctgcagttttggtgggaaaatcttgccgagacccagtgatggtagactcagatatgttggtggagagacacgtattgtatctatcagtaaaaatattttatgggatgagcttgtgaagagaacttctagcatctgcaaccaacctcacggcataaagtaccagcttccaggtgaggatcttgatgctcttatttctgtatcttctgatgaggatcttcaaaatatgatagaggagtaccatgggattgaaaagcaagatggttctcaaaggcttcgaatctttttgattccattgggtgaatctgaaggcacatcttctctggatgcaagcaccataaaggacaataatcctgactaccaatacgttgcggctgttaatggcatggtagatcctgtttctttgaaaagtgttggagggcagagtttggcaagtgaagcaaatcagctgggagttaagaattccccatttacattggaaactaacattgattccactgccttgcatgatagcaagtattcagaatcccagaagataaatgtatctccaacacattctcctccattctctcccattcaatgtcatcaagactccaaaagtgctaagatacaagcacaaagtaatactgcttgtgtaaatccttcaccagagggtgtgaatttgatgatgtatgatcagcctactgtctcacactcagaacaactgcatggtggacattttcaagaccacgatttcatgaatggttttactagtccaatagctgctgatcgaaatgatggtgattttgttggattctctcatgacaggccaatctctaaggaaagggtatttcattctgaaaaaccgggctcacgcctagatgatcctaccggtctattatcagactgttctgatcctcatctgggaatgtcacatgcattttctgattcacaattgcaagagagtggaaggaggtctgcatactgctcgcaagaaggaacgagtccatcatcccccttgtcttttgcaaaggctcagttgtctttgcaactaaattcaggtaccttgcaagaaaatccatcccaactgcatgacaatattaatgttaataatcctcaggtacaaaagaacttgttggatagcgagtctgttgcagttcaaagaataattttgccaaatttttctttgtcttcagaactaatggcttgtaatgaagctcatcctaagtgtggtactggtgatattgacggtaatctccttacggttaaagatgagattggcagctctaatttttccatgccgaaccagtgtgagaaagattccctgaatccaataacattgaaaacgattgatgcaaagaatccattcgaggatcaatatggacagctttatggtgggagtccagctgttcttgcagtagactgtaagaatgaattggacagtacaaacccagtccaagacccactttttactattggctctcaagagagaactccatcatcttcatccgttggcttgatacctttggttgacgatttggtggtgcctcccaaaaacaatcatcattgtgaccaaaacatcgctgaactcttcagcatgagccagacatcttctaatgatcataaaaatgctttgattgggacagcagatgttcaaggaaataatgtttttggaacaaataattatgatgcttcaagattatttccaggtgccaagcaacactatccgaaggaggatcctttgggtgatcttttggctggcttttcagttgatccagtactacgtgagcctgcacaacctgctcctagtgatatgagttctgaacccaggttgataagtcctgtaaatatataccaattgccaccagttcatggtgaccctattataagctctaatttgcaaaagagtaaccagataacgttgcagaatcctacccagggcactgcagttaaccaagaggtttctctcctggatgtcgattttataagctatcccaatgagaattttgaaaagattaatttctacccgggccaaaattttgaaaagattaattttggagattctactgatgtggaatctaattctgaaggcatcaaattgacacaaacagaaccaacaggaaatgacaacaatcaggcgtcgtcaatggctcaatatcttatgggtgaaaccgttgttgacgattctcctactgcaacagaggtggatagcattgttccagaatctgaatctgaggtgaatttgaatttatacatttggggtcttttaattgggaatgggaaattataaaaacaggaatctatttctagtcaagttatgatttagatgatttcttttctgcttacaggatggtaaagctgatgaagacagaaatgatttatttagtgatgcaatgattgctgaaatggaagcaagcatatatggattgcaggttttcatcaatttctcacttctgtatttgactaagcatgagttttcttgtttattacatcgccactgtatcttatagtactgagtaaatgtacatggtttctgataggaacttctgtaaaccaacatatagatgtaaaaatttctgtcttgttgctaaaaattatattgattcacttgtgaaaattcagcaactagttgatttctttttgagtttttggttgtcaattagttatagtactccttcctgttacatttatttgttctatgtctgatgctcctactgaatgagtgcccaaattcaaatgtacagattataagaaattctgatcttgaagaactgcgagagttaggatctggtacatatggtactgtttttcatggaaaatggcggggaactgatgttgcgataaagagaattaaaaagagctgctttgctggaagatcgtccgagcaagaacgcctggtgagtctcctaattttatgttttgcatctttttatctctcttattatatccatttcatcccttctctaccctctaatgcaaggcagtttcgttgagatgtgaaaatgaaagtttagcattaaggttttaggaattttatagtaattgaggtgagttataagtgtagctatatatatgtatcacaaaaaagggaaaatttatttgattatatgtgtagatgtacacatatatttgcaatctgtttcatttgtttagtttttatctcaatttgcttgtcatttaacccatatgtgaagctgaaattatttctcatgtcataccagacaaaagacttctggagagaggcgcaaatcctctcaaaccttcaccatccaaatgtgcttgcgttttatggggtagtaccagatggagctggtggaacactggcaacggtaacagaatttatggtgaatgggtcacttaggcatgtccttctaaagaaggataggtaaattttctttgtttgtttcacttcactttatattctttggcatagttatttatatgttaacttttttcttcttttggaacactgaataggtcactcgatcgacgtagaaagctcattattgccatggatgcagctttcggcatggagtacttgcattcaaagaatattgtccattttgatttaaaatgcgataacctgttagtcaacctcagggacccccatcgacccatatgcaaggtaattaaaaacctaattgtcatgtctaaacaaagatggaagtgtgtgcaaactgtactcaactactcatataattagtattttattttctcaaatttttcgtttgattccaagggccatgaaaaggatttagaagaaatcaattttcattgaaaaaatatatatatatatatattttacactacaaaattccctggggatatttaggctgaaatagattcaagggaaacattttctccattatttgtgatgtatgacgtggctaccagataggagccatatcttgatgattctaaggatgttttatttttattttttgttagtttcccagttactggttgaatgtctctgattcctgagtatctgtttttttttaggttggagattttggattgtcaagaatcaaacgcaatactctagtatctggtggtgtgcgaggaacccttccatggatggcaccagaactattgaacggtagcagtagccgggtttctgagaaggtgggtagcaatttgttatgtatgctattagtgtagaagaatgatataaatagtccagtaaaacaactgactaactgtgttgacttttgttaggttgatgttttctcctttggcatttctatgtgggagatattgaccggggaggaaccatatgccaatatgcactgtggtgcaatcattggtaagttaataaatgctataggtagtcctaaatgttgaactagcatggttttaaactgattatgaaatcaaaatccatgtagtttctcaaattacatgactataaaaggatatgctttctaattaatcttctataacaagtccttgaaagtgtgtacagtggaataaagaccattaattttagtttgttgaagaaacttataaacttcattattagtagccatttcccttttagattcattaattatttgaaaggtgttgaatagagggttaacagtgattagcaatctaatacaccatgacaaatttgtattcctaggactcggtagttttgttagcttgttcatatcctttacattcctaatcaacagtatgcttattttcattgcgaaatctctctaaaattatgttacctgcttctgaagggggcattgtgaagaacactcttcggccaccgattccagagcgttgtgatcccgactggaggaggctgatggaagaatgctggtcaccagagcctgaataccggccatcatttaccgagataactaacaggctgcggtccatgtcaatagcgctgcaggcaaaggcacaaagcaatccggcaaaagtgcctatcagccctcgacctcgtgaataaaacagtaaatatatatataaaaaaaagcacagaactttgattcttcaaatagtgagtctggtcaggtacacactcccaccattgaagccagccaacccattgattcgggttgcggatcaaaaatttgtaggtgaccattcttgcagtttgatatcagatgttgtttttcttcttctttctcttgttgataaaagaagatatatatgttcatttttttattctttgttcacacaaaaaaacatcagagcagaaaagagtagtagcagcagcaacaggtaaatgccaagagactttctcttcaattttcttagtttactgagttttttttttttttttgctggaagaatccgtacacgtccatatgtacatatatacactgaaaagcataagattattgttactattatatattctctgctttgaagaaggttttgctctctatatttatttgttttcttttgaaatgaatttctcattagaatttgttaatattataattattttatttatattttatttataatgtttttataatgttttttttttaaaaaaaattatataattaaataattgaatatcttagatgaggaatggcttttatttttggatttgaggtgtggtcctaagttagtcttagacataaaaagtcaaattttcatcttgactaacactacaactaccgaccatttgttgttttgtcatattgttattttctgagaaggaactaccgaccatttgtactattagagcacttgctaaggtatacttggtctagtctaaggctagagataaaaaaaatctttgtagaaataaatatttatataataaggctctaaaattttgagtttgtaaccatagagtctataatttttttattttttttttatttaagcatttacatgtaatgtataagttgagattccaattcaagatcttcaatatatatgcattcttatagtcacttgagttaatctcaagtagttatttatgtatctaatgttagtaaaatataatttttgtttaattttataagtataaattctgttagtgttttaaaaaatatacatataacaattaaattttaaattatcaagcttaataaaaatatgtaacttgagttatttttaaattttcttgttaagaaaacttgaataaaaaaatataattttaataccattagttaaactccaatatctatttggcaagaaaaccactactagtatcatcaaatgtggtaggtccggtggtcaaggtggtgataagtgtatttggaccaaaaaaac

SEQ ID NO: 17733 - DNA, 3605 bp, Cannabis sativa
ctctctctctctctctcttttgttggtgggtgggttggggtggtgggggtaatatacattaatgtgttaaaatatttgtgcgagtgtacggaaagatgatggaatagtttttatatctccagaaatctcccaaagtttatgcagtttgacatctaaagaaatttatgaaatcttcttcctttgatttgggattggactgtaatattgttggtactttagacttagatctgcaggtgtagggtacatataaattttgaccctttggaagttttccactaaagcttatttcctcgccaaaagcacatatgattgatggtagaaataactgttttgttgtaagttttcttaagaagaattaaactgtcctctctgcaattttaggtacacacatgcattataatagctatttgaaccactttgaacttgattagaggttcccaacatgagtgctgtcgttagtggactttcaacaaaataattaagacttagttatccttgcttataatacgtacttgtgatttataaacagaaaaattttaggattctagccctaatttgttcggtaaatattaaataatactgattctggatctgcagatggcaaatggcctgacttaatgtaatttgacctgctgtgcaggaggtggatccatgtgaggacttgactgatgatgacattcgaactgccattcaaaatgcaactggtcctaaatctgcattgtttgtgccagaagtatgttttcttcgttttcctcttctatttggatatctccagtaaattaatatatcttttattttatttgccatcctctaatttattctattatgtgctgtttgagcattttgtgaaacctttgtatgcataggtgccttttgaagtacttattaggaggcaaattgctcgtttgttagatccaagtcttcaatgtgccaggttcatatatgacgagttggtgaaggttgtctacttccatacaaattgtctctctacttccatacttctttggtttgattctcgactaacaattttttattttcagattagtcatcattgcttagtaaatgagttgcaacgattccctgttttgagaaagcagatggatgaagttataggaaacttcttgcatgaaggccttgagccttcagagacaatgattggacacataattgagatggaggtatggttttatctgacataataatattttgaattgacataatcataaccataatcatgattagtaatggtacataaaaattaattatgcttcaaaattggattcttctgacaaaggaaaggaaaaatataatccctgttggccttttgcaaattttttcattcaattctcatctatatttttagaagaattgctgttaaacattattagtaactaatttgcagatggactacataaatacttcccatccaaactttattggtgggagtaaagccgttgaggttgccttacaacaggtgaagtcctctcgggtaacactgccgattggtaggctgaaggtatatgcatcccttattcataataatcgcgaccaatgtgtgtttgcatattgttgtaataagctttttacttgctcttccctacatttttcatcaaacaggatggtgtggaacctgataaggcaccagcatctgaaagaagtctgaaatctcgaggaattcttgctagacaagcaaatgggatagtgtctgatcaggtagagttgagttttttttgttggtaaacagaattgtagtctctcaccccaattcacatgattcatattttgagttgctggcatatgtagtttcaattgtacttacaatttatataatcagattagattgatatttgttactactaatttagtctaattgatgtttttattctctttggagtttggattatgagcaggttgttcgaccagcacctgatagtgacaaagttgcacccggtaagatattacattatagttttataaggttttttttggtttatttttaattatatacatatccttagaatttagatattgtttcacacttcgcaacaaattatgggcctgtttacttttggctttacttatacgcaatagaagtagtgaagctaaagttcatatacgtacaaatatatatgtatatatacgtttatattttgttattgtatatggattgtctattttagaataattttcaactcacaaaaagaaaaagttatgtgtgcatatacatttttttttcttcgattagaataaggataaattagaagttcgttatcagaaataaatcaaataggaaatattaaatttcattaaaacttatcagtgtcttgttttgtcaaaggactttcgttgacaaaccagacactattttcttagtcaggagcttcacatatatatatgactttcgaaaattcatcccaacacgcctaaataatgctgtgttcatgcctaaaagtgtgaactttttgttgtacaaaagaataaagttatatatcaacatgcaattttctgagaaaagagttagtatttatgcagataaacatcaaatggaatatacccaacgtcattgttgcagttagatttatttttttctttttagaaaaaaaaaaagtcgacacaagtctatagaatggatatttatactcaacatcattgttgcagttagatttatttttttctttttagaaaaaaaaagtctcgacaagtctatagaatggatatttatactcactctcgtctctaatctgcctagattttctaaggatatttttgattgtatagggtgttgtctcctttttttcttctgttgttgcataaattgtactcgagtgaaattggtatcctagtatccgatgcatctattgataattgcaggaaaccctagcagttcaacgtggggtatttcatctatttttggtggaggtgaaagccgtagtacacctgctaaagagagcacaacaatcaatattttcaatgaacctattcgcaacatggagcaaaccttatcaatgatccacttaagagaggtattacctcttgcttctaatttgccttcactaatttttcccccttacataaattaaaaattcttcttttttccccctgttaagcctccaactgtcttgaggccttcggaaacccattcagaggaggagactaatgaaattgcaatcacaaaactactgttgagatcgtactatgacattgttaggaagaatattgaagactttgtgcctaaagcaatcatgcatttcctggtaacattttatttctgtgtataagcttagtcatcttatacttctttgcagcctttttcatactattgaaactcacaagattggttgtttggattaactggattccaggtggaaatctgttttcattaatatggaatttttctcaatgtatcttagactttgctatttgttttgttctaaacccttcaagcatacttatgcaaccttgtgttttttggctgcatatatccgtgcttgcatctgcatcggcaataaaatggctgtttgtatcaaactatcttgcatatttgtgttcaatttcttttatatttatcttgcaatataatacatgactgctcttttgtggtttac

SEQ ID NO: 17734 - DNA, 5242 bp, Cannabis sativa
acacgatctcgatttggactcggatccataatcggacttagacctcaacccaaactttgaaccccgaactgaaattggacccctaacccttaaactggacctgacttgaacctagacctgaatctggactaggaccccaaatgaggacccaaacctagaatttggaccttagctttagagccgaattaggtcatcgacccaacttaaataaaatcaataataaaaataaaaataaaatttacagaacacgtttttattttttttataattaaaaaaatataaaaacaaaatattatctttatatgttatcaataaaaggctaatttggggatgttattattaataaaaagaaacaaacttatccccttaggagttacgacaagaataacaatgtcgtttaaaggaattgtggtttcagacacgtttaatggccgacaaaagattggacagcttacaaggaatccatactccgccgccacgtgtggttcgtcaacacctgccaccgccactttccgaccgttttatccctataataatataatttaaaacgaaagataaaagattctccttaacaataataatatttatgtccaaaaagatattgttaactaattaatgcaaaacattaaatatggttccttcgtctgtcccttttgccatcagattagtttcaaatttgcaaaaatatcatgttttttatgaacaatactacaacttgagagggcccatcaaataagtttacccaggtaccatgagaattttcatttttaatggtttttgtatttaataataatttgatgccatcatcctaatatgaaatgagtcagatgaagttgacatgagatgaggtttcattgagatctttttcttttggtctttataccggataagatttgtggtgtaggattgatagtgattttcaggtttgatttttatggattctagtggtttcagagattttcgtgccaagttgtgagttgtgaaaccttgtcttcttctaagttattctctctttgatagacaagtttgatcggtgatgactcatgcatgactcatgattttatttctattcaacccaaaactatttatatatatgtctttgtatggttttgtgcaacttgcacgatttaaagagctagttgtttcattattgaacatgtttttttgttttgtttaaaggggtcttgctcgatatttttttggggtctctttcactacttgagttaattttgaaaagagcgacaacttcagttcaacataggcttgttgtaccagaagcaaggaagaaagagagagagagatgatgatgatgatggaagaaaagaaagagggtgagtttctaacagtgccaccctttgagtgtgcttggccaaaggacttgaaattcagggaagctggtcgtggttgtgtggcttttgaagcttttgctcggaatgatgtgacactggtgttccgggagaatgtgggaagtcaacactatcattacaaaagagataacagtcctcattatactgttatattgggtagtcataggaataggaggttgaagattgaggtggatgggaaatctgttgttgatgtggagggagttgggttatgttcttctgcttttcagagttattggattagtatttatgatgggttgattagtattggtaaaggtaggtacccttttcagaatattgtgtttcaatggttagacactaaccccaattgtagtgttcgttatgtggggctgagtagttgggataaacatgttggttatagaaatgtcattgtattaccattaatgcaccaaaaccatttatctttgtggaaacatgtggatgtgggttatggtggtgactatatacatgaggagtgtggccaagaagagttggaagatgaactctcagcttatgataaatggggccttcaaaactttttggagagttgggacttgtctgatgtctcatttattgttggtatggaggaaaggcctgttcctgctcacaaggttatcttgtcatcttctggtcattttcctttaacttcacctgatggggtgatagcccttaaaggggtaacctatcctgttctgcactctctccttgaatacatctacaaaggcagaacccaggtacacattttttctttgacaaaatactataaaagttcaaactttttcaaagttctaatactagtgtgtgcttggtgtagattctagagtcccaacttgcttcactgatgattctaagcctggaatttgaagtaatgacattggtaaagcaatgtgaagagatcatacaacagtttaaaatcaatgacaagttatttgattcgggcaagagagttgaattatcatatccaaacacttcaccacattgctacagagccttcccttttggacttgctgttgataagaagaggcttaaacagctgtattcaagtggcgagtacagtgatgtagacatatatattgaaggaggtggccttgtttcccagccacataaaattattctaagtttatggagtgttccatttgcaaaggtggtcatttcatcatgatcccttatgctaattatgttgttacattgttactttcatggactgactgatgcaattgatgatgttgtttctgtaaactggcagatgttcacaaatggaatgagtgaaaccaattcctcaagagttgttctaagagatgtatcccccaaagcgttcgagggtatgctcgattttatgtatagcggggaagttaatttggaaaacaccatggaatctggtgccatgttactacaaatgctattattgtctgatcaatttggagtcactctcctccatcaagaatgctgcaaaatacttttagaatgcctttcggaggtagttttgccatgccaatccaatccaattttagcttgtgatcatactgagtaagctggtttgtttgactagaatttaaagaagggagaagtgacctgcggtttggtgacttttgaaaaacaaaaagaagaaccattttgaaataacgaactatgaaatattgatacgtctcgtgttacatattaaatgcaggaatgaatggagttctcctagtggaagaagatcatacactactggaaatttttgtattatgcacaacttttatggacgtggaagaagaacagttttggcaaagtaattgagacttggtacatataaggctaacctttgaactttgttgcaggacacagtatgtccaatactccaggcagtttcatcaattccgtcgtgtaaactcatcgaagaaacttgcgagaggaacttttccatgcatttcgactattgtacaaccgcgagcattgacttcatcttcttagaagaggcgaattttagcaatatcatacgggtatgtccactataacagatcacattagatttgactgtaacatctgaagaaaaagttatggtcttgcacttgcagcatccagatttgactgtaacatctgaagaaaaagttcttgatgcaatcttaatgtggggtatgaaagcgaagaacgcatatggatgggaggtggtggatgagctgatgatatattcgacgcctgaacttctcttcggggagagactagagtcggttttcaatttcttatcttctgtgcgatttccaatcatgcctcttgtcctgctcaagaaggtaagtaaagctttgatacacaacaatttatgagtttgttagaacttaaaggcatgctcctcagttgactttcattgtatgatcatgcagttggaaaagagcaacatcagcaggcacattcctagtttcgattttcttgtgagttgaaaccttctctttataaggacaatctttttgaatctgttcaattcatgaaaattttattgattatgtaggtgaaagaggccatcagctatgttgaacatggattatgtgagcctgaatttgatcaaaagtaagttccatggagttgtaacagaattattatatgacattttagagtggcattttctctaacatgaacttacttacttttgtagtgttagatttcaactaaggagatctagttataaggagcttcagtacttgtgtgatggagatagtaatggagttctttacttcgcgggcacatcatacgggcaacatcagtgggttaatcctgttctcgcgaaagtaatgcattgtcaataacttcttgtcttttcagaccaagagatcattttattatggttcctaatcctttttaaattgtttgcttcattcagacaatcacaattacagctagcagccccccttcaagattcaccgactccaaagttttggcgtctagaacttaccaggtataaaatccagaattcgttcgttacaacttactgaacaatgtgagcatccatcgttaaacagctaacgaaaaacacaaagttacattcactgcagggaacatcttttgctggaccaaggatagaagatggacatagtagcgcgtggtggatggttgacatcggccccaaccatcaggtttgttttcgtgtttttatttctcatgctaagattactctataccaactttctgatcggtctaatcggtacagcttatgtgcaactactacaccttaaggcaggatggatccagggcttacaacagatattggaatctacaggtgaaaatggctatttattctcaatattatattcctgtggtgaagaaacttaagtaatgaacataaacagggccagccctcagggtatttaacgtgtaactatgaaggattgaatgttagaactcttaagagtttttaaaagctttaccattacactaaagcactaaaactatcactttcattttgctttaggccctatatactttaggaccggctgaacttgagtttttttttttttttgttacatgcagggatctttggatgggaaaacatggacaaatttgagagtgcatgaaaatgatcaaacagtatgcaaaccagggcagtttgcatcgtggcccataataggaccaaatgctctgcgaccatttaggttctttagggttgttctaacgggtcctactactgatgtatccaaccccttcaacatttgcatttgctttttggagctctatggctttttccattagtaactacttaaacacatattttctttgcaatatcgtgtaatctacaccttcatctagactagtttttagaacacttttttttctttcttactttacaatgtttacttagttaaacttttactcttgcttatagctag

SEQ ID NO: 17735 - DNA, 7648 bp, Cannabis sativa
tggcatcactttctacttccatggtaagaaagataacgatttttgtctgctatctgattctaacctccatataaatgcccatttcattggcaagcgtaactcaaatatgaaaagagacttcacttgggttcaatcaattggaattctcttcggtaagcaccaactctccattggtgcacttaaaactgatacatgggatgactcagttgaccgtctcttcatcacctttgatggtgagccaattatcctacaagaatccaaaggtgctcgatggcaatccaacaatgccccaagtgtttttgtagtaagaggtgttgacactaacaatatcatggtggagattgatagaatgcttagaatcactgcaaaggttgtgcctataactgcagaggaatcaaggattcacaactatggtataactaaagaggatacctttgcccatctcgaacttagattcaagttcttctctttaagtaacgaagtaactggtgtgttaggccaaacatataggccagactacacgagtcgtgtgaatgttggagcaaaaatgcctgtaatgggtggagaaagagactttaaaacttcaaacttgtttgctactgattgtgttgttgcaaggtttaatggaatcaacaataaagatgaagatactttagaaggtttagatctaccgagtttaagttgtggtagtggaataaacggacaaggagttgtctgcaaaaaatgatgagatagatcactccctctatacagttacaaatggtaatcaatgttcatttttcagcaaataaagtcattataaaacatggaaagtcaatgagactattcagtgtaatttgttctcttaaagatgaatttatataattttattttaaataatattaatgtgaaagacataagtttttatcaatctttcttatctatagtactattatgattgtttaatttgataacttacgttcaatatcacatgttcttgctactacaaataatttttttaccacaactagaaaaacccattttatcttcgagattattttgttggaacaaatgattattaaggcgaagacataagtattgaaataaatgatgaagacatacgagggatctatgtctttggttattttaaccgaaggcatatatgtctttattttactttttataaaattaatatttatatttatgaattggaatttgtttagtttaatatatttttatttatatttattctaatttaaatgttttgtagttaatattttaatttatttaattaatgttattgtaacacacattaaaaatatttttataaacttatattttgaaaaaatgacaagtttatatatatacatatacacaaaatttaccacaattatgctacgacacacaaaaaaaataaaatctaagtctaataatatgtaagaaaaaaaatctaattctaataatatgttacaacacaaaaaaagaaaattctaagtctaataatatgttacaacacacacacaaaaaaaaaaaaaaaagcattatataatatagtaattaataagtttgctaaccaatattcacattgtaaagataacaaatctttgaattcattgttatgcttttttgatccaaactctaaaaagtactgttatatagtttaaaatttattataaaacaaaattatgtatgcatgcaatcagaatttatagcaataatatatgtacggtgattccatctttgagagttttttcgagatatctcatgttctttattcttttctaaggaaagtaatagatgaattgactatcaaaataatcagcaatcacataaattaaagcattgaaatttatgatgaaaatttcataacaactaattaaacgttaccaaacaattcaaacttacaaataacaactaaaaacaatctataacaatacaaaataattacaataacattttaacaatataaaaattaatcacttttccaatcacaatatacattttttgccacaatagaaacaattgtcttttacctttttgtttttagacttagggccgactttattctttttggctttaggtgccattttgcctttcggcttgggcttgctactactgtccttaccatcccgtttcattttcttattcgaataagaaagagagatgaactttgctttaatattgtttgactcacatttcttggacttatctttgttaaggttttcaacataatcaactcgttcaactattgagtcatgttgaactataacttgttcattacacagcttatcgtgaacactttgaaacaatgagtgagcgactcaagaataatgctaacttgagtcctcttgtctacgatagactcatgtgtctctgcctcatacattagcgtaatcatgtgcaatgcataattttttacaaagacaactcagtaaggaaaaattttgtggttctcacaaaccatcattatgtcagattagatttccactgagattagattagtttttcaattgctagtaaaacattaagggaatttgacatagtagatatttttgaaataaataaaatgatataatgattatacttgaataataaatatcatttcaaaattactataagtctgtatacgtgattcatgagcacatacaagtaaaatacataaaattttgtttaagtgttattccacgataaaactctttgacaattgattgccgatttatggtcggtatcgagtcaatttcattgatatgagacaattctcatatttgttattttgaataaatttaaatgtctcatattttctttttaatatataaaatactgctttttgaccaagttaacaactaaccgcacgaagcttagttacactttgtgagtgtaaccattatttcagattctatgactaaacttagtgtcacactaaaatacatcacttcttcttatcttattcaagagatcaactttgaacaatagtatagacacataccttccttagatagatgaaatttgagccgtctcgaggctagtctatactccttcggtgttaatcaataatgtcctaggttacatatactcctcccactcactatattagtttaatgtgtttgttttattaattctcaaaattaattttttttgggacccactaatatttttctgtctatttttccttttgttcaactttctccgttaccaaacaatctcttctatccatttttcttttattttcttttttcctcttttctcctgaactaaacataaggccttgtttgacttagtttttataagttcttttttagcttttagaataaaaaattacttctaagagtgtttggatattaaaaataaaatattatttttaatttaaaaatcattttagaaaaaattaggatttgtagcttctcctaaatggacttttgagaaattatttataaaattaaaataatttaaataattcttagtttactcacaaaagattcttttttattaaaataaaatttttatataatagttatccaaactataaaaataacttatacttatcttatacttctaattattataagtaaaaataaaagcttagtcattttctatatacttaaacacatcagaaaagaaaaatagatcatgatatcaaactaatatttaaaaattgcttattttcaaatttaaatatttaaataatactttatagatatattttgaaaaataatgctttatatacttttttttttttttttgtgaagaaaacagatataatgctttatatacttgggtaggaagtgatgtacgtataatttgcttcaaaaggaattggaaagtgagaatcgatctggccatgttagaccaatatataatagtttatcatctataattaacttataccactcatctcatggtcctaatggcttgtaatttaccatatcatatgacatatgagcttagcttcagtcctaaaaaaaatgagtaaacgttggtggaacatattcaagctcataaagaaagtcttaatcggcatatggacggacgcagtaaagaaagtgtgggggttatagcccccactaaaaaaatagtgttaaaaaaaattaaatattttctatttaattaaataattatactacaaaatagtaaaaagtccccacaaaataattataattttaatgtaaaataaataataaatatttttataataattaagtccccactgataaaaaactttgggtgcatcacatacatacatatatattatatatgtagaaaccaggcaacgtacatatacatttaatttgttttgcttattgtcccaacatatttgagaattatatcaagttgcatttgttaaagactaaatgagtcgtaccatttgctaaaagtttcattctgtgtagtcttggttcccaagtgatgtcagtttcaatttaagatgactttaaaactagataaaagatacataatatttaaggtgaagatggtttgactttcacaaattcccacttgaaattattttatatattgagatagtgctattatgatccgaaatagaaggcaaacaatcatcttaggtacattcccatggtgactataaataaaggagactcaacaatgaaaaatcatactcactcgtaaagcccccccaaaccaaagcacatagagaaagttatctcaaatggctcaatatagcccacatctcattgttgtagccctcctcttagggctactccaaataatggttgctgcagctccaactccttatccaactacccccgaaatcccttatcctccaacaatacctactactccaacaccaacaacaccatcaggaacactcccaacaccatcaccttatcctccagcatcgcctactacttcaccaccagcaacaccatccccaaaagacccgaaaccatcaccttctactccaaaaccccaaaaaccatcccctagtactccatcacccgcaacgccttccccaaaacacccaaagccatcaccttctactccaaaacacccaaaaccatcaccatcaccagcaacaccatcaccttatcctcccacatcgcctactactccgtcaccaaaaacaccaaaaccatcaccttctactccaaaacccccaacgccatcacctgtaacaccttctccaaaacccccaacaccatcaacgccatctcccaccactccaacaccatcaccatcgacaccttatccaacacccccaaaaccatcaccaccggtaacaccatcccccactattccatcaccaacaacaccttctccaacaccacctacccctactccatctccaccatcaccaacaactcatacaccttatcctcctccaacccaatctgatgatgctggagtcaagagggctagatgttggaataagaactatcctcaatgttacaatactgaacatatatgtcccaatgcctgtcctggtggatgtgaagtcgactgtgtaacctgcaagccagtttgtagtaagtctcccgaaatagattttttattaagtaattcttataccaaagagtaatttctttaatactactatatattttttggcaaatgcagaatgtgaccaacctggagcagtgtgccaagatcctcgtttcataggcggggatggtatcactttctacttccatggcaagaaagatcacgacttttgcctattatctgattctaacctccatataaatgcccacttcattggaaagcgtaactcaaatatgaaaagagacttcacttgggttcaatcaattggaattctcttcggtaagcaccaactctccattggcgcacttaaaactgatacatgggatgactcagttgaccgtctcttcatcaccttcgatggtgagccaattatcctaccagaatctaaaggtgctcggtggcaatccaacaatgtcccaagcatttttgtagtaagaggtgttgacactaataatgtcatggtggaggttgatagaatccttagaatcacagcaaaggtcgtgcctataactgaagaggactcaagaattcataattatggtataacgaaagaggatacatttgcccatctcgaactcagattcaagttcttctctttaagtaatgaagtaactggtgtgttaggccaaacatataggccagactacactagtcgtgtgaatgttggggcaaaaatgcctataatgggaggagaaagagattttaaaacttcaaatttgtttgccactgattgtgttgttgcaaggtttaagggtattaacaataaagaagaagatactttagaaggtttagaactaccaagcttaagttgtggtagtggaataaacggacaaggagttgtatgcaagaaatgagattgattttctctatattgtcacaaatggtaatatattcatttttcagcaaataaaataattacataaaatggaaagtcaatgagactattcagtgtaatctgttctcttagagatgaatttatataattttattttaaacaatattaatatgaatgaaataagtttttatgtatttctcttatttatatattatgattgtttaatttgttcaaattttttatattctctgtactacaaattattttctctgcattttagtttatgacgtttatcaaatgtgatcattggtgtggaaatgtatggagatttttatattttgagaaataagtaataaaaattgatatttggcctttagtattatttatgtggtgccatgtgtccttaatactgtttttgctttattcaaagggttaatataaatactcatatactgtgtaccttttctcttcaatgaatagaaatataattgctttcttctgatatggtatcagagccaaacagctcctcatggcatcaataaattgtactagctctaccctacaaatggaagatgaaaatacccaaaatacccttcaaaaccctaccatcattaactcacaaaaccttagtaatgtagtcgcctcacccatcttctcctcccttgctttctcgacaccctctttttcttctctacctccaaacttccttgcattaatttaaccaaaccatggcagtcaaacttgatgattctaattgtttggagaatgaaaattccaaatattatcattgccaatggccttgaaggttatattgacaatattgttgcttgtccttcacaattttccagatccaacttcgaacctgacgaatcagacattcacagtgtggcatcgctacaatcgacatctcatgagttggctctacgcctccatcttcgattccatgcttgggcaacaaatagtatgtcttaacacaactgcaaaatatgggtctcccttgagagaacataaataataactttgtttgctcggagctcagattttcaaacagccttacaaaacttgaagaagaaggtcttactgcttcaacatatttacagaagctaaaatcactttgtaacaccctcgcatctgatgatgaaccaatctcttcccaagatcatttgacttaccttttaaatggtctaaaacgagagtataatgtctttgtgactccgatcttgaccagacctgtcaaacccactgttgaagaagttcacgctcttttactaagctatgaagctcgcctggaacgtgaaatagcagttgcatcgattagctcccttcaagccaatt

SEQ ID NO: 17736 - DNA, 3065 bp, Cannabis sativa
atataatattaattttacatcaaaattttgcaattgtgtattagagcacaaaactaaaatttagtataaatttaccacaaaattactttttgtgctaagaaaaacacaatttttacatttcccattgaacatggtctagtgttctaaattgtggagaatatatttttcatattgtatgactttaatgagatggatacaatgctaaatattaggaaattcctataatttgtagaaaaagtagcttgataataaagttgcaataggttagtgtaggtaggtcactcaattttttacactcattatcacttttctttcttattatcttttcccttgtcatcaattttcccttcaatcaaatacactcattttcacttttctctcttaaattttctctcccttttccacccaccctaacaaaccatatgtttgaggagccagactaaatgttattaccatgaaaaagctataaatacaacctttacagatcattatcccaattattaaatatatttatatgattttatataatgagagtggattgagagtgggacaaatatagccatgaaaattgggttagaatctttactttggttaacatggctttaccaaaatgtcaaataaaaccaaacgtgaaaaaacacacaccaaaaccatacacaaacattttatcataacagcgggaaaagaaacaaaactgccaacattttcaccacttgacaagttaagccttatcccattttccatttccttacccgaaatagaatcgtcaacactttcgcttcaacgccaagcttcaaccagctcttttcttgaattaatgcggccgagaattccagctttcttgctcttctcattagctcgagcgctctggatgattatctgctcactcaacttcttggaacctttcttgagatttgaagtgcttgattgacctgttttgttcttattcaagctcttttgagcatctccactatgacctgtggagctttcctggagaacattctgtaaagagctaacttgggacacaacttcacaaggacaggtatcaacaagagaccaacttcctcccgggatgatattctcgatggaagataggaaactttgagctccatctcccgatgtacaactttcatcttgagttgagtgacaagggctatcgaaagctggttcttcagcgacgaaggcttgatcgccttcattctccaagttggtctcctccttggcttcttccagatatgggtgggaagagctctggtgcccatcatcattggaaggctctacgcgagtgtgaggagatgtttctaccacagagtcttctctttctcgaagtgtcctaacgataagattcttgaggaaattcatcacttgaactgcatacatcaatgcagtcaaaggatcatccatctgcaacaaaaattcaacaagacagtcatcaccaaaagttcactagatatcactaaattcttctttcgagaaactcatagcaacacagattaacatgatactaacctgagtcatgttcggtgcaaacaccatggcgacattgcgcgcattcatcttattcagatgttcaaactgtgcaacatcagccattaggtttattgcccaatccatcagtgcagcctctgttgggggaaggactctaacaagttgagcacactcctcttctgtttgggactgcattacctgctcgggcgagagggagtctaacaaaccagtaggaagctctctaaaccaagcctaaacaaaaagagatttcgatcaccgagtactcaaaaataagctaaaccaaactgaaaaactgatttgggttttcactgaaattgctataacagcagaattagcattgatataatgaaactaagttaatagttacctttataagaccagccaaacagtgcacatcaacaccttcaggtatcacacccctatttaactgatccctaacatactcctcttgattgttatcagcattaattctgaaaatcccttcagcctgaaagtagattaaagtcttaataaccaaatgtcttttctactggaattgacttaccaaaccaaaccaaatattgaaaccttcacacttacttgtaaaccccctcgtgcatataagtgcctctgcatcatcagaagaattgtagggacactattccctcttgaatcaaatgaaagctgcatggactcagttgaaaccccaaaaacatttgcacttcaagtattaaaaaaaattgaacaatgtcagttgattgaacaatgagttgtgatgttaaacttgaactagcataaacaataagaataagtttccatataaggaatattgggcttaacataatattatatattaagttcatcaaaggtcaaaaccaaccacccaaaatgcaccaactgcatgtcagaaaattaacttcttatttttttctcccataatgcccattttcaattgctacaatcaaattttggaagcaaatcttgaaaaactagagcataagaatttgggtatgagatatggtgtttagagatgcaaagaaaattcccataatagaacatgaatgaaatcctaatcaacaacccaatcctttataggattttttcggtgaacaaacacagaacaaaagtttccatatttaaaacccatgacgcaatttacagtaattcaaaccaattcttgataataaaacataaacaaataacacataaccctaaagagatgaaaaattcttgtaaaattaaagaaaagattagagaattaattacaagaaagaagaaattttgatgaacagacctggcactgggaggcctcctgggaacttcaggttcaaactcaacgggcaaaccaagaaagccattaaagcgatcaaaggtaacatgggcaatatgcctaacattagaaggccacccaatctccattgaagatgaagaaagcttcgctctttcagtatgactacacccaattaaagattttctaaaagcagctattaaaagctccaaaacagagacctgatctccttctctatctctttctaaccttttcctatcaaacccacttccttgttcttgttgttgtt

SEQ ID NO: 17737 - DNA, 3389 bp, Cannabis sativa
  modified_base (1965)..(1965): a, c, t, g, unknown or other
  modified_base (2007)..(2007): a, c, t, g, unknown or other
attctcttaagttgtggtgctgatgtagaagctcaaactaagacgacttcgaaaatcgactcacaactccgccccattcacttggctgctcggctgggatcgtcacaaatccttcaacatttgattaaagcggggtgcaatgtcaactcggtaactggagaacatggagatacccctctaatgatctgcactcgtaataaaagtgaaaaatgtctaaagattttggctgcagctggtgctgattttagtgttgttaattcaagtactggtgagtctgctagctcaattgccgagtctagtaagtggaatcttgggtttcaacaagctgttttggatgtaattagagatggggttgtcattaaatcaacaaacgaggtagtattttgtcctttgatgtttgtgactagagcaaatgacactgaagcgttgaagaaacttatcgaaacagagggtgttaatcttgacagacaagacgaaaatggcttctcagctgctatggtagctgcaaaaattggtcatttagaggcctttaaattacttcttaatgctggagctgacatgaagttacgtaataaacatggtgagactgcattgaaactatcagaagtgaatcataacagaattgagtttgagaaactaatgttaaaagagtcactagaaatgacaataaaaagtccttattgtcattttgattctctacaccaagcagtagaaatgggtgactttgactatgttcgtgtgttaataacaaatgaaggctatgatgttaattctattgatgatgatggctatactccattgatgttagctgcaaaaggaggccatgcaaagttgtgtgagcttttgatatgtttaggagctaaattagaggtagagaatcataaacatgagacggcattctctcttggtaaggacaaaaacgacgtagtacaagtgataaaggataagatggctaaagagcttgttcttaagggtgcccgagtgaagaaacatactagatgtggtaaagggtctcctcatagaagagtgttgaggatggttgaagctattggggtgttaaggtggggtaagtggatgaacaaaaggaatgtggtgtgtaagggagctgatgtggggcccagtgacgtgttccgatggaatcgacggcggagattcgacactgatgagccaggattgttccacgtggtgaccactaagaataaagaggtgcattttgtttgtgaaggtggggttgaaatggctgagttgtgggttagagggatcaaacttgtgactagagaagctatttttggcaaaaatagactattttaacgcaattcaataactattaatgtttacatactaatttaataatgtaaaatttattagtgtaatttcttattttatagtggtgttagtatgatttttagtgttagcttaaactatactgaaagcaatgcattaattttggagatatgcaaatatgtaaggctgggcatttagttgataagcaccttaaccaatgctttctactttttagattaatgtttctctatacatgctatataaaatgatcatcctattataaaatgctataatttgttttattaggagtattttacattagaattaactaatacataaaagtctttttcatttaaacaaatacataaagtcttattttaaattaggtaatgcttaaaattttattaagactacaatgttgattattttttacagactataatgtttaggggtattcattcaatccaatccgtactattttgtatatagtacatccgatctgcactaagtgcaaattttatattttgcattcaatccaatctgcacaataattcaaatccaatccaatctattctgcaaaagtgaggattggattggttacatttcaatattaaactatttaatatttataaaaaaaaatatatcttttttcacataattagcaacaaaataaaataaatnattgttattttatgtctccaataaaaaattaaaataaataanataataaataacaaattcaaaggaagaaaaaaattgtatgtataaagaaatgtttaattttatttaaaatgtatgtaaaaaaattatatataagaatatatagaaaacttttaacattattacatgtataataatcgtcaagttattatgttgaattgtctttaaaaaattatataatatattacatatatttttttaaaaaaaataaaaattatattataaaaattggtaactttgtattatatagtgagttgcggtctacaactattaaattaaaaattgcaaaccgcactgcgtcgcgcagtttaaaaaatacaaactacaactgcaccacaaagggtttgaaactgcattttttgagctgtgtggtgatgtgcgggtggtttatgtggtgtaggtaatttgatgaacacccctaaacggagatgtgattttgctaatagatttgtggtatagggggtttcgtcgttagaaaataagaatttggggttaattactagcgaaatgattcttttgggaattataccgtaatttactcttagagcactcacaacagcttctctattctgttttttaaaataactcactaaattcttactttctttattttacctcacacttttacattacaccagacatcaacttcgttatatttttatccacatcatcaaaataatatattttaacatattaataatatatacattaataaaaatattatattatacattatatataattataaaaagttaataaacttaaacaaagtagtaataaaataaataaaaaaaatttagctcactctctctccatagctacatattgagatgcattttattggagtttgtgtaaatttattatagctaagctataaagatattgttggaagggttaaaataagttttgcttatttgttgcaggcttatgagagagcccatgtctgtgtggttgcgccggctttgtggaacaaattttggaactcaaaaattttcgaaaaacataaaattctttggtggggtatcctttcgaatgctctgctagtccatggtctcctgctaggagaatccccattaaagatgaattgtgcccattatgtggggaggctgcggaatcgatggaacacctgttcctctattgcaaatttgcttaccatctctggaggtcgatcctcccctttggggtgttcccggtccctgactctagtggtcgagtttgggattgggttaaatttctttggatgttgaagtcgaacgaggtggactcggacaagctgttcctttatgcttcaattgtcgttgacacaatatgaaaaactcgtaatgacaaggtacataactttcatccaagtaacattgtactggccattgactctatttctcatt

SEQ ID NO: 17738 - DNA, 5969 bp, Cannabis sativa
agtgcgtgactttcggccaattagtctttgcaacaccctttataaatgcctgtcaaaagttcttgctaatcagcttaaaagtgttatccgctctgttattagccccaatcagagtgcctttctcgctggtcgtcaaataactgacaacatcctcattgccaacgaaatcatccatgcaatccattctaggaaatctggcaaaattggttgggctgccatcaagttggatatggaaaaagcgtttgatagagttgaatggtcttttatcactaaatttctttatcatgtaggggtccccccgagttttgtctctcttatttctaagtgcctttcaacgatcacctaccaattatctctcaatgggaccttgtccaatgttttttcttccactcgtggcatctggcaaggtgacccattagcaccttatcttttcctaatagttgctgaaggtctgtttgctgctattcgtctttatgaaaatgcagctctgttctcgggtcttcaaatttgtaggggtgcaccctctttgtcccatcttctatttgcagatgatagtatggttatttccccagttacttctcactcttcagaggcaatcaatgctatactccttctttatcatcaagcttgtggccagttggtgaacagggataaatcttccatttttttctcctcaaatacctcccttgactctcaatccaggtttaagtctactttgcagcagaatggagaaggttttattagcaaatatcttggagtccctcattgtgggcagggttaacaattttgtctttcattatcttgtccagaaagtctcatctaaactaaatatcttgaatgaaaaattcttctctcgggcaggcaaggaaaatcttataaaatctgtcattcaggccatcccttcttttgctatgtcctgttttaagctccccaattccacctgtcgcaccattcaaagtttgacctctaaattctggtggggttctaactctaacaagaggaaaattcattggcggaaatggtctgctctttcggtctctaaaatctttgggggtctgggttttagatctctcacccatcataacaaggctcttttggccaagcaagcttggacggtctagtctaatcccgactctttcttacactctttgctgaaaagctcgttattttaagcattctgattttctccatgcagctaatggctacaactcctctttcacttggaaaagtctcctttggcatcgtcagcttttaaagaaaggacttgtctggaaaattagttctgggcgtgatatccatatttctgctactaactggattcccaggtgtctcaccctaccattctccaccaaattgatccctccctctccactgtctctttttttattaatcttgatcacacctggaacgtcgataaactgaagcattttcttcctctatatcaggcgaactcagttctcgaaattcccttggaccctaaacctattgactctcttatttggagctttcatcattctggcatccttactgttaactctgcttaccatcttgcctcaactacagccaattccacttctccctctgcttcggaccctaacccttttaaggattggtggaaaactctctggaccttaccactccctcgtaagataaaacattttacctggaaagatttcaaccatctcttaccttgtgctttaaacctgttccacgagcaaattctcccacaaccttattgctcatcttgtgggggtagtgcggagtttgtctctcatgcacttgttgactgtactagagccagccagatatggaaacactccaaattcaaacaatttcatgaaaattatcgaaggctggatattagagaattttagctccatagccttacttcaatttccaaggaagatctccctttgctgttgggtttactttggcaaatttggaacataagaaattttgctctctttcaaaagtcgtgtgttactaacaatgtccaagagtttcttttaagctatttgcaggattataaggatgctcaaatcttgtcctctactttatctttgccgcagccttcctctccacatgcactgcatcatatcctccaggaagatactcccgcattatttgttgatgctgctctaaaccatgaagatgctgctactggtttaggtcttgttttcaggaaaggtccgcaccaaattctcaactctgctacgttttgcaaggtaggagcttccactccaatttttggtgaagctcaatctctctatgaaggaattcaatggtgtatttcttcccagttgatcccacgattcatctttacagattgtcttaatcttgtcactaaagtgaacggaacttggcatgatcactcgaccttatcaagtcttattgtgaagatcaggctctccctctccaatttcgctgaggcacctttgctgcacttatcacgccaatttaataaaaatgctcattctcttgctaaggcagccctcaggttgcgagatgaagagttggaggaatcgttttagtttcctcttttggctgctgttgttctcttgtcttgtttctttgttgcagcctcttgttcctcaaaaaaaaaaaaaatagaatatatctattattatagtcaattaaaaaatatataaattttaaaaattataactaatcgggtaaagacagttttattaatcactcaatatgaaaaatactaattttaagacagaagataatcatcaaataaaatcttgtattatatagcctatagtaatagacacgcaacactttctaaataatgagagattttttttgaaacaaaatgttaaaatctcaccaaatttacaaaattgaaagagaaactatagcatgccacataaatttatttgtgctttctaatatatatatatagatatatatatatgtacatattaatttttgcttgtagaaaaaaaaaagagataatagatattagagtaatttgcggcataaatacataagtttaattctgagttgtaaataaatatctaaacttaatttttagcggtaataatacctaagttataattctgaaacttttgtaggtacctgactgttaattgttaagtaattaaattgccatatggtaattcttaattggtccaagtcattaaatttttattccttttaaaaaaattaattaaaatatatcaataagaaaatgacacgtggataatgatataatattttaagtgttagatacctatcgagttccataaatataatttaagtattattacggtcaaaaattaaacttaaatatttatttgcaactgcaagttaaacttaagtatttattactttagatattataaaggaaagaactttaaaagcaaatggctaagatcatcattacattttgtggcacaaacatccactaactataacataaaaatcaaaattaaactcgtggagcatgtgtaacgatcatggagtttttcatcgaccactttttatagccatcccactttcgtttctgtacttttagtttaagaagaatttagactcgaaaaggtttttttttttttttggtttacatatttgtccatggcattttatggcgcattactctttctttatttgtaccattatcgttcattgtaagttgtgcgtgagtttttttcagccaaaagaatatcattagaatttttatcatgcccacacatgtataaattggtagacacatgttgtccttcttttatcatgatttatttagtttagtaagaaggatggaaataggaaaagattgattatgtaggggttataaaaaagtatgcagggaggatagatatgatcttctttgtataataggaaggactcagaaagaagtggtgtttttcattatttagaataaatgagaaagcaaaaaaataaataaataaataaataaataaaatagtcgaataattagtttacataataaattctatttttttttatcatcaatctactcatactaagcaatataaccgctcttcgcgcggctaatttaattttttttagtattattataaaaaaagtatttattaatataataaatagttacttaaaaaaataagaggcttattcatttttactcttcaaaacaatattttttagcatttttacgaagttttgcatagaaacatttattgcaactagcgttgcaaccactttagaaacccaaactgtaactttggaaaaaaaagttaaaaaattagcatatggggtaattccccaaaaaataattctaatatataataaaagtaaatctatattatttaatttcatattattattaataattttatttattaaaaagtaaaatttcataaaataataataaaaaaaaaaagaataaaaaaactgaagcatattcacaatctactattgttataaaaataaataaatagaatagtatagaaaaacaatagtgtatcgtattttatcagttatcatcaccagatcttatctattgtcattactatatctcatctgttgtcatcactgtatcttatccgttgtgatcatcattgtatctcatatgttgtcatcaccgtatcttatcaattgccactctcgtacctcactcgtggttaccactactatcttttccaaatctcaatctcaatcttagatcccattttgaattttaaatattttctttaacattttatagatataaaaaaaaaaaattaatttgttctgttatttattaattataatatgattgaaatttatatgatgatataaatataaatttaatttaaatcatcaatataaaaatatggtataatttatagtaggttaattatgtattacatatctaattaaatttaaatttattaatatagaatattattcttcttaacgatcatttttatatcttgatcatttaaaattattgcaattattatatatttgtagttgtcataatattatactgaatcaaaaacatcatatggatgtatacaaatttaatgtaattctatttaccattgaatgagaaaattacataataaaacttgcatacgggagaaagaatttgtatatcttattattttttattaagtttaagttactattattgatagatatatagtaactggtttaaatattttattatttctaaatatatatatatagattcgaataacaaattaatatttagaaagttgtttatacaaatatcaaacatatagtagaaggagatatatactatgaaattattaatttattattgagtaaagtataatttaaaatgagatattttttagtaaattattggtatttaaattaataaattaaagtaattaaataattaactacaaaaataataaaaaaataattactttataatttatatatattttatattatatttctatttcttattaaactaatttatataattattaaaaagttagtaaaatataatatattatttttttttaatatatatggtatataattattaaaaattagttatgaatatcttattcgaatatgaattaatatcttgaaaaactaacagttattttaaataaaaataaaaatcaagagtaagatttataaaagaaactatattatttgttaaatacatgtacatatttactcttttattatatgtacattatcacattgttgaccgaggtttttggcaaccaatttaataataatatatgagaaagatgtaggaaggttagtgcatgagatttttacgtggttgggacattaatgagccttagtccacgagtctttcttatttgtgagagtatttattacagagaatgttcttgatagttttctctttttaattcttatgaatcctaaattctcgacccctatctcagtgtctttggggggtatttatagtgtttttctggggtgatccctagaactgaagcacttgtctttctgtgtagtttcagtaggggcacatattcccaacagat

SEQ ID NO: 17739 - DNA, 5246 bp, Cannabis sativa
cttaagggttaggactaacttaattttttgatagacgtatgttctggatgttcaccctttcaatccccggatagctatgagtgctggttatgacggaaaaaccattgtgtgggatgtaagttcagttgcctatgtttcttaaaaaaattgcttgttttttctgtggtaatcaaaacagatttaattgtggttctagatatgggaaggaaaaccaataaggacatatgaaatatcacaccacaagctggttgacggaaagttttctccgtaagtgtcatcattatatttatactttttctttatgttaatctacagcaatcagtagtatgattaatattgttaaaattgaatagctttttatttttctgtttacttgactctattgtattttgctggagttcatatagctattttgtacatgatattgtattttcgtgtgaagcttttattctagttgactatgtttcctaggatgttcagtatcgaattgatactttgtttatttactcttgtctgcactggagactattagttgtctgtttatattactcacaattttcgttctgatatgtagagatgggacgtcaatcatactatctgatgatgttgggcagctttatatattgaacacaggccaaggggagtcccaagataatgctaaatatgaccaggtatttatgctcctactttttatttttgttctttaatctcatttcgctcgttatgcatttatatgatcagttggggatttggtaccactaatgtttgttttacaaaatgaggtttcttagtggtacttatcttgtgtaccctcctttggcagtttttccttggtgattatcgaccccttagtcaagatacccatgggaatgtagttgatcaggttggatgatcacgtttttgattgccatttactagttttactttattctttgacttccatacagattattatacaactaggaccctaatatgttagactctagttctcaattagagttttgattacaagcaatggcgattgttgaaacaggaaactcagatagcaccatatagacggaacctccaagatcttctttgtgactcaggtttctctgttaaagtacaagctgttattattattattttatgcgatttatctctaccatttcattttcttaagccccgtttatactttgaaactgttaggcatgataccctattcagaaccctatcagagttcataccagaagaggcgattaggagctcttggtgttgaatggaatcctaattctcttaaacttgctactggagtagactttaccctcgatccagaataccaaatcttgcccttggcagaccttgacatatttcctgaacctctgcctgagtttgtggatgtcatggattgggaaccagacaatgaaatacaaagtgatgatgctgattcagactttaatgtcgctttagattactttagtggaggagagcaaggaagtttaagctccaattcctctgttgattcagagggcagtgcagaaaatggtgagactgatgacacacaagtgaatagacgtcgaaaatcaaaaaggagaaagcaaaaggctgaagtaagttattgtgaattttggtctttcctttgttttaggcttcttttgaaataattaacctgctgctctgtctgtcttgcttcatcagattgagatcacgacatcttcaggaaggcgtgtgaagaggaggaactttgatgagagtgatggtaatcctctcaggagaaacaaaactaggaaatcaaaaagtggtcgaaattcttcaaggaagaaatctcctaattcgaagtcatcgagacctcgaagagctgcagcgaaaaatgctcttactttgttttctaaaattactgggacctctactgatggagaagatgaagatgactcgggacttgatacatcagagagtgaatccatacttcaagattcaaacattgagagtgatggatctgataaatatttgcaagatgagcaaatgaaacatcgaaaagggaaagaaatttcaatggatgactctgactcggttaaacctcccgaacttcatgttaatggtggaagtaggacaaagttggtcctcaaattgccacaacgtgaatcaaataggcctctggttcgaaataagatagtgttcaaatgtggtaacgatggtgtaggtccgtcctcaagagttcctcaaggaacaattgaaatgaatgggaattgtatgaactctcaggatccaagatactaccctggcaattatgcaggacgcaacatgattgaagagccagacagagttcaaggaaatagagttgaccttctaaatttgtctgatgattataaaaatgggaaaattagatgggttggggccagagctcggacatccaagcgtcttagatctggtgaagctgcaccagcaaatgcattttctaggacaaactcgtctcttgaatttcgttgtgaaaaacagaataatttcagtcaatttgcaaaaccggagaatgattctttgagtgagctctctgatttacaaacacaaaaacaagagataaagggagatgaaaagctggcaatgaatgggaaagctatgggggatgatacctgtggcatggccaacgggatagagaaattgagttctattgaatgcagggaatacaataatacatcaaactttcatgagatggttgctaagaatgcaactgactctgacaacaacaataataataatatgactgagcttccacaccaagacactcataacgcttcacatgatttacccgccgaggatgacgatgccgctttcattgaaaatgggaacacagatggttttctaactgaagaaactaagatcccctctctactcatctccacaaagttgaatctgaaaaggactgcaaatgattctgaaaacccttgtgagcaggaaatgaaatcttcagtggacaacttggagaatgggaaatataatttgttaaatgacaggccattggtcactgaacaagacttggttgtgcctcaggataaaacagcaaatagattgaatttagatcgtggagatggcggtccattggaatctgacactcagtgtgataagaatgccgtgtctagtataaaggactcggtggagtcccatcagttacctaagaaaaacatgtatactgttgtatatagaaggactagatcacagaaggctataaatacttcaggagggggtggtgaaggcaaaggaggaagcacctcaaatgcacgcaaccacaatcctagcagattggatgtttgtgaagagtcaattgatgggtcatgtgggacacaatccactggattgaagggctctgcatctacaaatgtgactgacaatgttaaactaactgaaggccatgaatcaggctacgtgcttagaaataatcagaacagttccatgagtaagcgtagactgtcacatgaagaatggggatcaagttctaggacgacagttggtttgaggtctagtagaaacaggagaggcaaccatcatcttcgtgagacaagtttaatagatacaacaaggaagtcaaataaatcatcaggaaagggaacatggttaatgctaactacacacgagagaggctcccgatatattccccaattaggggatgaagtagcatatttgagacaggttagttgctcaagttattattacaatattttgttgattcacttctagattggtggtttagttttcaaacgtttgctgatatatgttgaaaatttatttttatttctttcaggggcatcgggagtatttagaacaacacacccagcggagagaacaacctccttggatacaagtcaaaggaaaattaagagatgtagagtattgcaaagttcgagacctcgagtactcctcatccgggggatctggggagagctgctgtaaaatgaagcttgaatttgtggatcccacttccgatgtatatggtagatcttttagaatgaccctaccagaaatgactggttttcctgactttcttgtagaaagaactcgctatgatgctgctatacagcgaaattggacacgcagggataaatgccaagtttggtggaaaaatgacggtgatgaagatggtggttggtgggaggctaggattcatgatgtgaaagccaaatctaatgattttcctgaaagcccatgggagaggtatattattaagtacaaggaagagcctacagagacgcatttgcacagtccctgggagttgtttgatatcgacgctgaatgggagcagccaaccattagtaatgacagcaaaaaccaccttcagtctgcctttgccaaactagaacgcgtgagcaaacttccgaaggtatcaaatcaaatcaaacacaatcttaaatgtgatacgaaagtacatcttttctaaaatcttgttgaaacttatttcaggatcgttatgcaattaatatgttgaaggaactttcacagaggccaaagtttgcaaataggtataatcacattattcattatagattttttcttatgatcattatggttttagcttccttttccagttaacttttatacttttaaattgtcaggtttccagttccattatctcttgaagtaatcaaaactagattagagaacaattactatcgaagtttagaagcagtgaggcacgatttcgatatcatgctgtcaaatgttgaaaattatttggggagcaagtcagagaattcggcgaaaataaaacgtctgtcagattggtttgcaacaacattgtcatctttgtagcttttttgtttcttttctttatagaaagaaattattactgaggttaaatggcctcttttgtctaatgtatagataatttgatttcttcaaaaaagtttttccttcgtaccagttagattggttattggaaattggttaaatgtttagggggtattctttctcaaggggaaatagaaaaatgaaaagagttgatttgtggtggttgtgtagattttccaccagaaagatttgttattgtatagagacacttgatattattatcaccattaataacacaaggaaagaaaaggaaaggagaaatgtccacctaatgttttcttgtttgttttttctacctattttacctttttttttttggtttattattagagaattattcatcttttttgtcttgtatttggtaatggccatttccttgaacttaaattgtgttgtattggtaatggttattcatcttgtttaattttggt

SEQ ID NO: 17740 - DNA, 4310 bp, Cannabis sativa
ctaactaccctaacaactacatcaacttataaaaacccagttcagactagagaaatttatctaaagaaattacttccctcgcgagattgagagaaaaatatagagatattcaaaggttgaaacactgcgattatcaaccaagacttttgcggcttcaaatatgaagaacacttgtaataacctgttgattatagtggagatcaagttactctgaggcgagcttaatggagacataaccctattatgaggtgaactcgagatcaaacccatgtgccaccgatctatctttatttgattatctaaccctaaatcttttttatttgttttttttgtgtgtgtgtgtgaattttttcttaatttcgtgtgtgtttttgggatctttggttctcaaaccctagagttatctctatgagagagaagagtttcgtgattgaatctcgaacaatctgagttgattactcagtttttagggttttgcttttcttgcttattgggttggaccgagtctttattggactctgactttttatttttaccaattagtcattgacacacgattagtttgcaaaaatactataatttatctttgtgtattgattgtgtatcttattcttagggagataacttaataatatttacctttttttttataaagagaaagtttaatgttcaaatctctattgttcaaaatttatgtatatatatgtatatatgtactaggtattagtaatatcatgcatgttgcttagacttgtattagagtttctattacctaattattcatataaacaataataaaaattaaatctgatgcaattcaattatattttttttaaatatatagaatttaatctagttttaaatttatttataaaaaaatatatctaactaattttattaaacaataaaataagtaaataagtttagatattttaaataatatgactaataaatttgttatatagtatgtttaatcaattgcattaaagtctaatttaaatttaaattaagatttatatataaaaataattatctaattttgttgatacttttaaataatgatccaagttatattttaataaataaattaaatttagatatttaaaattattttttttaaaaaaaaaaaaagttattttagtgattgatttaacgacgttagttttaactgttaattttaaccggaaaaaaaattgttaacgaactatttttgttaaattaccacatttaatataagagagatatatttatataaaacatcctatgctaatcaacgctaaagaacatcctatatggagctcatcaatgctttgtgtttttttttttttttctttttttaatctcaacacttaggctgtttggaatgggttaatgctggcaagagaataataatgtgaaacattaccctgtttgttttgagagtttaacattaaaatattattcttttagtaatataactaccattgaggagggtaaagctgacaccttaaaaaagggtggacttgaatattcccttctattatattaatttgaatatcatttttgaattaataaataaatttgaataacattaagattatgatttattataacaaaatattacgatatatatttagtatgtgagatcaatttttttaggctagttatttttatgttattattaataatatatatatatgcattatacataaattgtatacggatggtatacataaatgagataacgaacaaaaaaatgacatagtgataaaatatacgaaaatattcattttaactaataaaaaatacaatgaaatttaatatttactaattaatatatatttttttattgaataattattttatttttatgtataattaacattaaatagatataataaaaaatatttttattttaaaattttaaaataatatataagattcttacactcaaccaaacagtataattcaattaatatattaccttacacaaccaaacacgatttacacatttctctacaatattctctttcataatattctctataagtaaattattttaaacactccataccaaatgctatagtttaatatggtgtattatatattttaattgaaattaatgtatttgagatatattattaagctacatgaatagtatactaaattatatctattcaatatatatatatcgaatcatataggttgttaagcacatactttacttaatatagcgtgtatcacaaaaattaaagtatattataacatatttcaacaacttaatataaatataggattaaaaatatctaattatcaacctgtccaattgaaaataagaaaaatagtttaacttgcttaaactgatggtatgagtagtagcttttatcaaaaattctgggatattgtgggtaatgatgtttgcaagacttgtctcgggttcattgatgggacgggtactaatcatagtattaatgaaactattattactcttattcttaaagtgaaggaaccactcaatcctactaactttaggcctataagtctttgtaatatcatttataaaatcattgcaaagatgatcactaataggtttcgcggggttcttaatgatgttatttctatgaagtaaagtgcttttattcttcggcaccttatctcggacaatgctatgattagatttaaatatttgaatattattaagtgtcacaagaaaggtaaataagggtttccagcttataaagcggatatggataaggcctatgatcgtgttgattggtggagcatgatgaagatgttaggctttcattctggttggattggtcttgttatgtgatgtataactagtgtttcatatgccataaatgtaaatatgatattattgggaacattgtgcctactcgtggtttgagacaaggtgaccaactgtccccttttttctttttgatttatgctgaagggttatcttctctcattaaacataaaattggcttaaacaatatttttgggttaaggtgtggtcagcgtggacccatgatcttacacttgctttttgttgatgatagtttcttctttattgaagctaatactgagagttatgcatggttccggagtgtcttcctatcttatgaagaagcttcaggatagcttgttaatttgcataaatcggtagtttgctttggaaatagtattcccaaaaactttatgttgtgttggctaatattcttggagtttctctagttctttgtcatgataaaaatttgggcctcctgtgctttgttgggaagagtaaaagtggtttttaagtccatcaaggataaaatttggaataaacattttggttggaagtctaagcttttctcttctgggggtcgtgaggttcttctaaaatgtgttattcaaacaattcctacgtatgctatgagtttattttggcttcttgttggtcttattaatgaaattcatagcatgtgtgtacgattttggtaggggtgatgatgataagtgcaaaactcattagtctacatgggcccaactctgttgtcacaaagtgaatggtggaatggggtttatagatatgggtttgttcaatcagttgctccttgctaagaaagttggtcgtttacatgattgcacggagactttggcagttagagtgatgaaaggtttgtactacccaaattgatttattgtggatgtcgagttcacaaaatgggcttccttcctttagaaaagtgtcctttaggggcgtgatttgtggaaggaaggggtgtgttggcttgttgggaaaggtgattccattaggatttgtgaggattgtttaatacccaaggatcacgtgggtcgtgctttctcatttagtggtggtgttgaggtataaaaggttagtgatttaaagttgaagtctaggggtggaatgctccttgcatttggatcattttacatctttggaggcaaagcctattttatctattcctactcctattgacagagaggacatacttttttagaacttctctacttctggctgttatacggtgaagagtgggtattagagcactgtctctcgattgggttgggggcatgaggcgtcttccactagttcaacttggtggtagaagtatgtttgggctctcaatcttcttcctaaggtgaagaattttgtttggaagacctcttttaattttatccatacttatgctaacttggctcgacatggtataagtaccccagatgtgtgttgtggtaatttgcaacacgcaagtatacgtattattttaacaattaatactcacaaagagtgaggtcgatcccacaaggattgtagttaagta

SEQ ID NO: 17741 - DNA, 8787 bp, Cannabis sativa
atggcaaataaattatgttttgaagctttacataagaccttaagagatattctaagaacaaggtttgaaagtagctctaaaaaaccttttaaatgacttttagtagtatgaagtggtgatttgatacaaatattaccagttgtttcgaaaagtacaagagctgatatcgttggcgcttctctcaactcatcatacttgtggccattttttaaaatatatgagctcaaccaaaatatgaggctatataatggaagcttaagtggattaagcggatctaagactgctaatatagctacttttgataaatagttattccaaatagaagatggttcattatatgatgacattgaaatttatatatgcaaaaattcatctcaagatctagtaaaattcatagttgaagctatctacccatcacttttacaaaactacaatgatcctgcatatttgaaagaaagagtaatattaacaccaaaaaatttaaatggtccatgaattgaataagatgattatgaatattaaactaggtgaagagagaatatattatagctcagacactcactgtaaacaaagcaagtgtaaatacaaacaagcaagtgatgatgatcttttgtatccacctaaatttttacatagtttgaaatttaatggcataccaaatcacgacattctacttaaggaaggtgttccaataatgctccttagaaatataaatcaaacagaaaatttatgtaatgacgcaagattgattgttacacatcttgaaaaatggttcattagagttgatattatttctgaaacaaatatcgatgaaaatgtcacaattccaaaaaattatcatgtctcccaacgaatcgaaatgactattcaagcttaataaacgacaacttcttttagcaccatattttgctatgataataaataaaagtcaaggacaatctcttcaacatgctgggttatatttttctaagtaagtatttacttatagtcaattatatgttaatgtctctcgaatcactacaagaaaagaattgattatattaaaggatgatgatgagatggaagatagaaccttcataaaaaaaatattatttacaaagaagtatttcaaaatattatttaaattatatgttatgtataaaatcatgaagtacaaacttatcttatattagtgatttctcatatatattttatgtatattcaaagaaatatataattactaaaaataattatttatttaaaataaaaaaataattattaaacaacaaatcataatattgtttttatcatagcatttattaataaaattaatagcaactatataaagcatactttttttttatactaacaatataaaatactttaaatttaaataatcacaattaaactatttttttaaatcaattattataacaactgtgtcataattaaactattttaatttaaatcaattattataacaaccgcgcaaagcatagttacgtaacctaattataaattaaaaactataaaactgttttctatttattttaacaaaattacttcatatattattgttttagtaatttttatgtagattattatgtaaattttagttataatttaagttgtttcattaattatgtgggttgctatgtgaaattttataaaattgcaaaaaaaaaaaaacctattttaaaatgtagaaaaaaaaaaaactctttattttattctctaaattagtataaatagtttcagttttgagtttgtagcactccaatatttattttttaaaatacattattaaaattctattttatctattttatatatcaaacttttacattatattaaaatattaagaaaataatattgaaatatgtttaattcaatgaatagttatttctatatttagttaagcactattcattgagctaaaaaatatataaaatagctaaaatttaagattgagctattttaactcatatattaggagtgctctagtaaatttaatatctttttgagtagttgtgttcattggattacttccaatggatttgtacccaaccaatcaaatccaattatttattgaatattgaattttgtcatccgatccaatccaattgaattgagtcatctgatctgatctgatccagtgaatgtattagattggatcggttctaaccattggatgcattgactaattttttattagattggattggatccatccaatccattttagctaccatttaagttaatttcattaaaaaaaatataaatattaaaaaaaacattatttaaaacttaataatccaacatatataataaacattagtttagtctaacttaattctcatgatcttataataaaactgttaaaaaataaattttattcaatacatattgataattttattagcgtttaggaagataaaaattaatactttaaatctaagattttttttctttaatctcatgtgttaaatgtatattaaatcaattaatatatatttttaaataaaatatattagatatataaaattataaatacattttaaaaatatataaatataattagatgaccattggatgataacaggatcggtttggttggttatccattggatcagatatccgatctaactactgatctgatccgattggattttcaaaatttagatccaattatgattggatgtccgattctattggatcggtccgttgtaattggattagataactttctgcacactcctatttttcagtggtatacattttatgttagtaaaattataatttttgtccaatgctattaatatgaactttgttaatgtcttaaatttgtaatcaaattttatttttgattttattaaataagatttgaaagtaacttataatatatttgggagttgatttcataattattatggggtgatttgcatatatttgctgttgcattttatcttcatattcgattaacttattccaccatgttgatgctgctacttaagcagatgacaaaaatgaataatctgtttatcactttgttgatgattcttcttctttatgtgttgattttcgtattggtgcttctagtttcttcctcctatatttgagttttattgaacttgcaaatcgcaagaacaatctaaaaatgcaatataatagaacccattttacatgcaacaaaaaacaaaaacaaatagcgaatgaaattgttcaaattttctatgaattcaagttcagcactacaaacataattttccatcacaaaacaaacacattttctttatcatatactttcttttcttctatttatttcaatcatagaaccaaactcagcgaggaaacccagaatccggactatctgcatgcatatccaaggaatcattcgacatgggagagttggtgtccctgttttggtgatgatgatggttcccctcattgttactacgaggtccatttccacatgtcaggacattagttggattagttgaatggtaacttccctgcgcagcaaggtgatacggttgaaggctttggcgaaccgggctagacagagcattagagaaaaccgagtttttagcttgctgatcaggattcccccagcgtactcctggtccaacaggagtgggagcagctggagcggttggccctagattggtcgagtgcattgcattttgtaagtgctgttgctgaagtagcattctgggagacattggaggttcctcggctccataatccagctcattctacaaatttacaaggaaaataatggcaatgtcatttaccaagcaacgcatacagagtaacctttaatagtaagatattataatagaaacaatgaaacacgcaaccagcttttctcttaaacgatttttaagaaaatccaagtacaaatagcaaaaattttgttctctgcacgagaacacagcacattaatgaccctgaagataaactgcaaacatctttcaggcaatacacaaaatttcataataaaacaagaagttcaatcatcttcaacttcaagattggataactgctggcaatgcttttaaggggaggagatgtttgcatgagcatagaagagcagaaattgctaagttaatggcaggttactttgctaattctccaccaaaaacccaaggcaaagaaaagagcacaagaaacttctatgttgaaggattgagctcatggtttgcctgcaatgcttaaattttattccccaaaaaattgtagggctcacacaaagaggaaatgttttcaaacttattatcaagcttagttgtgttttgacaagggatcatcttatattacaaagacagggaacaacatttggttagaattgaaaaagatggcagagttttaaagatcaaaaaagccattcagtatttcactctatcccaaagttgaaaaatcctattatttctctctagccatgttacaaaatacagctacattccctaatccataaaagtagaacttcaaagataccatcgaagtgtcaaataaaccaaccaagtttaccacaattgctttgacgtaaccagaaaattgagagttcttgtatcccaacgacaacaaattcattaaaattcacacatgccacattctatgttcaatttcattttgaatcccatgaaactaggaagttctgtggctaagtacataaatgcaaggcgcagtgagataaagaatattctaatgacatcgcagttctttttttccctccctttccctgattggctgaatgtttataacattttattaaggttttatagaggacatcttaaatgtatataagtactctatttatataaatacctgtaagtaggcaactatatctggtgttgtcactcttgacccttcctcttgctgccttacaatccattggtaaattttctcctgtgaaggaaaagatgaaattagtgagtgagtaattttgatacatgcataatgttgtgtttatcaaggacaataaaacaattcgagtgatgtagaattttatgtgggcaatttctatgaaaatatcctccagcaaaggcatctgtcagagtgaggtactatcaagttcaagtttttttttttttgaaaaaaaaaattgcaaaagactaaacttgcactaaattgattaaaatattcccagagccaggactaggagtgcttgataaatacataaaatgattcacaatcccaaagcaaattgaaaaacattaaaattctagtttctttttttacattggataaccataaagccatccaagaattcatcctttcccagggtaagtgaaaactctctaacaacttatatatcctctttatatatttcaacttcaacccaagttcccatgaagaacaaaaccaaagtgtggcctccacatttgaagactgataatcaaataatcgtaaagctaaaggagaaaataagtaaacaaaaatcaaatacagccaaataatctactaaactgtacaactacaccaaaatgtaattccaaccctgatcctgaaaagaagttgccataagtcagtgcataactgctatgcttcccaacttacctcttcttgttttttattctccttcaaataaggagcacctaaatgtattaatgaagaaagcagaaacaggagacaaggtttaggaccagagaccacccatctaaaccagagaccacccacctaacaacatcatcacatgtaatggaccacattgttccatttcaataaatagtgaagaaaagacaatttctaaaccctttgtcagatgaaactgaaagatacacccacttcaatttaaatcttcaatgatgaccttgtattcaaaacacagttagttgtcttcaattaaacaaccccagatcaccgccaaaactaaagatcccataacaccctacatttgctttcaccattgaaagagaaaacttcttcatagataagaggactggaaatggataaaaccaagcataatttttatgagatcggaagaaaaggacttccaaacaccttaaaagagacttgaaattcaaagaatccaattattaaccagtgacaacaaaataagttttgcaagaaaagatgcccactgaataattgaactagaccctttagtcatccctacttctctcaaatccaagccatcataaaaatactaacattgtaagtcttccttatcaataagaataacaattgaaattaataaggtaaagatgatttggaaagagaatcataaaaaattaaacattaaggaccaagcaaaaagtagagcctagggcgatattaaatcaagaatcaaccctgcgatgatttttccaaaatcaaactcaaagtggcaaaggtgggcttaggtggggttgaggtacttagctcaagttagatcctcacctccaacttaaagttggaaataaatttaaggaagaattcaggaacttataaaggcagcttgaacaacctctctaacaatcctgttcacacccccctcattcttatgggacaatcctagtactagataaaattcaccccaaactataaaggcaaatccattttgacatcaaaagttcaaagccttacttttatacttcagataaccaagccactattggattttgaatacacagcaacttcccaaacacctagcgagctttagagtcaccatctttctctttcccgtggattgtctggcatataaaattttccagctatgatagcactcctaggacttaacaagaacaaaataaacaggctttgaagccaaaacaaagtgaacggatcaaggtgagccttccattcaacctcataaaaaccagccctgcaacccactaagtacactttccccattcttctttttctcgagcctaaaaagcaagacagtccaagccactccacaacatcccaaagacttaaaaataacatttagaaaaacatctgtctgttctaagatgaaaaaatctggtagattatacaaaaccaagaatatcctaaattgttcaactctgatcctaacaatttagttaagcaagaaatcaatactcatattcaaggtttccacaactacatggtatctgtctgttctaggaggaaaaaatctggtagattatccaaaaccaagaagatcctaaattgttcaactctggtcctaacaatttcgttaagcaagaaatcataactcatattcaaggtttccacaactgcatgattgatataatcaatctaatctttcacacctgctgtactgttatagtgattagtgagtgatgtactgtagggcaagcagaagagtcagaagtagccgagttcatgttcgacataacacctaaaatttcagaaatttttgctacttcccccttctatgagtaaatacctcacaaatgttcagtaaatgtgcctgaaaatgttactttgctacttctggattatgtactttcgatagatgaagaatttacttggttggaagatattcttccttgtattttgataatcgtgtttcaagattcttatcaatgaaagattggtatattgccataaactaaattagaaaataccttgcactggtaatgtaaagacaaaaatactgcatctcattaccctcatcgacatttaaactgtatttcatagaagaaagaatgaccggaacaacatattttgtcacatggcctccggcataagattttagttaaagccataaacctttagagcctccagcagaaagagaaagcataaaagattaagaaaatctttaagttaaaatatgagtcatggctcctaactcgagaccgaaaatcccaaggcagaaagaaacaatttacaaacaacgaaatggaataatcttcaaaagaaccatacattacataataaatacacctatagatatacaacaaaagagcaatgacccaaaagtagatacttcacttcaaagacacctagaacaaacaagaatcgtaacccaaaaaagaaaaagaaaaaaaaaatctacggcctaatcgaacaaattgaagtttaaaaaacgttattcaatcagtagagacatatatcttgacagcatcaacatcagatcaaaaggaaaaaaaaaaaaagacgaaccaggccctgacgttcgccggcttggaaggagaggcgctgatggttcatggcctgggtgtagagttgggagagagagttggcggcgctgcaaaaggtggtgtacatggttcgatcgacctcgtcgaggcgcgtagcgtctgactttcttttcttcgccatttttgcaagaatccaaacagaaaccccagagaagagagggataaaattattcgagtgtttttaaatttaatgtgtgcgtgagcgtgtgtgtgttgtaaatgaatattaagtttattattaataatattattatttgggggaggaggtggaggagaaggggttttcccttactttttaaggtccgtgaaaatgaatgaatgggttagaaaagaaagaagacagaagaggatgagatgagatgaggtttttactttgtagagaggtcacgaaagttggtgcctccctttgccctgctggaaccgtagacagccaacgacattcatcactccggccattctgccacgtgtcttacacgtgggattataaagacacgtgggattatttttttcttcttcttttctcttttaatcaaacacctgcaataattagtttgtgtaaaatgtaagtgtttttttggcaataacatcatctccaatggatttggtcccaaatatactatcaaattatatttggtcatatttttatatttgtattttttttttgatgaaatattaatttcattgaataatttaa

SEQ ID NO: 17742 - DNA, 4730 bp, Cannabis sativa
gagagctttttaattgttttttatgattttatattatatttatttaacattatttgtagatttttaaaattttttgaataattaagttatatttttttatacaaataataagaaagtatttaaatttttgatattgtaaagtactatttaaatttttttttaaaatttacaaataatctataacatataaaacttttctattaagtcgattaatgtatgactcagcaactagctataatacgaagcattgaaatttgttataataaaaaaattggacaataaaactttaaaaatataagatttatgactaacaaaaaatacgaatcaaatttcattttaggaatctcacaaaccaacattgtgacataaaaaaaaaaatttactaataaaatatttaaaatagagaaaattttaaaatttagagtatttaaccaaggaaaaaggagattcttgaatattcattattatcataaaatttccctatatatgttgagtttatttagtagtgtaatacccaatatataaataaatatatcaaagcagacactcgtggataataaacaaatttaaattaaataatttatatattacttttgcttttccataaatattatatacaggagaattatatatgtaggacaaaacacgaaaaggagctccattactcaaggctgatgaggcttttcggcaatttaatggagcaaaaagatttaagcacttattttctctccttttttttttttctttcatgtaaaaaaaaggcaattgaataataacaaaataatccaaatgctttctatattttgctataatatactacaataataatccaaatatacttgttctttaaagcagagaaaatctagatcaaaatttgcttgtattaattaatcctagcctagagatcgatctaaatatactttctcataaaacatccatatgtcatataatacaaattactttttgagtagatgtagccttgtaattgaggtttttgcaataaagatatatgtatggataagaaatatatatatgcattatagaacataagatatagaaatgtaggaaaattctcgctttttatacataattggctaagtatgtggaagattgttgcttttgttctttatgggactaacctaattggtgcacacgtagttagttagattgattgatttgttatttgtcttgtagttttgacccaatatagtggacaagccaagtcacccaaaaataaaagtttgtagccctttgaaaattaaaataattaaaagaagagagagagaatagttattactttgtattagtattaggtgggacttgggagagaatgagtttgtttatgaaacttgagtagtttctgacactaagatatgtgagctcaattattgacattttttatctcaaacgaattgacattttttttttcaaaaaaaaaaaagcatgattagaaataaaattaaaaattaacaaaacttcaaattcctatataaatagatgatttcatttatttttattattcatataattttattacaggtggtcccccgtattaggacttatatgagtttttggttagtatatattattgaaaaaatatgtagtgttgtttgatatatttttttttttttgggggaagaacatcagcttgttcattagataagataattgggaagtacaaaagggattccctccctatggtaaacaccattcaaaagactattaactctagtcttttttgttacaaaatgagcagcttgattgtccaaactaaaaataaagaaaaagttataaaacattaaaacttaacagtatatgcaaaatctccatagcaataggtcttgtttctaaaaaaagaaggcaattctttttttccagtgcttgcacaataaccttagcattagaagctatggcaatggactccgccttggctgccaacccgagctggaaagcccatctaattgcttgcattttcccctctgccaccgaacttgcatgattctgttttgcataccaagtccatcttcctgtccttctctcctaccatccaacagccaaaccaaccaccccgtctttccacgatgcatttgttaagcacactatctctgtgttacttggaattttggcagccacggatgtttacctcatatctgtcactttcccatgtctcttgtcggagacgttcgaaagagaacccagctgaatttgattgagctcctggaaacgcctaaggatgttgcttctagtattatgaatgtctacagcctttcccttgaacaggctttcatttcccgcacgccaaatcccatcaaaaaggcagccagtgaactcaagaaacttgcacttcaaattagtgggaatgcacgataccaaacccagtataatgtctttttagatatcatcctccctaacatcgatccgaattggaaaaaggcaactgaaccacaacggctttgcgaatgggcattcccagaatacatgtcttattgattcacactccgtttcacagaataggcaactcttgtctcgaatgaaaggcggtttatcatgggttggaatacaatcagcagctacccttcatatcttcatcgaggacttgatatggatattctggttccatattaaattccacaaaggagacttctcgtcaactctattagcacaacatacctaatgagctctcttgacagtgaaggccccatcagtcgactccttccacaccatagtgtcctccaccgaggcagggagtctaggaatcaaaccaattctggctcctagatccctcccaaataattgttgtaggagatccaagttccaacagttgtcttgtacagaaaggccagccaccgtcttcaagtgcgggttactacttttgatcctttgtaaaaggtcatagaactcgttataattaagccatgggatccaaggttgattccatatatcaattgaatctcccctccccagtatggccagaccccccaattgaatgatccctctagactccaagatacccttccataatggggagtcacctccttttccttccacttcccaaaaggacttgttcttgcaatattttgccattagacatttaacccaaggtttattcacctcgtttgccaattgccacacaagtttcgctataatagagctttgtttgtgtcttctaatcttctaaagtccaacccttcctggcttttaggaaaacaaaggttgtcccaactccttatggcattgaatttttctttagctgtccctcctgtctaccagaattttttgattagcgcatcaatctctctacatgttgacacagggattttataagttgacatagtatacagtggcagacttaaggccactgacttcaccaaggttgttctccctgcgaaagacaaattcttaactttccatccttcaagtctctttagcaccttttctttgagtcaccagtagtcttcttttttccttcgtttgaatacaaaaggatttcttagatgaagttcttgacccgtactttcttcaacctctaagagccttagaatattttctctcttacttcggtccaggttgttagaaaatagcacggtggactttaccttactgcacttctgaccctaccatgcctcataaatcttaaggcaatccataaaaattgtggcatttttgtcatctgctcttgcaaacaaaatggtgtcgtctacaaacattaggtggcttaccggcggggactcctcaaaatcttgattccctttatatctcccatttcttgtcgtttagtaatcaactttgataagacatcatggcaaagaaggaaaataaaaggtgataggggatctcccaaccgtagacccctcttaggaaagatcttcttctgtggaacaccattgataagaaccgagtaagacactattttgatacatgtcattatcagattgcgcacctggctatcgaaatcgttggcctccataactctctcaatgaagcaccactccattctatcatatatcttatgcatatcaagctttagagccatcaaacctccattacccttgttctttttgatagtctgaacaagctcctgggtgagaatggaggactccgcaatccatctactgggtatgaaagcagcttggaaaggtgacactagtttgtccatgaccgcccgaagtctggttgcaataatcttagaaatgatttaatacgcaaaattgcacagactgatcggtgtgaatttttcaacagatgtagcatcttcccctttcaggatcaaacaaatgaaagtgtagtttaattggctctgaatcctccctttcgagaagaaagtttggaccatttgaataacacttttaccagtaatttcccagtaatttttatagagacatcctggcataccgtcggggcccggagctttgagaggatgcatagcagcaatagtgttgatgattttctcttcccccgggatactcctgagcatctcattctccccttcagagacgaacggtgtgaacaaatcattaaaggcttcattaatcgaaggaaattaagtttaatttttggcgataataatacttaaattatattttagaaactcgtacctaaccattaaatgttaagtcattatctacgtgttattttttattggtatatttaaactattttttttaaaaaaataaaagttaataacttgactaatcaataattgccatgtggcaatttaattaacatttaac

SEQ ID NO: 17743 - DNA, 4899 bp, Cannabis sativa
tttaaatagataaatagatactatttccaattgagattaaaacaatatattttacatttaatcgtactaaattaaatttccctttgaatattataattatcaaataaaataaaaataaaataaaataaaatgatgcgctggtggttataagaagatatcctcgactactaattctaaataaatccagttggattggagtcctttccattttttttttctttgtttattggtctgcttcttcaagtttacctgccatggcaaacccttacagatcaaagtactttctcttttctactattgttattcaacaatctctctcaacaaaccatttcacttatccttaattttcttcttcctgtgcagacaaggccttagcgcgaggccggtaggtaccgccgacgaaattcagctaaggattgatcccttgcacggagacctagatgaacaaatcaatggtctccattcccaagttagacgtcttaaaactgtatggtttcgatcccttcccttttttaattttatgcgaacaatttttcttgtttgggaaaattggctgtgaaaatcccagccatgggtttttctcgaattttaataattgatgctgaatgctgatatgtaaaaggggaagacgacaagttaatatggtcataattttcatttgttctttgtgtttgtgatgatttaggtgaaaacagtacaaatatagattgcaattactaagacataggtagacataaaaacaaaagtctgctttgttcaatgtacgcatcattgttttcaatctactatctagtatacaataacttttttgcattcaaattattagaagatcgcatgtaactttctttttactcgaaggcaaattctttctgtaagaaatttgtcatagaaattagtatttcataaaaagctgtcgtaactcgtaatcaaatgggggaaacatggatacattcacaactctattgtttctcaagtcttgaccctgtaaaaagtcttatgtctttttctcctcttataataatgtaatgagctgtttaataaattcatccagtgggaaatttggctattgcaccacactatttggagtgatgcaatgcaaaatgaggcttcatttgtatacgcctgatctctattacttttaccggggagacaattattagaggctaagggaacagaattctgttatggtggtgtcatagagagaataccagcttcaaccaatggaaatataactcgcttagtacttacaattaaacttctaattatcatatttcagtataggtgaaattgtgtaaattcccaatgctttattgctgctacaagagaacatagtaattaggtctgtactagatttcgttttcctaatatgtatatatatatgtgtgtgtgtatctataagaaatcctcctgactttctatacacactcaaatttgaaaacgtgttcttttatcaccttttaactaaattattgctcctttcctgtattgaaattgaataacccgcagaagcttctagggaagctaacaactgaagctagttacagttgttatatgtttgtagtgtaatccaataacaacctgataatctcctcgtgttgcacccctaaattttaaaataacaacctgataatctaggtgaatgttcttatatgtaacttattgtaaagaagcaatttaagttccatgaagtttactctatcattaagctaagattcattgaaaagtttttcctttttttgcaccctttctcgtatgtttgatttccattatagcttacctcaagaaattttgctagtaactttcactgccccagaaagaaattttgatccacctgttcacttgacagtttacaattgttctgcattcattggaacattccctacctgattttagccacttttgaatcattgatattattaggtgctttctacatacttgaaatccttcactgtctatcttatgatcggacttctgaaatatatgaatcacattatttagggagcatttgcctaagcttgaccttatctttcccacttgaatttactatctatttgagttctattttttagtttcgtggctggactagaagtttgactgagttatattctccagactagtagagcactgacttctatttcacttcttgaagtccttattattgagacgaaacctctaattcattcatatctgtcctatcactaaaaaaaaaaaacaacatatgcgctgatgttgtttgtcttttttctttttttttttttcgtgtgtgtgtgtaagggatgtagtttgtgtttaatttatagagaattgggggtatatccttgtgattgtgaagaacaaaagtaaaaattgggggtattcccttgtgattgtgaaaaacaaaagtaaaaattgggggtatatccttgtgattgtgaaaaacagaagtaaaaattggggaggatctgattccctttttaacacaatactgattgtcttaatccccatttcttaattaatccaacaattttgaaggcatggctttttttgtgcttaacatgcagcaaaatatatgtctgccattatgatattagtagaaatagtttttctgatagaaatagtaaactggtcattcagtgatcacctttaaaactagagcagtgctgttttgtggttctattaagctaaatggtttcataaggcatatctttgggtcaaacccaattttgacaataaaatattgagtgctgttttatgctctcattgtattactgatccacaggtggctcaagagattgaatcagaaacaagggttcagaatgatctacttgcagatttggtgagatatatgccattctttttctctatttaaactggaagcttatatatattttttatgtaaaagaaatggtatttgtattagttttgttaccacggtctgctttattttgcagcatcacctagctactgcaatttaattatttcttaacgtaataaatgtaaaggatgtactgtagcaagatgtagaagttcccattttattgggagtgcttgctataagaaaactacatactgcttatgacattcttttaagcattagcaaattatattctcacaaattgctttctggtgcttgtaatagcaattgaccttgagtcaagctggggctggggtgaaaaatggaatgaggaggctgaacaggactatccagcagagctcaaaccatatcgtgcatgtggttatttttggattaatatttttcactataatctacttctggttcaaggtagttggaaaatgaagattggctaggttgcaccaaagttgcacgaggcatggttgtttatgaactcttttggctttttttttttgtttattccctttaagttacttttggtccagctggttagaagatggaagaccaactaatatctcagtcccagtttcagttcttaaacgcagccactatttgggattgagaaggaccacatcagaaacacatttaggtacactatttaatgtttaatattagaacattaacatagttttaaagttcctttaaatgtatagccagtcatatgactaatattcaccaaattctttcaacttgtttgcttttgcatcttctaatataatcatcttgcaaaattttgatatttacaccaggttcttcttctgcattgtattttgtctagttcgcctaatatagcatagtctagattctaataaaaacaccaaatgtggcaatgcgtacagcagagtttaacaacattctgaattttaggcaaatgagaatgtggtcttttattctaattttccatatcttaaagaaaaaacttccaccacaactattggagtagtttatttacttgcatagttatttttatccacaaaatatatctgctagagttgggttgtattattattggagatgaatgagataggaaaaaagtggaacacaaacataaatcggattttgtttacttggacttgtaaccaatatgtttaggacaatctgacgttatactctacgttagtgttggagataggagaataggattgggaattgagcagtaaatacaattgaatttttgacaaagcaaaaagctggcacaagtatgaaaaaatattgttttggagtctttggacttatttgtgttacaaattgccataatatgacaggaaaaaaaaaggaaaatttacagcaaaattactgaaactttacttaatggtgtgtttaaccacacatttttttttttggaggggaaactctccaaactttacatttgttgggagtactcaaaatacattatagattccatatatattatagacatgtcaacagttacagtttgtagtgtacaatagtagtagtgtactgtaaactgtaaaggccgtaattaattgtttaaatattataaaagtaattttaaaatataaaaaattattaatcattaaaataataataataaaaaatctttgatttttttttgttcttctctcttcatctgtttgtgctcttcataacaagccaccaccgccacctaaacaatatcaactaccaccactacactactacctggacaatatcacaaaaaatatcaaccaccacccaaatgttacttgcataaatccatgaaacaaacagaagagaatgagagagaaataaagaatcttacgtgcatataagtatttagagtattttagattgccaatatcattactgctttatgtcagttttatccaaaatcaatttcatacatacacttgtaaaatctggatataattaaattgaattttaggttcacaaaatgtgtttgttaattagtaattttttttcccaaattttgacatataccaaatcatgctctttgaatttttttggccgttaaaaattttacctgaactattgagattattaga

SEQ ID NO: 17744 - DNA, 4778 bp, Cannabis sativa
atttaaatatattaataaaaaattttaataaataagaaaatggagaaaataaagaataagaaagatagctcatatatgatgccacatagattctttcaaaaccttcttttatatatatactagggtactaattcgcgcttcgcgcgatttttcacaattattgtagttacatttgagtattagttttaacaaattataatgtgaaatttgtactcgtaattacaaaagggaaatcataataaactgtttattaaatttattgaagaaaacaaaatatatatttgagtatccctttacatagatcaaaaaacaaaaaaataaataaaatcaagaaaagggcctttcatgatattttttgagcttgttccttccttcactaaattggtatatatcactatgcttttcgtactataaatatctatacgacatatatacatatacataataaaaagaaaaattatggcagatgttttaaatacgtacataaattcaaagattaatatacttcataatttagtgcttctaagagttttatttaacaaagtaatattgaaaaaagaaaaaaaaattgtgtgaatcttgttatatagagaataagaataataaggttgttaaactaatatataataacatttacaaaatttttgaccatatttctattaagtaaaaaaaaaaaatacttttacttttaacatttacatattacaatcaaaattaataaagaaactatgtagtaaattaaacactcgtatatgattaaaaataatgagaaagagagttaagagtgatttcctcaggaaaaaacctctaagcacattgttctacatcttgactcctcaatttagtcttactcctaatgaaataataggtaaaaaaattgaaaagaaattgagcatttgcttacaatctcaatttcttcaattgaaaaaaagagtattagagacaataataaaacaaaagtgttagtttatagcttttgaaataaagagatcaccaagtgtaaatacaagaatgaaaaaaatagctaaaatattaatagtcatagaattatgcaaaaagttttgaaaaattgatcaaacaacaatttgctaacaaagtagttggaacaaagcaaatatgatgacataatagagtaattaatttggatacccgagaaacatggtatatgggatcatttgttaaaggaagaaaagaatgaagtatggaaacaaatcctttagaaaaagaaatataaacaacatttgcatatctttttactattttgcctgagaaaaaggagaggatagctaacttttggagataagttttcaaaagcatctcaattttttcttcttcttcctcttccacataaacaaaaccaaataaaaatttgtatttgttgcagtaattatataatgaattataatatgttctaaggcaatagaacattacaaatcttcattacccttcctatgtagtttcaatccatgatatagattttgacaattatatatttttaacttttctttaatttcctcaattattgaattcatcattaaattcagagaattagagattatttaacattattgaatctatagaatgatttgcataataaggcaactaattattgtaattgaaaagagaatttacttatgatatttacaaatttatactatatatgataacattaaaagtgaattctatacctggtacctaaattgctctttcttttctttataacttgaaagaggtacaacctcaacctatatcaattttggtcagcaataaacatagttaaataaaatattttcataggtgaaagagaagcagtaatttttatagagtatgacatctcacattaaaaaatttactcaaaggagagttcctatatgaggttgagactttggcaccaaggttcatatctgacaaaggaaaaaaataagaaaggaaagagagacattgaaaaataacatactgtatgtagaaaatccaacaatgagatagaaagaataaaaagtagtgtctgaacatcttctctaagaacatgttctaaattatctattaagaaacataattaaataaatcttactatgaaacttaactctcaacaggaatcatcttaaattatgattgcaatacagattaatagaaatgtggaacacgcccttcttctccataacatatgacaaagatgaaagttgttttacatggactaacccaattgcttcatcacctacaagaaagtttaaccataaagctatataaaatattagtcaagaatcacttaataatatattcaaacacgctttttgatgactcatcaaatcctcatatataatgtattttctaaatgtagttaatgcgattacacaaaatacaaacatacatcaatatacaacaatatatatataattaagatttttttatcatcaacaaaatgaataagaatttttatgaaaatatgaaataaataaatatacaattagatttggagaaagagcaaggaatagtcaaacgcatcatctttcatatttagggggatggtctacattcatttagatataatctgaaatactactacaaaattgaaggaaaagtacatatgaagaatatacatatatttaactcattaacaatttagtattccatatggtaaaagcaatataatactccgtactcatcatatctattacattagtacaacatgactcactcacttaatgaccgaaaaaactcccaaccactataaaacctgagcctattgataattttggcatatttgatgttgcatgaatgtagagggaaaaaaaatatagtagaactaattaaaatcataaagtaagaaaaaaaatatgccaagattgaagtgcttaccaattatgaaagtgtaggtcaccagtacacaaagatcatacactaaactaaagaaagggtgcaagtatatgctttcaattctttcaatcccaatgtttatcttgcaacttctaacgttcccctgcaaattgatttaaagctttttaaaaccacaatatagttttccttaatatatgataatttaggtccattttgagaaacaaaatatgtgcaaacatggaacataaaagtagagaaaatgattaaatggagctacatttgataatcaaattcatcccataccttctaactctatcattagctactcataaataaactttctagactttcatttgatatttaaccaaaattgttgtgtcattgttcttttcttaataaaataaattactaaaattctgtacaaactatttcgatattgaatcagttgacattgtatttatatatatgtcaagcttaaaattaagccccctcctcttatactactactccaaagacaaaatcaatcaatgaacatacttataagttttcatcttatcaatccaagaaacaaatgtattttcttatctctaaaccccaaaattccatgatctttgctcttattcataaaaaatctaagagaagtatcctgtaatatattgataaagtgttcgtagaaaggagagacggttggcatctcccctaacagggacgggaacagccttcgggcttccctgttatagacacacccggtttcatcggtcaaggctgtaatatattgataaaaaaaatatgcttaataaaattcaaacacaaaaagaaaaagaaatagatgttagtatatagtaaaatggaggtggtttagtttttctgtaatagtaaatgtggtttggaggggatgtaaacacaaattgggctccatagtataaaacatttggtgtagtacttcttagaattcaattctctaggttttttagtttgttctaacatttggtgtagtacttcttagaattcaattctctaggttttttagtttgttcttatttatattccctatatcgaagagctaattatagaaaaccaaaacacacactcactaactcactcagtcacacaaatcaatgatcaaataaataaaaaagtaatacttgaagataagatttgaagaaggcaagagaatgattacgaagtagtgaatggtttgatctgtagtgactactgaattgcaaatgatgaatctaattttttccccttcttcctcacaaagacatgagaaacctaaaaaatgaaggcttgagtttcttaatgggcgaaagggtggaggccatacatcgatccactgatttttttttttttttggagatggaagggtttcattgtttctatttagatcaaatgaaacacaaggattataaagaatatacggtaaagtctattaagacacattaaaaatattaaggtccattaaaactaattaataggtttaaaatacatattaaatcaaaaaattaaaaaaaattagaaaaattaggaaaatagagattagtaaagaatcccaattaagctgccacatggaaggttttaaaccttcctttatatatatatatttatatttatatttattgattgatatatatatatatatatatattgattacatcccattaataatatttggagatttttattttcattgaattacatactcctttaaattaatatgacttgtaaatatattaaaatctatgatatttttttttttttgagaaaaaaatctatgatatatatattagcttatcttaatattttttcaccataattttgtaataaatttagaaggtgttattatttagtataatggttgaaatattaaaaatcaataaaatttaattagttaagaattaaatttattttaatagcaaattattatagttatagtagacaaa

SEQ ID NO: 17745 - DNA, 5831 bp, Cannabis sativa
  modified_base (5763)..(5779): a, c, t, g, unknown or other
ctctctctctctctctctgtcacacacacacacaacttgaaattctgatatcaataaccaatggtgtgtattagttcaggatgaggaattcctatgacatatataatttgtttttttattgaatgaattttcggcatattcgaaagagaagtatatataataactattggaagaaacattgcaagtaatttggggttatatattgagcttaagctatggtagtaatagtagttcaagtcttgaactaatgtttagtcttgtttactcacccacattgaaagtgggtctacaaacatatttgaagggggtgatgtgagcctgtgaaataaaaacatgatgcaaattgaaattctattgtgtaccaaataaattcctttttttagtctaaaaagaatcatagatttgaaagttttttggtcactttaagcaaaggcccttgtttcattttgctgaaacttttcttagagtaatgtagtgcagtcttcaatcatttctagctagttctgagtaggcaagttttaacttttgactccagatacactcccaaattaagaacttaaattattcatttacacccatgaagacttgtaaccgatacttttcaattgtcaatgttgcatagcttaatatatggcaataaaagttttactagaatatgaaaagtacttggttcgtacatattcttcaaaagcagttcgtttacttttgaaaagttaaccataaagaagataactagataagataagttattacagtagaagggtgtaaaagcaggaaatgttgtgagtcatgactattaattttcatgtgtaaagtattagagaaagaatactaatattaacaaaagattataaattatggtgaggggtataataagacaaagagaagagcacagtttgtgatgatgtggccattgtttggacacaaaaatgagacactagtagtagtgaacatggtggtttcagcttttggaatttttcccattataatttctctagaaagaaacccaacgttctcacccactacatatctctaagccctaacgttgtcctttactgcatgacatgcatttatatgatatttttatataatgtgaaaaagatcccatgaagaaacgccgctttctattttgttatgttcccctttcaattatttaaaagccactttcatgattaatttcatgctttgacttaaagctaatgtgatacaataaaatgataagcattaagtgagaaatattggtactcatctttcttttgattttgccaataacaagtttgcgtgaagcaaagttgaacctaagaaaaatattcatccaactaaaatatgtatttgttcctacactagtacacttccgcagttaaaactatctcataaacttgaaacaacttgatgctttttatcgacggttgtaaaggtagtgtctttgtagatctttgcagtccatgcacgtccatggatcgataggagggtccaggcagtaggaatgaatgcgtcgattttgacacacattgcacatgacaagaagatccactggctccacacgacagcatacgatacaaacagctgctggttgttcatactgttcaacctgtcaacagattgtaaaacacataagaataaggcaatgaaagagaaaaattcaagtctgaacacaaagttccaatcatgtagtgacactaggaaagcaggtgaacaatgctcaatagataagagagccatatgaatactgagcctgctattggcaaactttttatgtgggtcagtaagtaattgaacatggctccactcacatgcaactgagctgttcaagatcccacatgtatagtatatacaatagtacaaagacgaattgcagtaactagttacttgaagtctgggccagtctttctccccataaaagtcctgaactttctttctttttttaacattttaaggtacaggagttgttgaagggatattataaaattatattaggcattacccacccactcattttttttattgttttacaagtgatcaggccagtatccaacttagtaagagtgtaagacagttaggtattaattacacggatcattataattgaaaatatgaaatagctaaaaaaacaaaacaatcacatagcaaaagaaaatccaatttcatttttctaccactaacttacatactaataagacatgaaatttacttcaataagcataaatatatggtacctgagcactagcattgtgagtgtcctgttcataaagtttcaacaagtccatagttgataagccacatggaacggtttgtgagtaaaccttctgatcaatggtagctgtgtcctcatactggataatgttattaaaacttttcttgcacaaagggcatgtagatatctttcttcttaaagcctacatgcaacaccacaaaactttgagcacataacattaagaaaacgaagtagtacaccttgacagtcctaaagctctacaactcatgcacacacagacatcaacttttcatgattatctatatttggtttactttaacaattcagaaaatctacagtagctaacatatttttacttcattgcggaaaggaaaggaacaaagggctgtttctcagactaacacaatcaaaggttaggctgcaattttattttttaaatacaattataagccatgacaatcaatactaattgatagtaacattatatattacaaacataaaataacattcaagttgacttagaagaggaaaaggccagaatgcataccatatgatcagcccattctttgatgcatgaataacagaatcggtgaccacaatgcagaactcctcgagttgagctgtaatctgcccaacatataacacacgataactccatcgaagaatcaatttcagaattctgagtaatctcaatcccttttgctgggtcctcatctgacttatctacacccgaacatccatcttctgaagtcctttgtgcagtacttgcattctcagcatgcacatttgaatccattgaagcatttatacaaataggaccatcaactacagctttagaatcatcaactctagttttcctatggttagaaaatccctcaccagatattcttccgtcttctaacacattgtcatgtgtttctccatttacatgatgaaacagagttgagacatcttcgtaatttgagttgttgactctgacaggactgcagtcttcactagagtctgaagagcaaaggtccacagtatctttgtttttcatctttttaaagagcctccttcctttacgtgaggtttcagccttatttctttcgttaccaatggaacactttcttttacctctcaccaattctatagacgaatgagaacttgactctacatagtttttttgagaacgagaaagaggtttatttcttccattaccattggagctctttcttttacctctcaccaaatccattgaagaatcagaacttgactccgcatgcttttcaaaagaacaaaaatgataaaacgaattgtcacactttgaatatttctcacaaatatgagtgctaaccaggaaggaataaaatattaacagcaaaatgaaacctctcaaaatctaatttttagggatttaatattcagaacggaaattttcgtttcacttaattatacctctattggaataaccattacaacaatcccaaagaaacatatattacttccaactaaaacaaattctcaacatgttcaagtgcaccggctaacaataactacgaacattgagaaaaaaaaggaataaaatcaaagatttcaaatactccttttgcttcgtcagagattcagaacacaaaagtcacaaaatgcagctgaaagtaagggcttgagtacatgaaaactcaaaagaattggcagagaattaataaagttgtttgataactcaacttatgtacagaaaaaattacctggtttctaagtaatccagatgaaggagattcttgaatagagcatctgctacttgaaggcaaatttttccctaaatggcttctaacaggtttatgctttgacttcttctgagaagtgctgagattattcatatcaggaaacacattctgtaaaagagagagttgaaagggaaaaacaaaaacagaacagaattcttaaaactccaaacagcccccaaattttacactattgtataactataagacaaaccattttcttaacaccaaagataaatagcttcatatatcaaattactatcataattcatgtttaagcgcccccataaaaatacatttacattaaaaatgaaacaagcgtcactgaacaaaatatggtgagaaaaggacccttgataaaacgataagagtgaaagatttagtagagtaacctcattcattaaagaagaagtattccgaacaggattcccagaaattccaagggctgtttcgccactttgttttagaaagccatcacaagtatttgattcgtgagaaagcaatttgcgttttttatttttcttgaagacaccaacttcagcaacacgtggaacttccatcgttaagggcccaacttcttgcccactgtgtagaattaaaaatccccacggggaaaatctcagtttcatttgtaggtgaaaagtgaaaagaaacgcaaattatctcatagctcattaagaaatacaaaaaccatttgataatacctttgaagagtataaggctcctccggaagacgttttccttgctttatgcaatcctcgacccatcgatggttgactattatcgtattgaaactcttagcaagatcaaatctccttccctcaaatttccagcaaacctaattcccaaattttcaatgccgacattaaaaaaaaaaaaaaaaaggttctttaagcagtatcccgaaatgggttatgaaataatagaagggaaggagaagaaaaaggctcaccagatgagttattgattctgacactcgacccacgcgatgggcaccggcatgaagtatgagcctaacgaggtttaaacgctgggttccatggtacccactaacggtcgcaatcacagaatccatcctccactagaacacactgttgatttcgcaacgacggcctctcagtcccaaaagctacagaagaaaaacgagaaggaatttcaggaaatcagaacaaagtgtcggtggaataagaaagtctgtgtgaatgacagtccacagaccaagccttgctctggttcacaaaagaaactgagggaaagaggatagaagaggaagaagatgatagtccagagaaatttcttctcccgccatagacgaagacgataaagatgaatttggaaatcaaattgccgggaagcaaaaattttgaatcctgttttatgagacgtcttggaccggttctacaataggcccagagtcagtctccaacccaaagcccaaagtttgaagagaataccattttattttgggataattagataaatattgtaataagaaacccagtttacatatatggtaaaatttaataagaaaaaatatggtatttaaaataaaaaatttaacatatatgggatatgttattgggtgattctacaatgcacccccttaaaagggatgtactgatgcacccttaagttgtttcggcatccagaagaattttttagactaatttttttttcatattcatgtacgttataactatttaagatatcctacaaaattttgagaaattcggaataatttacaatattggaaacaatgatcaaacagtctattttacacgcgtnnnnnnnnnnnnnnnnncgcgtgcaacacactgtttgaacatagttttcggcgtgttaaactttttcaa

SEQ ID NO: 17746 - DNA, 2561 bp, Cannabis sativa
atgaacactcctaattccaatacaggatttgaaaaattttaataattttttttatcaatttttttaagcattttaaattttattccattacattcatattccaattttcattcccattctaattcttatattttcattcctctcaaccaaacgtcaccaaaaaaaatatataaaaaaattgtgtataaagtaatttctcaaaaaattatgagtataatttattttaagaagaatcactcttttcaccatttttaaattgctcttctattaattattattactgaattattttcgtaaaaatataaaaataattatgattcaaattcaacccacgtttatgtttcatgaccctaacttacaatcaatttcttcgtttcattttatcgtatcataacttgaattgctaccttagtaatatcttgtgcttgtgttaattaccaatcaaattagaatactgatttgaattttatttttaaaagcaatctactaaacaataattttatgttttccaatcttaaagatgaattcaaaatcagccccttaattgattagtatttgacattgaatatcaagctttataattatttttttcttcaaaatgagacacaatttcaattttataacaaatttaacttcaaccttactgaacaattttacatatatcttcatactcaacagctttaagtattctaccatcgtacacacccttctctatctgcaccttagcacaaaacttatcagtatccacagctaacagcctcgcattcgatccacggtatgcgccattcacaaccctaataagtcctccaatttgtggaatcactgtctctagctcttcctgatcaattctcaacacatgtttgctatcaagcatttcaatttcaccaacatatttatcaatgacttttcttacaacccctttttgcttataataccctttctcagctaaggctttactcataaccttaacaacgattccttcacataaccaataatcctttctgttaatcttctccttcttcttctcctcctccctcatcagttcttctaatgctgatttcgtcgagctgctcccatcagcttttctcttctcgcccttgttacccttttcgctctccaactcatcaaacaccattttcgagctctctgccttctccttgcttacaatcttcgacgaggatgatcccagcgcaaaaccaatcttaaccccgctctccaatttcagttccttttttggctcaagctcctgagactgatctgagatatttgccacaggcattaattgctcagccctttcaatctgtttctttatctccctctcttgtttctcttcctccactaaatctgctttaatccttttgttcttcaacttctccttgaaaagggtctctgaatctctatcaatataagtcataaaccaacccttggccgtttcctcgaccttgcacttcccagttcggcccaagtgcttgacaaaatccgtgagcgtagcccactcggtggaattcatatgaacgtggtgcctgtcgttgatgtactcattgtaaactactgtggcggccacacggctaaaccggtggctgcgcttcatgtgctcgagaaaagtactctcgaactcttcagagtacccatcgataattcgagtagggttttggccgaagacctgcatctggcgttggtggccctcactcatacaatggcacttgaacccattctcatcccgacattgcttctgacacatctggcagtaccatcgcagcttctgtagacctttggctttgattcggttggcaattgctttaggcgtcagaaaatcattcttccccatcagaattcactttgctctgaataagatataatttgatatgatcggttcaattagcttaaaatatattcaaatacaatcagagtataattgaatctgaatcagaaaccctaattaattggaatatcaagctttatgaacaaacttagccaacccatctattaggtgaaatttctttaagcaagaattttcaaagggcaatatattcataaataagcagtagtttgttaatgatttctagacttagctaatcaacatcacttcatttgttttggcttaaacttttcaagtttcattatgtttcaatggttattgattttgttctatatcaaaatttaaaggccatatttacttcaaatcaagattttttcggtaagactaaacaaacaagtttgataaatttaatcactgaacacattcaacgactacattatggaattctatgaccaaaaacaaaatcaatgggaaaatttagggcagaccaaaattcttggaacatacctactgtaagcttctccggtggaccgtgatggcggaagatggcgccggcgggatggtgtggtccgctttctataggcgttggctcgtgtgcgagtatggctatggtggtgcggtggtggcttttgagagatctgagactcggagagaggttgagattcgagaatgtgatggtgttaggtttgggctgggcttgggcttcagacataggcactagacttaggcagcccaaatgaat

SEQ ID NO: 17747 - DNA, 7377 bp, Cannabis sativa
ggtccactaagccttgagatccaacaatatttaaaaatacatacttctcttagcaatttttaaaaaaagctatttttttagagagctctataactttgttattatctaaggccaatctcatatgtgaaaatgaaattactaaattatgtctatgtctataactacaaatatgtgaaaacaatgataagcattaaatcaagtgaagtgaaatccttacccaaaaaaaaaaaaaaaaaaactaagcaaccttaaatagaaaaaaaaatgtaaccaaaaaaattaagataaaccaaatgctaactactaactagtggtaacaaaagaaaaaaaatgtaactaaatagattgtaaaacataaaagatgaataataaaaaaaatagagagagaaagaaagagatcaacctatatatatataatctatataaaatatagttatgtaatagagcttttagtttaacgggtttagttttttggttttttatgttaactttaatagaatgtttttttatttattatgtatatttaaaaataaaaataaaaaattcaaaaatcgaaatctcaaactttattttaaaataaaaaataatacattatttaattaaaaaattaaacttaaatatattacacttaacattacttaattaaaaaaattatacgtacaatattaacttaatatatatttgaatttttataaggagagatcaacctatataatttaaaaaatagaaaaaaaaaaaaaaagtatttgcaccaaccaccactaatcaaatttgtttcaaaaaagaaaaacaaaaaaatccactaattaaaagtaacaaaaaaaaaattgaaacaaggcccttttcaaaccaaattaaagtagacataaaatattttaaaataataatcatttgaaaataaaaataaaaaaattatgtgatgaacttgtctttgaccacctttcaatttacaggaatatttcatcattgaggattcttttctctttatagatttggaatcaaaagaaataatcacaatgaacaaaaattaaataagaaagtaaaattatataaagtttagaaatattgtaataaataagaggcaagaagagaatgtatcaaattggaatactcaactgcattaaaataatattataaaatcttaaaaaaaaaatgtgggcaaaagaaaaataatattatgaaatcaattgcattaaatgaaaaaataaaataaaaatctctacatagtgagcactatttgggttcttaggtttattttatcattaatcatcttgagttaggacttaggagtgtttaaaacctactcaatcaacatggtcccatccttaattgaaattttgaaattcataattgtgtaatgaattgaatattggaaaaaagaaaaacatatttagtgcaatctcatcttatcttattatatataatacatattttttttcaaatatttaatatttcatgcaaaaataaaactatcttaaatcttaaataaactataatctaataaaatatgcaaaataaaactcaaatgttatattttatttttaggctaataaagatttttactctctaaactttgatatgtatcaaatcatgtctcctaatttttttaggccattgaaaattcttcccaaactattaaaattattggattaattaagggcattctttcaaattctattcaattttactaacgcgataattgtctatgtactaaattgtgcccctaaactttgatatatatatatatataccaaattatacctccctagacatttatttacgtcagactttcgttagtaaaattaaaacaaaaaatattgaatacaataatcttaatagttcgagatatttttaatgacttgaaaaatttaaaaaatatgatttgatacatattaaaattaaaagataaaaattataattagcttaataaaatttaaaataattaggcaatgattctaaagtgataatgagaattttatgtattgtgtttacgaattaatttggtcgagtttatgtgacaagttaatatgtaatatattctgatatattatattgtattttttcgtgtcttcatattcaatatctaagctcaatcaacacatcatctagtgtcatacttatgctttcaaaacatatattaagttgtgtttatgcctctcaaactcatacagtgtcaaaaagccagacctacaacatttaatccatattaataatattagtagagattaaatttaattaatctatcatttcacaccaaattacattgattataacttaaaatattccattcattaaaaactataatctcaagttatcaccatgttcacttaactttctccaataaatacaataaaaaaatatagttgataatgtagcctacacacctcataatattaataaataataataatattaaaaaaaattaaagtcaaagtatagtgggagctaccatctctgcactaaagcaaaggttataccaatttgccttctccaaatttctatgaataaaaagagtagaaagctctaacctttgatcttgacttgacatacccaataaaatcccttatgcattttacttatttattacttaaaaatccaatctttattactattcaaaaaataaaaatacaatctttattaatttttcattctattttttttgcttattgacacttaacaaatcttaaaagcccgacaaaaagagacgttggattagagaagaaggaggcatgtgggcttcctatgcttcttcattcttgggtttgtataaagaaaaaagaaagaactatcaatttttctctcatttagatttttttttagcttaattctcaaatttaagatcaacccagattgtcttttgtggattcttacatagtattcctcttacccttttgttgattctttccatttctatactttttatctttaaaaaaaggttcttgctttttgtctattatatatatattgttcaatgcttttgggattgataaggttaattataatattagattaaaatatcatcaattttgggaatggaaggaggcaaagctaagagcaagtttactaggatttgtgtcttttgtggaagcaattctggtcatagaaaaatcttcagtgatgctgctcttgaattgggaaatgaaatggttgggttttttttttttttttaatctttatttattcattattatattataatatttgtttgtatatacatcccaaataatcactgctcactgctctctgattttgaatttgaaactgttttcttggctttctttgtagaaaaaacatgttggaatttgaacacttttttcttatttttttactcatcaatttttttctttttctttttgattagttttgtttaaagggtttttttctatggttgtggattgcaggtagagaggaagataaatttggtgtatggtggaggaagtgttgggttaatgggtttgatatcaagaacagtctatgctggagattgtcatgttcttgggtataatatatatatttatataatcattgatttgattgttctcttatgcttaaacaaccaaaaaaaatccagtctttgtattaaagtttgtaactttacaaagttggaatatgtttttgttttgtttcacatgcagggtcattcctaaagctcttatgcctcatgaggtacccttttttgttctctttaatttattcctatgcttttgtcatcctcattgaatggctctaaattgtcctgaaaaaagccctcgtgtgtgacaaagtgacgagcttttttcataaacttttgtactgcatttttgaaacagatcccaaaaagtttataaagaatgtgaaagtgattttgttgttttgaagttgaaatatgctaattttttaaattggtgtggttaaattggtagatatctggtgaaagtgttggagaagtaagaactgttttggatatgcacgagcgaaaagctgcaatggctcgagaagctgatgcgtttattgctctacctggtgagaaataagattttactaatttgaaataaactttgagcaatttgatttgaaataattgttcttataggaggatatggaacaatggaggagttgttggagatgattacatgggctcagcttgggattcacaagaaaccggtaaccttttctttcaccattggtcattgaaaaaactacaatcaagtaatgaaaattttaactaggcattactctatctatgcaggttggtttgctaaatgtagatggttattacaattctttgctagcattatttgacaatggtgttcaagagggattcatcaaaccaggtgctcgggaaatcgttgtctctgctcccactgccaaagaactcatgataaagatggaggtatagtttcagcttatattaaaacttttcttttttgtttgcttgattgtaaatgtaagaatcatataaaatttttagttaaggaacttgacacaagtaaaaatggccatgtgagatttgaatcttttatccctagttgttgttgttgttgttgttgtagcatgaaatgtagacaaggtcacatggggtcttatctcccatccctttcaggcaaatgttctttttcattttcaagctgaccgacatgctcggtaaagttaaacacagtctgtttttattttgcagcaatatgctccttctcatgaacacattgcatctcacgaaagctggcagatggaacaactttgcgagtacccgagcaaagacaattcgaggtgatcgaaactgttattccctatatttctgatggtgattcatctgttcttgaaatgtgtaaaagaattcatttttatgggaccaaattactgttcattgccataatcttgtttgttgttctctttctatataatttgagttctagtaattaaattttcccttctcctttgaccacattatactttgttttatgtcaaattgatgacactattaccaccacagtcatatttttcttttgataccacttagtgaaagtactaacctactcaagataatattctagagcagaatcttccaagtgctttgataagatggtcccacaatgtagtggctttattgaagtagatatagataagttgagaacaacttagactttttggttgacatcatttgaggcacaataaggtccaattatttgttaaaaaacactatataatgaactactatgtctcactaaagtttttaccagtgaagttcttaactaaggtacttgaaagaactattcctcctcattcctttttacaagctttcacaccactacgaaacattgcttccatgtcagtcaaggactaatgtggaaaaactcccttttatcaacttgcgaggaagatttgctcggtagcaatgacatctcggttcctatcttaggaggaagacctcttaggtattagcgatatttttttactaaggtaactcaaatggttagcatgaggttcgagtctctcctgggtacctacatagcaattggtgtagtttcttgatcctaatttcgggaaaaagagactcaacatgttgataactattctctacttaccattaaagaaaagtaggatatttcccattaatgactaaaatggattagctacaaacttggcatttcttttgttagagtctttctaaggtcccacacttcattttcacaagtagctttgtgagaaggctaggcaaccccattttggcggcttaaaactctctctctctttctttttttctttctctttctcttgtttggtagcattaaatgaaacttaatttttccccaatagtaggaacacaaataagtgttttgcaatgtaaattatatgaagaaaaagaaaaacttatatagtgggtaggtaccattatagatagacaaccaaacatgtataaaatcaatgcataggaaccatacttatctgtcaaagtgtcaacctttcttgaaaacccaattcatatatttttatatctaatcaaagctaacataacaacatggaataacaagttgccccaactgtacttgcacatggatttttcaatatgtataggcccatcttaccacccgaagaggggtccttgttcttcttcttgttgttctgtgtattttgataatgactttctttagctgtcattttcccaccaaaaggagaaaatggataggtaattgctggttgttgatatgacattgataccttttctcacctagctcaaatggtcaggcatgtggtttgctctcactaggtctaaggttcgagtctctcctgcatacctacatagcaattgctatagtttcttggtccgggaatcttagtttcgaaaaaagaaaaatggatgccttttctcattggtttaactctataatgtgggaaagtggctataatagaatttcatcatattgggtcttgtcaagtataataagtgagtgaatgaatgagtgaatggtggacctttcatttgtttgtgtctgtcatccaataatagtggacattggttgttgtttgttgtttgttttgggatagaataggaggccctcttcttaggctcctcatatggtgtttatgcagcatttgaaaagccactcactgcaatggtacactcatgaaatcatgagtgattgtgccactttctaaactttttgagttgatatgcctcgaattcggtaatcaatattggcacgatacgacataacatgatgcagttggtgatcgtgtatgaattcacacacaattttgaaactcgatagagggatttgaactcgggacttcttctttgtgagaaaatgtatgaaatcattctatctcaagcttttatgaggctttcccaaaaaaaaaacttatatgaggcttggagcaaaattttaaaaatagagtttttatcctaaaaataaaatgaaattcaaataagtttttaaattattaaaaaaaggagatatttacggtatttgtactttattttttttagtatttcacatttatgtaacatatattttttttacggattaaaaatactacaactttcgttaagtgtttaattataaaaactaaataaataaaaatatacttctattgtttttttttaatattttaaacttatattgttatttatttaaaaattatttaataatttcttaaaaataaaaatgagttggatcgctaatatatgtgtcattttatttaaacaaattaacacttaccgaaatttgtagactgtagtatttaatccgtcaaaaaaaaaaatatttagtatataagtatatgaaactaaaaaaaaatataatgtatttatgctataaatatcattttaaaaaaagtatatttgcggcataaatacctaagttttatgccgagtagcagataaatacctaagtcgtattt

SEQ ID NO: 17748 - DNA, 1666 bp, Cannabis sativa
agtgtcttaaacaaaatagcgtataaagtctatattttaaattattgagtggacataaatatgtaaaatcaattgttttaaaattttcttttttaaaattgaacaaaaattataattttaataatattaaatatttatgttgctaaaaaaaaaaattataccgttacaactcgaaagttagtatttatgttaaaattaattctaaaacttatataataatttgtggatattgataaataattaacttaaacatattgactagctacttattcttaagtacaatcgtaatcaaagttggtcaaatgaatggatctaaaaaagataaaataaaatcaaagtacttacaatgataaagatatttatgtactactagctaacattctgatccttcccgatttagtaaggcttgaattcaaatctttactttgagtttagatttttctcttttattaatcacttagacattaattaataataagaacaagactatggtagaccaagactttgtggaaagatgaaaatcatgttatgatattaatttatatatatttaggtccgctctatttgactataaatgggaaaaaatgatttccatattagctcaattataattgggttgtttcttttttaagaagttttgactttgacttgtttatatatatacttttgataatagccataaactcatgcatcgtgtaatttcagagaaaagaaatacgaaaatgtagctttgatgataaattgtgtggggtttagattagaagaagactacaatctctcgaagttgctagtagttagagtgtcatcatttcatttctgaaatataattcaaagttcaatattttgatatgaatatttttggagtcacttgtattatattggagagatgatcatatctttacttcaatggtgataaacttaatactaattaatgcatgtgtatgcctatatctctatgtttagtggtgaaagtagtgtgtgaatttgtattatttaggggtgtttgtttataaaatagttaatttaatttaatttaatccataaagtttggattgaattgtattgaaaattttaaaatttgtactgtggactaaatgttaagtgacatttaaaagtaatcaatttcattcaatccacacatatatatttatataaatttttgaagagtaatatatagaattaataatttaatgtaaaaatagtaacttgaaaatgaacaattactaatttcgcctcttgaacttttgacactattgattttgtcatatacggtttgctaaaaattctacctaacttttacatttattgagatttagtcattctattaggttctatctaattattcagtataaatgatggtatgtctttgtaaattaataattttacctcctagactttgttaactattaaattctaccccctcagtccctccaaataaaaatgagaaagatttaatattttttttttattaaatcttgaaaaattgatttagatcttaaaacaaaagtcattttgaataatcaagaaaattaaaaagaaaccaaaattttaaaacaaattaatataaaatgaattatttattattaaaaaatctgtttagatataaaaaaaagtatatttttgtaaaaattaaacttttatgggaactaatttgagtttatttttt

SEQ ID NO: 17749 - DNA, 5692 bp, Cannabis sativa
tttatttcattgttttagaatattaggatgttaatgaaacatacatggtagtaagtctagatcctggtaaaatatttccaacaggtagaccatggatctagaatatctattaagtcgatagaatcctatcttgctcttattctttcagatagcctgaggcttgactgggtagaagtagagaattttttctggagttgggacctccacgttcttagttttgcacaaaacataccatcctacaagtagtttataacttgggaaattaaatggaaagaagctatctcgactaccacacagaattctgcgaagtagctcctattaggtagatgcacgctatcttgactacccaactctaaattctgaagcctccatctgcgcatttactgggtaactctccccaaatagagagcttgttctagaccaagcctagaacactttgaagacctcggatagtcttgtatttccagaggttatcatagttctagaacttattttggtactaatacatcctctgtccccttttatctttcttttatgtcaggaggttatttctaaaattatccagcgtggtgagcttagaggccttatccatggtattaaaattgccccttcaggtccttcaattttgcatcttatgttcgcagatgatactattttgttcggttgtgctaatgaaggggaagctaaagagttcattaattgtttatccctctatgagagctagtcaggttaggtctctagcaaatcaaagtccagtattcttttctcaaggaatttggataacagtagaaagaaatcaatcttgaaatgacttcagataaggcagtcaaatggtgaagagaaacaccttggcaacacatttgtgtttaagaaaaacaaaagaaaaaggaggacaatcaaaagttgaaagagagtatggcaaagcgcttggagggtttgaaattaaaacttttatcttatgcagggagactaactttgattaaatcagtggtttctgctatgcccatttacgttatgttaacaaataaagttccttttggcgatctgtcaaagtttagatgctatagacgtgagaaagttttggtggtcgagtaatatggaaatgatagatttatgtcctttaaatcttgggatcatctctgtcaacccaaagttcatgggggtttggggttaagaaggtttgaggacatgaacaaagctctcctctcaaagcttgtgtggagttttgctatcaatgattcaaagtcgtggattcaatatcttcgaatgaagtattgtagatatcagatttttgggccgtgaaacacaatgctagtgattctcgtatttggaagggcattcttgactctagagatatcatctttaatggttctatttctctggccactaaaggggattccattgatgtgtggagacaaccttggattccttggttaagcttcattgaattttaagagttaacgaggaatttgagcactttgagtttcactatgaaaatagtgggtggtatcttgattggttgttagtggaataagaaacttgtgtttctgatttttggttcttctctggctagtaagatcatggatattcctagaattccgtcttcctttggtgatcaggttttttgggaaacacacaaaaaatggtatgtttactgtcaaagatgcttatgttgttgatcagagtgtgagatttggtctgaagcaggctatttgggaatagatttggcacccaacaatccatcctaagattacagtaatgttattgagaattgttagaacagaaagttagttagtggtgtaactgaaatctattattcctgttttcggttgttattgttagttgttagttagttcattccttctctgttttgttgcttagataatttgtatataaactctattggttctgtaataagattgagattctcttttcttctccattactcttttcttactttcttctctttctttctctttcgtttagcttttgttctcatcaatggctaactgatttaacatggtatcagagcagttccctccgctcactgctaacatggctactctaggtaacaataacacaattcctgcagctaacaacaccagaacaaatgcccctagatctcaagccgaaaatagagctcgacagaatcaagaaccagtcttcttcaaccacaatctttcagttcgtctcaatgatcataacttccttttgtggaagcagcaggttcttgcagcaatcagaggaaataggttgctgagattcattaaggagccacctccagaagaatttctgaacaatgaagatcatatgcaaaatagagtcaatccaaactatggcgattgggaagttcaagatcagttgctcgtctcctggcttctatcttcgatgactgaaagcctcttgactcgcatcgttggctgtaacacagctcgacaaatttgggaatctctggagaaaaacttcacattgcaagtttccttataagatcctcgagtttcgtacgaagctgcagaatttgaagaaaggaaatctgagcctcaatgattatttgctgaaagttaaataggccgttgatctgataacatctgtaggagaagtaataagcgatcgtgatcatgttgcagctatcttcaaaggcctcccaagtgaatatgatacctttgttatctcttcgaacattcgaattgagaactacacggttggtaaaattgaggctttgctgctggcttctgaatcaagaattgagaaatctagaaaagaggtggaagcaagtgccaatcaaaatgcgaaagagcaagatccattattggaagctaatcttgcctttagaagattcagataacaacagatgcttggcagaggcaatactcagttcagtataggtcagtttggctatagaggttcaaatcgaggtaatgaattctctcaaaactttaattcaaattttagaggcaaaggcaactttaataatgctagaggaggcagatctggtatgtatgtaaataatggagtacaattccaactttgcctttgatttggacatactgcattggactgtttctatcgatttgataaggcattcacaggacctgttcaaggtggaagcagtggcactcaaacatctcaacaatctcagcaacctcaggctaatctcaccataacagaaggagtcaatgacagcaattggtatccagattctgaagataccaaccactgtactccacaagctcaaaatttagccacctgctatgattatgctggacaagatcaaatgcatgtttgcaatggttcaggtttgtctataaaacatatttgtcaatcttttatttttccaaagcactcatctcacccacttgtgctaaataatctccttcatgtacctgaaatcacaaaaaaccttattagtgtgtcaaaatttgcaaaagataacaatgtgtattttgaatttcatgttgatatgtgttttgtgaatgaagagatgactcgtactactttgttgatggggatgcataagaatggccaatatacttttgatgtttcacatgtaggacatgtctcaccaagtcttgaagctggccaaagtattaaagataaaaaaaaacctctcccttaaaaccagcaacacaagctgtcatcctgaaataaagagcacatacactgttactttgaaactctacagtcagtgtttcgagttgtatcaagtgcaattctagtgttcaaaatgattttactttgtggcataatagattagggcatccttctgagaaaattgtacaaactgtcctacaatcttgtaacatgcctataagcaataaaatctctcatttttctatatgttcagcttgttgtcttggcaagattcataaatttccttttcctagagcttcagctactgtcaattcagaacccttacagttagttgtgtctgatctttggaatccatctcatgtgaattcattcaatggctataatactacattcactttgttgatgtctactctaggtttacatggatctatctcttaatacaaaaatcagatgcctttagaacatttttgcactttaaatcttaagttgaacttcaacttggaaagtctcttaaaaccttacagacaggttggggtggggaatttagatcttttaccaaatacctaactgaaaatggtgtgcaccacagacacccttgtcctacaactcatcaacaaaatggcctagctgaaaggaagcataggcatattgttgaaaatggcctaacccttcttgctcaagcctctctcccactcaaattttgggatgaagcttttaaaactacagtatatattcataataggctgccaacaccattacttgagcacaagtcaccgctgaaagtattgtttaacacaaaactcaactattcaacctttaaaacctttggttgtaagtgcttccccaatatcagaccctataacaagcataagcttgaatttaagtctgctacttgcacctttttaggttatagtctaaaccacaaagggtataagtgtctagacaccaatgggagactttatatttcaagggatgtaatatttgatgaattctcttttccctacgaacaccaaacaggccattctcaaccctcctctaacctgccttttatctcacatgtctctgctatcataccaacttgttcccactctaaaccaccttacaaaatggttgatcttatccatcctattacatctgatgccactacacatacaccagatttacaagttgaccaacatgttttactaaacagctctaatcctgaccatgatccacatgctgttgctactaatgactggtttcccagccaaccttctgtttatgatgctggtgaataatcacatgttgtagctccacaattgcagatacaccaggtgctcaggtgtctcaaatgacagaaaattctcctactgttgctgcacccactgaactaaatgtgaacactgatcctgatgctgcacctattggtggtactcaagaaccaggcaggggttctgctgttgtcttttcttcaccagctgctcttcctttagttgctggttgtctcaatgctcctggaaagaacaacatgcacagaatgcatacaagatctagatcaggtgtttataagcctaattccttcttagtcactagagaaccagcaaatataaaggaagctctctctcaggagcattggaacaatgctatgagtgatgaaatattggctcttgctagaaataggacatggatccttgttaaacttccaccaggtagacaagctattagttgtaagtgggtttacaaggtcaaagaaaatatggatggctctgttaacaagttcaaggcaagattagtggctaaaggtttccatcagcaagctggatttgattttacagaaacctttagcccagttgtcaagcctgttacaattagggtatttctcacactggcactgtctaaaggttgggaaataaagcaactagatgtgaataatgcttttcaacatgttacaaccacctggctttgaggttcctggacaagaacacttggtgtgtaaactcaacaaagccctttatggactcaagaaggcaccaagagcctggtttgacaaattgagaaactgtctattgtctcttgggtttgtgtcctctaaattcgatcattctctcttcatcaatcacac

SEQ ID NO: 17750 - DNA, 5294 bp, Cannabis sativa
  modified_base (4185)..(4194): a, c, t, g, unknown or other
atctatagagttaaaaaaaaaaaaaaaaaaacgtgtgcctatataaattatcctatattttattatgtttattagaatggtttagatttattaaatattttagatcttagttttagattgaatcagatgccgatatttattagattggatgtaatccaaaaaaaaaataaagtaaaattttaatcataacttccatttatataaatacatatatatatatataaatgttatatatatatatatatttatagaggtagacaatatccaatctaattgaaccgaatcaatctattccaatctaattataaaaaaattagattggattggatgttaaaagttggattctaattggattgaatcgattattggatgtcaatctcaaaattcaattaaaaatcgatctaattcaaataaatttatatatattaaaaaattatttatatatatttatgtataataaaaaatatatatttaaattatatttttggtgaattttcttttttgttgaattagtaacatttagttgtttaatatatttatttttatgatattttgttccatttctttacttggtaatgttgtcgttttactcattttaaatttttagttgcattacacttataacaatggtatttttatggaatgttaaacttaaataaaaggtgatatttattacgtattttattttttctctttatatttttatactaatattaaaaattaggtgtgtaattagatatctattttgaaaaaacgatccaatttattagtaattggattgggttagattttgaagtctaattggatcagatcatatgataatttttcaatctaattactaattggttgggtgggatgtggaaaatggttggattggattggatgtctatacctatattttggtactcaatgttatgtatatatgatttggagaactaaaaacaaaatactttggcacaaagaagtgcaaaaagttataagttttgttcaatttgctaaatatattgtaattacaaggatttatagtctaaatatatatatatatataaaaaaaaataggagacaatgatagaacttagtttgagaacttatgtcaaaatggtatagtgaagattttgagaccaaggtaatatcgtaaaatattgtatagcaaaaaataatcatggtgtatgttgaaattccttatgtacaatatagagattgtaatataattgacttatttgctaaaacaaatatatatattagggtattttcatgtacaaataaatttgttttaaaaaatatataaaatacataattatactaaatttattaattttttttatgaatcagctgtgatattatatatttttcaaattgttaaccttacaaactaattcagtacctattcgacttgaaacaaaaaaaaatataattataattgatcaatccattcattatctatgtgagtcgcctttttaaactaatctcactaagtctatttttaaaattagatgtgatatacgagagaagctagcgtcaacaagaaagtatgcttcatcatttttcttacttttgctcttctaatcctttttacaaggtcaattactctttacactgaagttctctattgcagccatcttttcacaccatcaagacaataggcaccttttgaatagagaaaaaataaatgctctgttgtttgagaacctaacccgcaatctccacaactaggatcagtacaaatattgtgtttgtacagaaggtccttagtttgaagccttcataacatggccaaccataaaataaatctgtgtttgggtatgttccaccttccccacacttctctctaccaatttaacaacctgttgagaaggcttaagcaatttgtaacctctagcaatgttataaccagtattaatgaattcttgagtattaatagcttccttaaatctttttttgacagctactacctacttccaatatcggctagctgcacttggagtgttataggcccaccaatcttgactttttatgtaaacatcacgaacccatttgatccacaatcagtagtcttgctttatggaaatcgcccatatatactttccaatggctgcaatattccttttataaacatcttagaaacctagatccccttcctttttaaaggaacaaactttgtgccatgccacccttcctgaaccagaatgatcatgtaaagatcgctaaatttttaatgtagtaaattattagatagttagggtttaattatggaattaagttattaagtataatttatgcatttatggagatttatttggattcagaatgtgttaattatgttatgtatgaaatttcttgttttctgtaattattctcagttgcattggaacgcgacgttgggcctttagagagtcacgtcttcatatggtttaagattttattagtagcggggcaacatgattagacgttggtagtgttgaaaaattgtcggggtttggaaatgactaaattattgttagataggatgtatgtcttgatgtgtgtgaggggcaaaatggtctttttttccttgaaattctattgtccttctgtggtttatttaagactaataatctgattttcttttaataaaagatttaagttttgataattagacatttatctttttcatgaaaaatctagaaactctctctctctctctctctctctctctcacatcaattctccctttctttcgaagcatcaagaaaccagctagggttgtagattttttagctcatttcagtgaatcctagcagaatttgagtgcttcacatcaaggtataacctcttagtctctcttatcttgattttcttaagctcaagctaggttttagtgtgtgattttctaggttggggttttgtgttgagaattaatatctgaacttgtattctgaggttagattgaggttcttcgagttgaaatatgttagattgattgctctctaatggtgttttggatttcttagttatttgttgggttatattgcttgaaatgagtctaatatggtatacacaagtgttttggagattattggaaagtttggggttgatttaaggcgttgagagcatttttggtgcttcttgcactaaactggtagacgtaccagttcagtgggacctgtaggagccggtcgaccggttggtccccaagaaatcccactgaactggaattccgattaaagaactagtctatcggttgggactattttgtaaaccctagtttttcttatttttgcaatatttagggtattaccatgctattcatcgatagggaaattctagttttgattttaagtcttcaaaaagcgcgttaacatgtttctcatcaaatttacaaatattatgatataggatcctgtaaagcgtcaagctgctgttccactcaggctgactggcatacctgaactcaaataaggtaagattagcataaaatatttatatgtgcgaatgaatgcatgttatcattatttacacttctaacactggaatagtggtaagaataagtgtgttagtacagtgtaagatattatgggtagttacggtgctaccaacacgagtacaaatgggtactgagtgcatgtggtacaacacctagtagctcttggaagtacaatatggccctactatcactagtacggagtaggtacttctatgcatgtggtatagaggtcatacttctgttgagaactttcttaaccatttggtgagctttgcatttaggcccaggaaggccaaggtacaagctgatattgcattgtacatacataatttatgcatatcttactgagtctttcgactcatcaatttgctaccttgtgtaggtaagggaaagaataaagtgcaggagtagtgagttggggttcagctaggattgtacctattgcgacagtgcaacctggaggctttcgatcttattgtcttttgagtcacccttttgatattgccacgtggcttataaataaatgctacgtaaaaatataagatatatttattttcataatagtttttgaatacgtggatgacaattttggtatcagagtcactgagttattcaccgaagaccgtcaagatatgtacaatcaaggccagtgtcgagcttaactcacggttctgtaagcttttaccttttggcaaactatttaaattatattattattattnnnnnnnnnnttattattattattatttgtgaaacattatttgaatccaaaatgggtctttgaaatattttgaccactgtctaacctacatgccttgtgggttcgcaggctaagtcctagattatggacgccaagcaaaacgttgaagaatagggtgaaatggttgagaccggaggtggtcggggtggtagaaaccccaaaaactctcgtggatgcagtagaggtcgtggttgtgctcaaagaggtggccaagagaatccacctcaggctccttttaattgggagcacaggtttgcagagatgcaagcccaaattactcaccaagaggaagagatttagaggctcggacagcgagatgctccagtggtgcctcccccacaaccacctactgttgtggttctggcagtgccagcagaacagcctgtagctggcaaccatatggagcctctgtatgagcggttctaaaaataagcacctctaatatttttggggggtcttgatgtcttgaaggcagaacaatggttgacggttattgagagaatcttgaacttaatgggagttactcgaaatgacagggtggcgtgtgccactttttagtttcaagaagacgcttttgtgtggtgggaaatggtgtccctcgctcgagacgtcaccagaatgtcttgggaagaatttcgggatctgtttaatgccaagtaatatatgaggcagtttgcagtgccaaatgaatggaatttgttaatttggtttagggcgagaacatgtcagtcacggattacacaactaaatttgatcgtttggccaatctggcttccggaatagtacctacagattttagcaaaaaagaaaaatatttggcagggttgaattctaagatcaggcatgatctaattatctccaccaacgaaacttcaacctatgctgaaatggttgacaaggcacttcgagtagaaggtgcggtaaagtttttgtaagaaacttgagagatccctactgctagtgggaccactactagggatgcacatttctcccacgcggatggggccccgtggggacccgcccctaatggggcgaggattccccgtctaaatggggaacagggcggggacg

SEQ ID NO: 17751 - DNA, 3068 bp, Cannabis sativa
gcagtgcacaatttcacctgcacaaagcaacaatcttcagttaatgttcctcaacaaatgtaaagacaatttcaacagaaaggcaaaaaacaaagagcacctgcatatggagacatgaggccatgcaaaggagaaagaagaagaagaagaaggggcaaaccaaatccattttctattgaatttctctcaagtatcactatctctacctctctctctctttctctctctctctctctctctttctcctcatattctttccaattatacaacacaaaaaccattaagaaaataaaataaaaaatatataaaaaaaaactcagcctcccaaccaaatgctggctccataacaatcttgacatgtctccctcccaactctactgtcctgagccttgagaatcatccttagcaggaggttgctgatgttgatgttgatgctgatgctgctgttgctgctgatgctgctgctgttgctgttgctggtgctgctggtgcactctagcctgacccatctgttgatacatctgggacaaagcttgaggattcaaaaccccaatatgaccatcctgagaaagcccaagttccaacccaggtagctgttggttattcccacccaaaattgaagtgaaactcataggacccatgttagtgactggtaagtcaaacccagaaaagccaattttttgcagataatttgagctttcacttcccaaatttgtagttgatggaccagaacaagatgactgaaatccaaacccacttacatttgggggccatatccccgtggccacacccacatggggtctccccaaatttccaccaaccattgcccaactggtcctactactccctcctccaactcctcctgacccaataagacctgacccccctaactcatcaatcttttggtgtaacccagctgaaagagaggcaccctgttgtgaaacagagccaccagcggctgccaaagctgaagcaggtatagtcccggacccaggggctgctataatcgatggctcagcctgttgtaaaagccactgaatagtctcaccatcagatttatgacccaattctctggtcaactgaaaaatccttgctgcacataaagctggcatccttatccttcttcctcttccttcaacttttgtgtgtctatctttgtttgaactcctctttggtgctaactgttttttgctctcatctttctctgcaatcacaatctgaaaatctttgatttcagctggtttattctcacccatattggtattattgggttgttgttgttgttgttgtgatgattcttgttgttgtgggaggctcaagaagttggggacctcctgtggttgctttgagcccttgggatccatgaacagggcaacaaaatagaaatccctaaaataaaaattgaatcttttttttaaaaaaaaaatgatttagggaaaaaaaaataaaaggggtcctctttgattgaagaaggtgaccctgaaaagtcctaaactttcatgagatttcactgttttcggcaaggaatgaagtgaaagacaaaaaaaccataattaaatattcaaatatattaaaatcccaatgtacccatgtcaaaaatcaaataaaaatcaagtctttgtttttgatgttcttttactctctttctctctctttccctaattcctatcttttgtttgtctttttattttaactatatgtaaaatggggttttgactagccttgtctgaaagcaactttaactgccaaattttcacctcaataaacacacacaaaagctcattccattcccatatggattcattccaccatcattatacctctccctatactactatatactaatataagtaaataaataaatctataaggctatatatatactcatatttattgatgccatttcttttaaggaactcaaagatgggctgaggtagatgcttttatattttgacacctggctggttatgattggctgctgggagttgcttgtttcctactctaggcaaaagagccatgatccttgaaaactcagatgtgtgtttttatgatcattatcatcaacatcatcatcatatttatattattttaatcagagacaataaattaaacaaaattaaattaagggaatcagaaacaagggtgtgtttgtataattgtattatagacccagaatggatgttgtttgtgattttgcacataaagaggtgtgaggtatgtatcatatatttgtgtaaatatattatatatatatatgtttgtatatataatgagtagtgggaccttaataatggaccttattatactttgttgaagtttttatatgctactttgactcaaaatatatatatatatatctatatattactttgcatgatattagattttgttcaaggttttaaacaactgcatgtggcttctccttcccatatcccaaataggaataaataaaataaaaaaaatctttgaaaatttatatgtttaattatattttgtttagttaaaagagtttccaataccataagttaaggcttaattttgttaatgatagttttagggagagagaattgtcaaagttaataataataataataatttatattatgtcccttaaatgtctccaatgacaaaagatgctcaattttaaaagaaggggtacgttacccattatcaaaccgtgtttatgaaagtgatattttctggtcttataattaatgtcaataatactatatataatttcatttaattaatatgcaaaaattatacttaataagcctagtttactgacgtagttaggtaagtagatacatgtacatgtgtgtacccaattttatttgtatgtgtcaatggaagctttggcttgcagagcacaaaggaaaatgagaatggtgaaggtcaactatttgttgtgaggaggagacatttctaatgtcaacttgatttgtcataaccttgtctcctacatagagatggaaattggtcggttaatgtacggggaatgcaatccccgcccccatccccgttacctatttatacccccatccctgccccatccccgtctaataacc

SEQ ID NO: 17752 - DNA, 3258 bp, Cannabis sativa
  modified_base (43)..(46): a, c, t, g, unknown or other
  modified_base (3220)..(3229): a, c, t, g, unknown or other
agaaatcaaaattttaaaaataaaaaaaaaatcactttcaatnnnnttttaaacaattttttttcttaatcaatcttttagattacgaccagacccaaatccccccagcttttgacttgaatctgatcccgaacatagacccaacttaaaataaaatcaaaaaataaaaataaaaaagaactttacagaacacacttttgttttttatttttaaaattaaaaataaaaatagttatagaacgtatttttgtttttcaaaaataaattttttaaagcaaaattttactttcattttgtgattaaaaaattgaaaaacaaaagtgttaccaaacggcaccataattttaaataaattatttatgtaaaattaataataagtataatattaaggattgtatattgttattgttatattttttggtattttgatatttttttagtgtaactcttgcaaaaaaaatatgattaaaagtaaattaaaattttagaatgatattacatgttccataacaatttattttttatttttggaaaatttactagatattgtaaatatgaaattatttgttaaagataatgtctcaaaaatatgattttgtttttctttttttctattttctttgatttttttcctttcaaattttagttttttttccttgtaatggtaataagttaccattttaaacaaggacaaatattgaaaatatgcatatataacaataataaacttaattttgaatagcatattaaatctaatttcggctaattgcaattatgcctatgaccttatgagtaaattataaaggagaatttttaaaaatacctctttttatgttttatttacaaaaatatacctgtaaagttacaatattacaaaagtatatttttctcaacaaaataattgaaaaataaagaaaaataacttcacaacaattattaatcaactataaaataacaaaaaataaacttatgacaactataatataattataaaataattaaaataataacttattatttttactgaaaatatattttgtaaataaaaaaattcagtgtaaaaataaaaaaaattccaacttaattttataattttttttttcaattttttgatctgttacataaattttcaattataaaaagatgaacaaaatgcataagaggcaaaactactacaaaagaaatagttttaaggggaaaaaaaggttacaaattgattctaatcccataaaataaaagacataaaagtctattatggaactagtttctcatatatatccataataatatatacaaataaccttaacataaacaacaattctagatatagttttatgccattttggctttagatgagttaagattttaggcactgagtgtcatagagatcactgaagataacttgaattttcggactttggttgaattctgaggctggaagacaacctctgtactcgaccttacgcatacctcttcccactcggaagctgaagctccttcacttcgataatcccttggcgagtacaaaacttggagcgtcgcatgtgctgggcaatttcaaaaaagaataatgcacatgagttatagaaaccgaagactagaacgttgaaagaacagttgagcaatcgaaataaaaatttaccgaatccaagcatacttgtcttctgagtaacgagacgactaactttcgatcttttgatatttctcaaggcatgaaggtcttcttgctttcccttgaactctagaaattctccaagtacatatttaccttttagctcaaccctgtaaatatgttattttgtcataataggatagtagaaatagtcctaatttttctgtctttgctctttgatttatttccctttatagggacccttctaagtgtatataatgaacaagagaaaaatacaccagagaaagtagaggtgtgcataaatcgattcaatccaatgacaaccgacaaccaattattggatatccaattgtgatcggttagattggattggatattatttttgaatatctaattggattggatcagatgtttgatggggtgtctaaaaatctaatacatacaatatccatccaatcgaactaattaatattttcatttagtttgaataagtaattagactttatattgttatacgtaaaatatataagtacatatgaaatacatccaacagatagaattgatctaatccaacatccaatggatggatcgattggatgactgaaattaattggatcagatcgaatggcaaaatttaaaattcaatatataattggatcggatctagataggcctaaaaatattagatgtggtctaacgaacaccccttacagaaagttcacttttcaaataaagatacagttcaatttgtatgaaaaggtctttactgaaaaggaaaggcgaccttaattcttattgctaattagtttcccactatttttgctatagtttcacccccggcctatcatgtaaataaggaagagcgcatataaacctaactgataagattattaaccaacacgtagcatgggatggaatcgcgagtctacttgagcatttaacaaaccgataataatgaccggttagatttaaacaaggctaagaaaattgatcaaatcataagatagcttaagaatttctacatctaaatttatataaggacttcatacttcattaaggtttagacaactaaagcaacaatctttttgtacctaatattatatgaaagaatataagtatatttatgatagagatgacaaacctatcccaaattggagctgtattgagagtaaaatggaggttttgttgtatcgattcttgcatctctttcttcccacctccaaatgcaccctttagccaacccgaaaacatagttttcgtctctggtttctgttgtgtccattggtcataggtaatgacttctggtggaaaagagcctgcctgaattgtactgcaagaaaataatttctgtgaaaatcaaagggaagacaattaaatgtcaccaatgttagtatctacaacagctacaagataattcccaattttcattgttggaattttgtgaccccaacaatttatactttctaaagccaaaactctaagtagaatgatagaataatcttagagtagaataattcctcaagtgatctttattctaaaaacagtgacaatgttacaatatcgagctttcgagaggctcgtctctcnnnnnnnnnnatctttcgagaggattggtctctccacaa

SEQ ID NO: 17753 - DNA, 7065 bp, Cannabis sativa
ttttttttttttttatcgtttttcgatagattaatcacacaagtaactgattttaaatacacggtaagtttgcatttaattgattttaaataataattaccaacgggggtggagataatttcggatccttttaggacgtattcattgtcggaaagaggggtaatgagatcttcatctaccaagtcttgccaaacataaccacttttgtacctcctgcgttaacgagtaaataccaaatatataacgaaattttaacgaccaatacaaaattaatttgattatgcatgatataataattctttgaattaacttagtctctctattatttgaaaacaaaaaagtcttggtaattatcattataagttaccttttataagaccaagcataagcttctgccatgtcctttcctcgtaagtccccaagccatctcttaacatcttccgtccaaatgacaataacaataatatagatataagtcaaatttgtattttgtatataaaatgataaatattaattagtccataaaccaaaaattacaaattaattaaaatgagctgtgttaattaatgtgggagatcactgaattacctcgaagataaacgccggtacgtgtgagatggtgaactcgaatgagatgaggatgttctgagcgaccaagatgagtgagaaagtagatgatgtggagccttcttatttccccacattttcctagttgtccctccatagctaacatcaaaatataattacgaaaattattaattcttctaatattcaaaacttcacgaacaacaatatataaatatatttatttattaggagcacatgaatgtatactatataaactttagaagtcctcgagagatctttgtctcactgccggccagcgctatatacgaaaagcttatacaagagtacataccaacacaatatatatagtatacaatttatatgcataaagctattctaacttaaataaatttatataataaaaataatgtgttacatacaatttgacaaataaaggaatagaaaaatgcaggcatgcagattatacatataaaatattaattaacaagctagtgtttggcaaatgggaaatttactttctcgcagaaaggaaaagggtaccacggtttgtttattatcgtagtattcgagattctattctaccccggccccgccaagtgttacttcttctataatggactgttttatacctttttctgttctcatgtggagctgataagctttgaaagaagagttcgttaactgattggtatttaaagcagaaaaattaggaggatttttgtgaccagatttccaaaaaagtagccgatgtagataaaagcttaaacccactcactcacccagcttagttttctcattccgacattgaacaaattttgtatgttgaaccagccagcttttagttatttattttaattatgtatattttatttttatataactgcctaatatatatttttttaattgattgccacatatatattttgttaaaggttacaattattaacaaaaacaaattagttcacacacaaatatgacacatttttttaattggtaagataaatcttaaataaaaatgattaattgaaattattttacaatgtgtatcagagtagtgtttgaattttttgagcacatattattactcatattctaaacactcatatacaagttgaataaaattttattaatatgcttttattagtttcctaaaagttcaaactcacacaaccaacaataaaagtgattttagagtttagaagctcaaaaaccataacttgaataaaatttttgatcggatatattatttttctgcttaattaattactcaaaagtccaaacaaaagtttatggtgcgtttggaaaatgtataattattatggcagtatattttaaaatataaagtatgtttggatataaaaagataattatttataaatttttaatctcttatttagtaaaataattagtaattaaacataaaaataataatttgcaattacactcaatttttataggggtataagaattgagagtatacttaagtcaaattatacaattatagtgtaattatatggttagacaaacacgcaaaattgtataattaccttaatttacatcattatgattcctcttaatttttcaaatgtgctcttaaagtcttaaggttcttatagattaagaatagtctcatatcgataatatgaaaaaataatatccctcattgtcaataaattttaaaataaaatatcatccacttaatcctaaattctaaattctaacagtattatacattcaaaatattatatatttaatatattgtatattcatgcaaagacagatacaaaacgactctacttaactaatatatatgtatgtcaattttattcccattttcaatgtattttgaaacataatcatttaagagtacttgtgatgacttggtaaccatttaaagatataaataatgtacttcgatgttggtgaacaatagtgtgtaatctaacaaatcaatataactattacgtgtactggaaaggaggttagagggatatatcaccacattagaaaattaattgttttttggagatggtttggtcaccaattcatcatcaaagatggattagtttatctgtttctctctcacatttatgctcttatttatgtataataataatgtataaattaatatccacatgcaaaccaaggcatcatagtttacgggtcatttcaataataaatttgaggcctggttaactaatatatatggtcacatacaacatttacatttaatgattataaaacactagagatatatagttttttttctcaacaacagtacatatacggcaaatgtccatataaattaaaagattcgaaaaatttaagttccacacatagataagataaaaacaaaaatgtaaagtccaattttaaaatacattaagcacgaaaaggaaggtttaacaccttaattattatgtattttattacatacgaagttaaacgatgaaatagaacgatttgaggggccaaatttaatattacatatatatatttggatacaattagatatattacgctttcttttttaaaagattaaatatattactcttaaattatgagtcttttgtaatattcttaaaattgtcttttgcagtgcggctacatccatcagcaaactaattcaagcacagtcctctccaatatagaaaatactaaaaagaaaaatatcatgtgaaagaaaaataaaataaaaccatataatatcaattaatggaaaaatccctcaatattaagtattaaataaatatttagtatttggatataaaaataagctattattaattagatatggtgtatattctaaggttagatatcctccccttatatatataaacttttactatgtgtcatttattacattcaatatttaaaatatccactttactaatatggtatcagactctctcctctagaagaccaagatccccttttcacgcaccagatttggatttcacggatcatgccaatcctcatggcacgaactcaccgattccctattgctagctctgatcttcccttagcttttccctctgtcgttgcttccatcgtcggcaaggtcattgccgattcaaccactgttcccgtggtgtcctcagttgatgctccgatcgttcaagaaacgattccaccacctgctaatgctccgatcgagctccctgttgcggctccaaatctctagcacactatcctgtctccacctcaggatatcggttcctcttcagctattccacctctaatcggagctacttccatggctgctccgaccatgccttcaagatccattccccccgtgactcttggtaatgtttctctccctaaccttggttcacacagtgctgatcccatttctttccagcctccttcttacgatcatccaaccaatgaagacaatccatacttcgttggctccggtgaccttctgaggttgattcttgtgacaccaccttttttcgaccataacttttagcaatggcattgggactttcatctagctctcagagctaagaacaaaatcgaattcattgatggaatccttcctcaacccgatcctactagtcatctcttctattcttggactcgctgcaaccaaataataatgtcttggattattcattgtgtttctttagatattaagagcagtataatgtttcttgatattgctcattagatgtggactgagcttactagcagttttagtcaagaaaatggatctcgtctttttgaactttaagaatctcttacagatttacaccaaggagatgaatctatcactacgtattttaccaagctttaggctatatgggatgagatcaatgagctctgacctcatctcccttgcacttgtcaagcttctgctaataacgccaaattttagaatcaagaaaaggttctttggttccttactggcctcaacgaatcatactaggcagcttgggatcaagtgttaaccaccgaacccttcccatccctattgaaggtgttctctactattattcagcatgagcgataaaagaaactttgtcttctcccgaacctcattgctaccacttcatctcagccctcaaatcctcctcgcaataagaaaatacgacctttttgtactcactgccagaagccatgacacttaaagtaaaaatgctatgttctccatggctttcctcccggttattttgacaagcacaaatctaattctacatagcgctccacttcggatcggggttcccaagttaaaggactggccgctaatcaacttactcaatacattcaacatgcttaacaggcccaatcaacggttgatgtcaacactccattggcatctaatctcactggtaaatttgtatctttctctaataatctccggatagttaatagtggggcaacccaccatgtttgttttgataaaacatgttttacttcttttgatactatccatagtgcttcgcatattaatttacctacaggtataaaaatccctgttactaaatctagtattgttcacattaatgctaacttttgtttaactaatgtgctttttgtacctgattttcagtttcacctcttgtcagttacttctattgttaaagatccaaaatattttgtattattctcacattctagttgttctatttaggacacgagttggaatctatagattgggattgctaatcgcgttggataacttttctttcttcaacaagaaaatattgctacttgtaattctgttcaaactagtatatcttgtaatgatgtacacaaatggcatttatgccttggatatcccttgttacggaaaactaaatccttgaataaaattctttgttttaatgattttaactcatctttgttttcttgtcatgtatgtcatttagttaagcaaaaaagactaccctttaattcggctaataacatggctcctactgcttttgacttaatttatttggatatttagggtccttttcacaaaaccagcgtagaaggttatcgatattttcttactattgttgatgatcccactagatttacctgggtttatatgcttaaaaataaatctgatgtcaacactatcatacctcagttttatgcttatatactaaatcaattttctattcctattaaaagcatacgatgtgacaatgccaaagaactaaacttgtcttctttttttcaactagaggtattcttccttatcactcatgtgtagaaagaccacaacaaaattctattgttgaatgaaagtatcaacatatactgaatgtcgctcgttctcttgcttttcagtcacatttatctcttgagtattggaattactttataaatactgttgtatacttgatgaattgcacaccatatgttttacttaactttaggtcttcttttgagttgttgtataacaggttaccctcttatgatcatctcggtacctttggtttccttgcctatgcttccaccttggatagctcaaggcacaaaattttcttgagatctcgggcttgtgcactcattggatacccggttggtatgaaagcttatactctacttgaccttgaaactcatcaaatattcactcaagagatgtcattttttatgaacatatttttcctcttaaaaatacatgttctaatgacaatatttaaatgtttaattttttaatttctttaaaaatattatctatttatttgatatttgatattttaataattttggagtttttatatactcatatttttatttattacatgtgagaagaattcatttgcaaaataaaaaatacatataaattcatattttagaagaaaaataataataactaaccacataagtttttttttagataatataagtttgggtgattctagaaagtaccccttaaaaggagtgcactgatacattcttatctattttggcattcaaaaaaaaaaaaaaatactctaatttcttttcatattcgtttaagttatagttatttaagatattttacaaaactttagaaaattcagaataacttacaaatatagaaagtagtattcaaacaatctatttcacacgcgtaaaaatagtcacgcgtgcaacacacttcttaaaccctatttttaggatgttaaatttttctaaatttcttaaaattttgcagaatctcttaaatatctataacgtacatgaccatgagaaaaaacttgactaaaaaattattttagatgctaaaataaataggagtgcatcaatatacatatatttaaagggagtgcattgtaaaattttcttataaatttttatacatttataagtataatgaattaattttataatataattgtcgttataattagaatattaacaaataaatagtaccttaaaatttataatttattaaacaagtagcataacttttttccacaactcaactgatgatttgagaataaatttgtattggtttagatttgtatgggatggatattaggtagtgtagtatga

SEQ ID NO: 17754 - DNA, 2807 bp, Cannabis sativa
aaataggaaactatattaaaacataccagccgaaataataataaataataaaatatttttgtcaattaaatatgtcaaaaatagaattaacaaaggtaatcggtaaatttgaacccaaaatacagtgtagatcatatcctatattgaggcattttgccaagcatttggcgcgagtagaacaattagataattttaatagtgtcatggctctttgttaaggacccggcgtttatcgccttcacaaccaaaagaaatatgaaaaatatcacttgtatagtcagtaattatgactaaaaattgtcccttctagtgtcccgacatttggtcataaattttttgcttataaactgttcgtgtagtaagaattcaagccagcaacacaaaagccgatttagcaacaacataaggatttggaacatcagacagagcatttatggacctttcctcatcaataagagagaaggtagtttgtattgtgttcatgagcaattccatttttggtttagagaccggaaccgaagagaagaaatctataaaattagtagaaacaaaacaggaaataggggaaagcacaagggcaagaacggatatggtagtcacaaattgaaagcagtggacaagaagaagaacacgaagcaaaagaagatatgtaaaaaggtagttaaaaaaaaaagaacagttaaaaactaaaaaactgcaacagacctaaatacaggcacaattatttaagctagtttaagtttagatttattatatgtatttgatatttttattatatttaatgttttctacactacctttttataaattaacttttagttagttattaagaaaaattattgtatattattttgtattagcctattaagattagtttataattctctttcgtatttttattataaggtagatattattagtactactaaaatcattagttgtttattattaaagtatattagttattagttattagagtttgagtgatttaagttattaattattaattagttattagtactattgttactatgtatcaatactatttatttgtagtgaaaatttattataaaatttataataatgtttatttatttgttataattattatttttttttatttttttcttactaatgtattttttttttgtttatttacagatttttttttttcaagggagacaatcctttcaagtacaagattctcacatttatcctgataaaattttcctccggccaagaaatgttcattgctgggttttttcatttctttcatagagagtgatgctgaagtatttgaattgttttttttttttttgtaaaaaaatttattaagtttttgttatttctctttctaaatgtatgtcttttagatataatgtaaaatttctatttatttaataaccaatgtattaataggatttgagtatgtctgccctattgttgtgctctgaggcagttattgtccactaaggtttttttccaattttttcaaattattttcttcttaactgctcatcttccgatttctatcaccatctttgtcttcctctggtactatggatccatttctacacaagatgaaatcagcaatgcaattatctgatgctgagaaaacggttgttgctattactgatgatggcaatgacggccctgctgaagaattaccatctcctgatttttctctgttttcccgtgtgattacaaataagaaggtctggctttcaacttttcaacgtcaaatggcacagcattgggatggtcgatttaaggttaacatcaaagagcactattctgggctgtttatactctgttttgggtgtgaaggggatcgatttcgggctcttgaaaaggagccgtggcactttcaagatcaccatattgtactttatcccccgatggcgatgcataatgttacccctgaagccatgatttattctcctttttgggtgcaagcctaccgcttgccttttcttagtaaatcaaagtccttggccagatcattaggaaacttattaggggagtttatctctgtccatgaagactctttgaatgagggttggggtccgcttttgcgttttcgagttcgattggatattactaagcctttgcttagaggcaagatgattactttgcctcgtgtgaaggatgagttctgggttgagtttcggtatgaacgtcttcctgaatactgtatggagtgtggtttaattggccatttgtatcagaaatgtcatgtgtttcttgagcaactagacaacggtgtcgatcctgaacttccatatggacctacgttgattggttttgccctgccttcttcatcgtatgatcgctatagatcggatttctctaaaggaaatgcatggccacttctcactcgtctagcaagaacttctttaactgcttcaattccacaattgcaacacaggcctgctgcacatccacgacccttgttaattggtgaatcgtcaaatactgggaatatggttactaattctcctcgggttctaccttctaccaatacagccatcacttcctacgaagtaccacatcctttttcccctggctttctcactcaatccaccctcataccacctaaacacgacattaacaaaattccatctgaccaattgtttccccatacatcctatgcaacttcaaaaccacattctacttctaccataacagcaactcatttatctgatgtgtatacaccagatgttggccattcctctttttcgcactttacatcaccactgcttgatcccatacatgctacttatcctcccattatcaacactaaccat

SEQ ID NO: 17755 - DNA, 3162 bp, Cannabis sativa
  modified_base (3101)..(3113): a, c, t, g, unknown or other
aaatttttaatgactgtttcttgcaggtgttgatttggattgttattcctaatcttggtggctcaacgatgacaaacaccaagaactttcttcggttcatcttaatctttcagtatctcccgcgattgtttcttatatttcctttgtcatcacaaatcgttaaggctactggtgttgtcactgaaacagcttgggctggtgctgcatacaatcttattctctacatgttagcaagccatgtaagtattctctacaagaacatcaatcaaatgtgaacccttttttggtagaagtaattctttcttgtaaagaacctatttcagtactaagagtcggttatcggttgataacctaataaggcaaatacctgggatcctgcttgggaaaaacgaaagatattgtcgataaacaaaagtatgtcttgttcattaacatttcaaaaatactttgttattgttagagcagttaaaccaactctcatacgagcccctgatagtttattcatccgaccatagactagagccactattattcttactttgttcattctaacatgccctattagagatttggtgaattgtgacattcaacattttcaactaattcaattttttattttttatgtttggttacaattaaaggttttaggtgcttgttggtaccttctatcaattgaaagagaagaagcatgttggaaaagtgcttgtgacaaagagaaaatcttttgcaaaagtgaatactttgattgtgacatgtctaaagacctcaataggcaaaattggttccaaaaaagcaatgtcacattactatgcagcccagataatacattttatgagtatggtatttatggtgatgcagtcacttttaatgttacaattgcaactttcttcaacaagtatttttactgtctttggtggggactaagaaatctaaggtaaaaatgaaaacttttattctttctgattaagtaactagtaaccaattttttgatggtaaataatgttgcagttccttggggcaaaatttatcaacaagtacttttgttggagaaatcatttttgcaattattattgcaactcttggattggttctctttgctttgcttattggcaatatgcaagtaagttttttttgttatttcattttagttactaatgtaatgtagtactagtaatgagtttttggatggtgatttgagtaaaaatttagtgacacatttttgttttgaaatgttagacgtatttgcaatcgacgacggttcgattagaagagtggagaatcaaaagaactgacactgaacaatggatgcatcatagacaactgcctccggagttgaggcagtcagttcgaaaatatgatcagtataagtgggtggctactagaggtgttgatgaagaaactcttcttaaagggttacctatggatcttcgtcgagatatcaagcgccatctttgtcttgatcttgttagacgagtaagtttcttttctattacatacgtgacagttttttttttcaaccaattagttactctttcattttctgcttatcaccttaaaggttcgaccatctgttatgttaaatgataaattcgaccttgtattttttaataaattataaaatagtatcttgaattgattttcttattttaaaataaaatttaataataacctgaatgtgttatgataagattagggatgggtagcttttacaaaagagtttaaaatggtattaaaatcattctctacaactcaatactgctaactttgagtggtgggagactctataacatatgttattttttaaattctaaagttagtttaggtatgtaaaatgtttatacaaaaagtctctaattttttcaaaaataccattttatatttttttttcttttaactaacaccatacctatttttttaatattgtaaggtgccattgtttgatcaaatggatgaaagaatgctagatgcaatatgtgaaaggcttaagccggcattatgcaccgaaggcacatttcttgtgcgtgaaggcgatccggtcaacgaaatgctctttataattagaggtcatcttgactcctacaccacaaatggcggccggaccgggttctttaactcgtgccacatcggtccggccgacttttgtggcgaggaactactgacgtgggcattagacccacgtccaggtgccatcctcccgtcctcaactcggacggtcaaagccatctccgaagttgaggcttttgcccttgtggctgaggacttgaaatttgttgcctcacaatttagaaggctccacagcaaacaactaaggcataaatttaggttttattcccaccaatggagattatgggccgcatgttttatacaggccgcttggcgcagatacaaaaagcgcaaagaattggctcaacttcgggccttggaaagcccaatagttcctgagcccgaaccagtggcccaacataatttggacttggctatgtacgcggctaggctggtcgcaaacactcggaagcccattaacaaacattctgggccggactctggagtcgttagctcgttgagaaaaccagctgagcccgatttttcagtttgtgaggaatgaatggataattattgaaacataaatttctcaaaaaaaaaagtattgaaagataaatataaataaataaattttatttataatagataatgggccgggctagtcctctattggatcagtaattgattctaggcccattaccagtacacactttcttcatttatagtttacatatagtttacatacaactgaaagtttatatattgttatgaaaaactttggttgtagtttacatagtcaggagttattaatgcttgtaaattatgttcttaaaaaagtgtattattattatttttttggtgtaaatttattctttcttataggataattcagaatctgaatactcttgtaactgttttgattgtttgattgaggtaacatattagaagaactattatatagaaatattgtaattgtggtattgacagaaaatatatgaattatatgcattattgttaactgtaagttaattagtagggaggaaattacactctatacnnnnnnnnnnnnntcctcttttatttttaccctcttttttaaagtctatcatttttacctct

SEQ ID NO: 17756 - DNA, 5357 bp, Cannabis sativa
ttgttgtgactaaaattaaactagtgacaacttataactaaatactatgttttactcacaagtaactttttgttgtgactaaaaattacatttattcataaaaaatttatgtttgactaaaaaattatcactaaaaataacaattttttatagtgtctagagtctaaattcgcgttcggattagatcctgaaatagtaatccatgtaaaaacataacatatatgataatagttattaagtggagtacttattaaaataccaaataagattatggtggtggtcgcaaaaattaatatgagagatatataattttgttaatatagacgtattaatggaatgcacgtggcctcttcccccaagcctcgacaaactttattctatatttaatgcaaaatattcgattttatttaggaatcctcaaaggaaatttttgaagacatgtcgagaccttaattataatctattattatatatatagtctttctaaattggtggtcctctagatcgatctaggtaaatataaattgcaattctcaatatatatatgtatgttttaaaagtagtattgtgtagtggtataccgtatacgtattctaaaagtgaaatgctaattaatcataacacctaaatatataaattatatatatctttattaatataatttaattaatattacattctacatattataatttaataatttttatataaaaaaaaaaattaaccacacaaattaattggggcattattggatatgattaatatagcaatagtaattttaagtgtggcatattactattcatgcaaattaattattacttgtgtgtcaaataatacaatgcatgcagcatgcttgaaattgaaatagtaatttaagtactattcaagaaacaaattctttatatcaatacaaaaaaggagagttaataatttcatatgagtaatacgttaaaaatgtgtaattatctatatcgatgattataacttatttgttccaaaaaataaaaatctatcataatatgtatatataatattgtgccaatcatcatcttcaattattacctctatataggtggtgcgttggtcatgactcattaatatatatatatatatatatatatttgtaatctacctatgacgacgcactcacagtagatattaactaatatcaacacaagaaagttaattaatttgaaatttatttatataaacaattaaagataacaattttgtgtggattgatcatatatatataactttataattgggaaaaagaacaattaataataatgaaattgtaatattataatttataataataataatagataatattatttagtgagacaactccttggaatgactactccggaagaagagccacgagcataagcacaaagagaagctggtgatttcttgagataaaggagcttaacattgagaagtttgatcccataacatggattggttgggctacaagccaacctcacagcaaccttggtagccgaagtaccctttatgttactgtaagtgactttggtgatcctaacaccagaggaatggcgaggacagccacctccaccgccggggcagtagccctggtcgatgatgatggggttgtccacattgttcatcacaaggtttctgaagtggatgttggtggcatagccgttgctgggcttggcccacgtttttatgcgcaccccgttttgagtctttgtgaaggtacagctcgtgacggtcacattctgtactccgctttcgttggatgagtccccaaggctgcctatgctgatgccgtgccctggtccgcagttgcttccttctatccacacgttgctgcaccctgatttgattgcaacgcagtcgtccccggtcatgatggttgaccggctcaccgtgatgcccgtcgatgcctgcaggagaatgccgtctgtgttggggcttgagcttggggctcttatgtacacctttcgaatcaccacgttcttgcaatggtccattgatatgtgtatggtttggctgtttagggatgttatcccattcaccacaatgttactgcaccacgaaagagaaatcgactgcatatatacatatatattatataatgttttctaaaataaaaaagaagaaatgaaatcatgagtaattatatatgtacccttgctcctggtggacatttagcgtgggaagatctgcggcaagcccagaaagcatgtcctctggcatcaagagtgccacggccgtggattgacatcctgttgaccttgctgaacaagatccaatggccagaggagcccaagtcccagtagttggaaggagccaggagagtgccatcgatctggaacacgattctactcctgcagggcccactgaacaccaggctcttaatgacgaaagtacccctgggaacgtagagtgtgacggtgttggcccttgctgagcatgcccatgaccatgcctttgcgaatgctttggtcgaatctgttttgccatctgatcttccaccaaagctcaccacgttgatgttgtacgaagacgacgacgcaccctctgccccccctaaatattccaatactaataataccaacatcatctttaataaacaccacatatgcattctcatattcatattaatcctcattattatctatgtatatgtattctcagattctattatatatatatataatcttggaaactcagattgagaatgctaatatatatactgctaccatgcacatagatcgatcgagtagtactactactacactactactaatactcttctccaaggaatctctcccaattaattaattgataggttttgtcgtccaaaataagggtcttatatacatttaaaaataataaatatttaaattcaatgtgtacggctgtatacaatttcctttctttcctttaagaaaaatttaatttcacaggattctttctaattaagagtgcaaataaagatattattaattaaataggagcaaattaataatatgattattacttaataatattcaaagaatgtcaatgaagattataataatgatttagtatatataaccaatattaatcaaaaatttcttcggtacttaaaaaaaaagtaataattagttatatatatattaatatctttcataataatacatggatatatatatattaattaagtactagtatgtatattattagctaggttagattagataaatcattaaatatattatatatgaaggaattaataaaaatgaaaagcaaatagcgtcttcgaagaaaaacaggaccaaaataaaatctaaaattacgaaaacatgcattataatgctgccgaattcatgtttgatttggaattttgttattaatataattaattttagaaaattgtgaaatggtcatgattttgataaaactaaaaaggagcaataaatcaagcaaataaaaatattttgataattaagactcgtaggtaggtaggtcctccaccttctcaattaaattaataaatattgtacgtatcatgattcattcactatatatatacatataagattaataaattgattgtatggttagtaacttttttcctcatcgatcgtcaattgatccccatcgatacatttattatatacattaattaataaccgcaaataattaataatgccttatagatgagatgatgtctaaattaaacaattaattaatattctaactaaataaccttaatattgcagctataattaattatattgtacgtacgacacgtgtcctcatatttctgaagagttaaagtaagatctgatccacgcgcgacgttgcattgtaaagtaattgtatgatatcaactgtacgaaatgacaggaatggccacttggcagtactattaattaatattaatttgtttttaaacaaccaaaaaatactataattaaaaatgtaccctctgaaaaatattaaagtcaaagggccattcccatgtggaagaagttctgatcctttgatcatcattcaattggatataataattttccttatcacaaaaaaatctatttattatttgtccatacctcaccttaagcgtacagtttgattagaaagaatggaaacccatgatcataataataataataataatgagatctccaatacaattaaaaatagaatgaaataaatgttaatttacataataaaaattatgtagaaactctgtgttcttccaaatatttaccatttgaaaaaaaaaaaaaaaacaaaaacaaacaaataaggtgtcatatagatggtgaaattttcggccagcaaattgttctatataaaaatatataatctattatattttaaatataaaataataaaataatttttaataacctacgaagtaggttgacatattaaaatttaaagtttaaaaattgattatttattagttcattattagaaaagaaacttaaagttacttataggtttattatttattagtttattttttattttggtcatttttttttaggtattggcaaaaaaaaataaacgatttccatatatcaaaatgatcactttgaaagataaattgtaatgatataattttgagatcaaataatgccactcttgagctcaaccgactaaccatgtgcatgtgatataaaaaaagagagatgagtgggtatacattgctctacaaaagaagcttatatagaatacaatttaattacttttcaaagacattcattgaaattgctctataaattaaagttaagtagaatattatctagtaagtgataaaataatttttagtttctcataaaattaattggtacattaaattttatttaaatttaaagtttaatcccataaaaaaatttgtaaaatttagtatgttaaattcattattttataatttttaaggtactgttttgttttcttataagttattttaattagaaaaatattttataaaattaaaatataattttgtaactttttttttgaataaaaatcataagatctattaattaataaattcgttcaaaataataggacgcacttcaaaggaacagtcctccaactgaagcacactacctgtagagaaataagagtctcttgccaagcaacgagtcaacttatttgcagatcgttttacaaaacacaaattgtgaaggcataaaataccgctctgaattgcttggacacacaccaagctatctgtttccaacatgactctatcacacgaatgagttgtaatccaacccaatgcttctttaatgcctattatctcagcgatttcaggttgaacacatctaatcttccccttcttgaatgcttctactatagcaccatgataattctgagct

SEQ ID NO: 17757 - DNA, 4185 bp, Cannabis sativa
ccccaagcaatgtgggattgtacagcttaaccgatatttttccttacggatcacgagactactgactgtcacacaaactgcaccgcactatatattcaaagttactaacttttcaatataattttttttttcatataaaaacaaatatatgtaatatatataaaatatttttttagagacaatttaatatagtgatttaatgattagtatatatgttatgatgttaaaaattttgtaatttttttgttatactattaaaactttaatatattaatttttaaatttttattataatgtttgataatgaatgtagcgtaaactgttcaaactgcactgcaccataccgtattttcgagttatagtttttgcagttttaagatctcaccatgtaacgtcccctccttcaagtctccattgggcccttacacacacggaatgatgactcttatacacgaatacgtcactttagctgcttcatggaataacgactgaccctatagaccaccactagtgtttccagcgtgttttttcttcactcacacacttcttggaaaaacttcccaagatgtcacccatcctgaaattatcccaagtcgagcacgcttaaccctagagttctttcgtgatgggctacagaaaaaccagatgcaccttgtcgatataggtagtaccaatcaatccatttcaattatttttaactgtgtagtcacatatatacacagtcttagaattatcacacatgattttttccaggcgatgtgcgattacacaacttatctagtatttctccttatggatcacaagactactgactgtcacacactatccataccatgaatactcttactttcatatagtttttttttgtgtatttataaactatcataaaaatataaaaggaaaaaaaaatcaaaaataaaactaattttcccttttaataacttatgtcattccatatagaattatattgcaatacttgcacacatatcctccatatatatatagatagaaataaaatatataaattttattccaaacaacattccataaatataaaaacaaagaacaaaagccaacattaacccttatttattactataattatttatcttatgaaatttgtccaaataaaatccatatcaaactttgtgatttttccaaatatgagcaacctcagcaagtgacttagtagaagacccttcattgcttagagccaactttgcagcttccttaagatcactaacatttttcctcataacctttccttcttcaccttccattaaaatcttcacatactcacaaatctcatccctcccaacaattccactctcattaaatttcactctcaacccaattttcaaacccttttcaccaaccaaaacagcattcattttttgctcagcataaagtggccaaaccaccaaaggaaccccatgaacaacactttccaaagttgaattccacccacaatgggtcaaaaacccacctgttgattcatgggccaaaaccctaatttgaggggcccatgagtccacaacaaggcccaaatctttagtcctctccataaacccatctgggagataatcaaatgggcttttttgactcttcaaagtgaaaaaagcacttgaagctttgtcatttgggcttctaataacccaaagaaatctttgcccactcatttcaagtccattagccatttcagtgaactgctcttgtgaaagggtcccaccactaccaaacgacacaaaaataaccgacccttttggttggttgtcaagccatctcaaacattcgggtacttcttctgacccggtacccgaactcgacccggtttgagtcaacggcccaaccgggtaaataggcgggttaccatggactctatccatgatagccctaaaagcccccggttccaaatccacaaagctattaaccaaaatccccgaagccgaatgatacttctccgtcatccgaacaaaagctcgataggtttcagttgtccggtcgtgaagcgggctaaaaaaatcccgcccctcgaccgaaatacacccgggtaattggatcgggtcggataagaaccgatactcggatgaagtgatggcatcaagttttggtaagtaaaaaaataacgacaacacatttgctgtcgttgggaagaaaatataaggaggaatattgaattcttttgccacgtcaaaggcggctggaccaaatacatcaacgacaagagcagagaactgagttgactcggtggtgagtttgagagcttgttgtaaagctgggagtgaccgagtcaaggtgagttcgatacgatcttcaattggggtttctgctgtgaggtcgtccatgttgacaggtggaagaaattgggaggaaattgggtgtggaagggattgaagaagcttcttttgaagttcaatggaagacgacccgtcgtttggaacaatgaaggttatggctatgttgtgttgtacgacaagtcgttttgagaaagctatgagtgggaaaagatgtcccattcctggtgttgggacaatgagtatgtggggttgttgatttggagaaaggtctcccatggtgtaattgggttttttattttagtgaaattgagatttttgtgtgtaaatttgtatagtatatatgtgtatatataggttgtagtgtatacatacaatttatggagccaaaaatgaaaagtgttatcttcgtatatcatataaggaaaatcagattttttttattaaaaaaaattgattttattggaaagcaatttatgtaaaaaaaaaaaaatcttcaaatttatgtacataccatttatgttgatacatatccaaatagattgggaaaattaagtatgttttttattataagattatccaattttttgtattgtaaattgtaatacttatgagaataccatgcatgtgtgtataaaattggtatgtacattttattattatttattgaaatgactatatgcattgtttggtggatattgaatcttaaatgaaaactttgtcatttattaattggggatttcaataataaattgctatggtttttttattttggcatgagtattcgaatttggacctagtcattgattttttaatttcttttttttttttaaaaaaaaaaagtttcaaaacaaacaattagaaaataaaattacttaatgttatactattcatataaaaaatttataatgatttattcacttaaataaaagaaaaaaatttaagcaaataatgttctcaaacatgattacaagttaaatttacattcctatttacatcttttaaacaaaaaatacatccctatttacattacaagtacttaaaatattttatgtatatgtaaaatatttttattgggacaatgttattcaatatccttaagataatggttatttttttcaatatccttaagataatgattatttttacatttaatctaattaagacattgttattcaatagagagagttgggtatgcaatctctttaaaatatatgttaaaattcactacaatttttcattcaaatgtctcttcctttctaatttaatccaattcaatcaatattgacttaattttttttgataattaatcaatggacttaattatatcctacttttatgcatgaaattttaggtcttcaatcccacaaccataataactatataggttcgtctttttgggtctataacaaaaaatgccagaatttcatggtaatcaatatacaataattatatatatcaagtaagttattatatgagaattactataagttaagtataaaccctagtactcaataataataatcttactatattatagatatataatgtaaaaaaaatatatatttttattagacacttgtgatgtgtaaagtcaccaaaatttccaatcaattttattgtgatttttatttattgtgatttttattaatattgtttgtataaagagaattgtgttaccttaagcttaaggtgtcctaatactatattaatatatgtggcgggttgtgaataattaatggtttttatattatttattaaattaaaatacacaatattcaatattaaatatcactcaatattaaattaaactaattaaagtatgccactcaatgggccctaaaattcaatggaccctaaaaaaatatggggtatattgaaaaatacctct

SEQ ID NO: 17758 - DNA, 2184 bp, Cannabis sativa
ttgcattcattaaatgaacctaagaccaatcaaatccacattaggacccaataaaacttaattaaaaagctttggttgtacaacactcagtggctggtgcaataagagcctgtttggattttaacgttccaaagaagcttacgaaaagaactagagctatatcataactatttcattcaaagagtgtaatctaaactcgtttggtctatttttctaataaaggccaaaaatgtaaagatgaccactaaatttcccaaaaagatgttaatgttacagataatgataccataatagaacaggtaacttacaagagaaattttgacaagtcacaggtttgtcttctttaattgtatttgcaactttcagtagcttactcaacccgaagtctgcaacttttagatgcccggaatcatcccgcaataaatttctgttatcttactcatgaacaattaagaaactgtcaaaaagcttcaatgattcagatatgatgacaataagcatgctctaaaccaagggggaaaaaagatgttatactgttataaacatatcttgaaaaaacaaattacaacagtgatagagtaaaagagaataaatgtgcatacatccatacaaactaaacccagcagtaatctatacgatttaaagtgaactgtgtccatttatctattaggaaagagatttggttgcaattcccaaactaagtatgaaagactttttcaacaaattattgtcaaaataattatgaaagttaacttagaactcagaagggaaaattgctgatttggaactgtatgcaagtctgcagtcaccgttatctctcaacctaaaaaacatggtgtgaccaaaaagaggaagagagagaacatacgaaggctcaagatcccgatgaatgattgcctcaggtttatgttcatgcaaataattcattcccctgcaaaataaaaacagcttagggatgagctcacaaaatataaacaactaagataaagcctatattcaaatacacattagctaaagttagtatacaccttagtgacagaattaactagctggtgctaaattaacgcaggggaaaaaaagaaactggatttgttttattaataagaccctggtagttcaagagccaggcctctcccaaaaacaaaatccttccagctcaattacaccccctaacagcctaatcttatcctcactgatggagtttccataaacccaaaaacctcccataacagaataccctgtgagtggctcataactattgcagaaatctaggcatattccaactgagaagtccctgtcatacggctggcatggcttcatattgtttagggtacttgcaagagtaggtgtaagtaattgggggtctatcactaagctccaccactaaaaactcaactcttttgatatcaaatcaacaaaatcgcaaataatattggcagctcaaagagcaagcagtaaccaagaagatgaagggtttccaacataactaaatgctccacaatagtcatttttaaaaagttaaatattagttagttccacccaagatagtataaagctaaaataaaaaattacaatcatactactaacgttgaaccctcttaagataaccataagttagattacacccaagaggggaagctcaaatggtcaagcatgtggcatgtggcaagtggtttgctcccaccaggtttgaggttcgagtccctctgggtacctacattagcaattgttatagtttcctagtctccaaatattgtagggttaagcggggatcctagttttttttttcaaataataaaaaagattacaagataaaattattacctatgtcatcactaacaaagggggaaaatgcacctcaaactcatattgcatgaagaccataaattacagccagatcggcaatagttataataattcacaatgaaagaatattttgaaatagattaagccggttaactgacctagcaatgtctagtgcaaacttcactgcaacaattggctttaatgcaccttttcttcttagatattcacaaaagtctccctgcagtttagtaaaatccaaggaaaacatgtaacaattatattggaaatgattttgtcctctcctaaaaggaaaatttttcaaccagcattttttttcactttattaatcagtcttatatcatgacagacaggatcaag

SEQ ID NO: 17759 - DNA, 3790 bp, Cannabis sativa
tctttttctatgctttctacaaacaaaggtaaaaccttttactagctgttgactatttgacaccacacacagaatcaaaatgatttatatatacacataattacttgactttagagggtgtgaggagcccacttccttggttattaggcaacaccatatccgtgtgagaatgattaacaatttttctatattatttttatattaagtcaaaaaatataaacctcgatattaaatgatactaataataacagtaacacttgttggtgttttccttagcatctctcttatctttagttagtattagtattagtattatagtatttgttagaggtttattaaggtgtattaattgtgtaagtaggtaatatatacttacttgctgttgttgttgtcacgattgatgttatcccagtcttcccatccaccatgtgcaaccacgtcatcaaagtaagtaaaagagtaaacaattctagcatatctccccatggctcgtcctatgtacaatggacccgtaccagtcactctacacttgacgaaagcaaaccctgtattctcgtacggcgagttcctgtaatgagccgctatcgaaccgaaccgagtggctatcgagtgcagctcacactcctatatatataaacatataaacacattacacaacacattcattataattcattcatgcatataacacagacgtcatgaaaaagaaaacactgtatagtacttaccaaaatatatatataatataaacaaattaaagtgaacgattgtagtacgtactaaaagggttatgctctttttaaatatatatgaataaataagattattatatattactttgtacatggagcgagcgttgccgaagatgaaatcaatggagccttgaatataacactgcttaaagtaatggcgtccagcatcgtccaacaaggtatcctgagccccatagaatccacaccctgagaagtacgccttgtcccctgatattctaaacgccgccgcctgccacccttgcatccccggcaacggagccggcgctgtattctacattatgtaatatgttatatattattatgttgtggtgggtcatgggtggttgtcccacatcgaaaatacattaaagaatttcataccttaaagctgatatttcttgcagaaaaatagttagcaaaaacagtaaccgaagccgttctgtaagtcctaagctgttgaccattaggaccaggatcacaagctctgtcgtgccattcaatcactgtattttctctccctgctccttgaaatgttatgtacggctttctcactggaaccaccaccttctctctacattaatattaattaaacaatctcattaattaatttaattcaattcattcacatgaattataattaattaattaatttttaattacatgtagtatcctggactgattagtatggtaatgctaactgtattgttctccgaaaccgaatccaccgccgcttgaaccgacttgaactgagccgagccgccctttacatcgacggtgatgaggcggtgtccgacgggtccaatccacttgtgcctatggctcttgctcacaacacttgcttgtgttgtagtccataatgtgatcagaataatgaacaccatatttaacctgaaagtacaacaacaacccataacaacatgcattaaatgaagattaattaataaattcacacaaattatgaacaattcaataataataataataaagtagaaagagtaagagagaatggaattgttgtcttgagctgaaacactgaagagagagagagagcttttcaatgatttggagacacaataacatctgtgtattttgtgtatgtgtgtgtatatatagtgtgtgttacatgtgacaatcttaattaattaaatatattattatgaaaattgggaaacaactgggtgtttcttctccaacggtcattttttttcttcttcttgatatataggtagagctattatatagatagggttgatgagtcttgttattacttactactcacactatctattcatatatgtgggtcagtcagtgcatatatacgtcataaagttctgcacgtgaatatacacacatgaaactatcactggtaagtaatggtatcttataacttatagtagttggctggccaatgtgtgtgaatggtacaccactaacttctgtttactcaaatatatattaattgtcttatctacatattgattaattaaaccttaatgacattattatgtgttcttctagttatggtccaagcatggttcaataccattttctattaattatacatatgtttagtttgtttgtaccattcattgatacatttctttctttctttctttctttctggtcccctatgtataacatattttttatgaacgttgggacctgagccactttttcatctccccaaaattggacaaatacaacacagccaaacaatacacaacataccaaagttttcatatacctaaacatagatggacgaaattgcccttttcattctttattattgttattattttttcatagagaattgggggctcgaatcacaaggtgaacaaaaagatacccttcttttttggctttgtcagtaagccactgtcactatgcatatcattacagaagaaaaaaactagggtccgttatgttgtcgtaaaccgaggagggccctcttgtctttttatctttttaattttagattaattggaaaaaaattcttaaattcaactcctaattagttttaattttaaatagtaataatatatagataaattagtatttttaacttaataattgtacttttattgttttaacttttacaatttttttttaactattgagatagttagatttaataatttttatttaatttcttttaatttaatcaatttagtaattgtctatatattaaattatgtttcttaaactttaatatctaacaaatcttttcaaacttttacatatatcaaattatattcattggaattttgattcatgttaaattttctgtactaatattaaataaaaaaatttaaatctaacccaacaaccttaataattcaataaaaaaatttaacagtagtaaaaattgaaaaaacatactttaataaaattctaattagtacagaacttattcaacctaatatatataattacagttacagatggtgacgctgcttgcttcttttccattccatattgtgtcgttttacgtcttggtgttgtcgtttattgtgttttttgacaagtgtgcaatgcaaataattataacccaatcagcagcttcttctattttgtttccagtgggattagatatataataatacattaatttgattttcttcacacaccatcattatatatatactgctcttgcaatatcatctatcgtcaattgctaatcttctgtctgtttatatatagtctttatttgtttattaagtaaagactaatcattgttaattacaagattgtcttgtacttgccaaaactatacgagcaaggaaaaaatggttcatgaaaagaattataattactatttctcactgtacaataataataaaaaaaaaattactatttcttcacaaaaaaaattactagcaatttcatataacatcaaatatagattcttaaataaaatatagtttattaatctacgatcaacggttaaacatttgattacaaattcttattacaattttttttaaaatttttttataaagataatgttgtaattataataaatattattataaaaaaaa

SEQ ID NO: 17760 - DNA, 5429 bp, Cannabis sativa
agtgtaaaatgtattggtttaaattttttttttaaaattttttaagtatagaaaatcaaatttcccatctaatgatctaatggtactatatccctccctatgtgctttacttaagttaactttacttgtggatcaatatcactgccttttttttgtatcataacttaattaaccattattttctagtctagtctcctcctcacaaacaatacatccagtatttcttgtcaaaataaaaataacaataacaaaagaagacatactaaaaatgaagacacattttgagaccaaacaaattaatttaatcacaaagatacaaatttaatcacagacttaacaaatcaagaatccaaaacttagaagatccgcaagagagatttatgaacttacacttgttgaaatgagaatagcaaaatgggcaaaggcattaaaattgtaacatatcagcaactatttcatcaatcaatgaatcacatatttgagcttcaacctctactgccaattcaaattcatcaacttcaaagtccaaccactttccatactggctgctcatgtccttgtccacaagttcatccaccattgaatctcccatgctttcccaacctgagatttccttgtaaatttcttcagccaaccattcctttcttctcaccattgctactcctttcatccacattctgtatcctccgcccaaacaacgcctgtatctcaagtccaagcattccccaacacaatcaaacaacaccttccttctcatcttagacccccctccaacatcacggtccaatggcccttttctattctccaaaacattgaatagacgagggttaataagatcacgcgaacgccccatcacaaactcattaaacattgactctatgttacacaatatcttcttcacatattctagttcccactctgttgtttccgagagatgggacatgatcaatgtggttgcgcgctttcttgttaaacttccagtagaggtagaagaggctgaatctgacagctctgtatcagcttctagtggctggaatttcttcaaaaaactcaagctactagcttcttgagcttgaacagatgagcacaacttgcttcctgaaagtaataatacttaaaatgctaaggattaatctgtacgaaacatctgaaatcttattatacatcattcaaaaggaacaacttccttttgaaaacaaaagagaagagaatcaaaaattataccttcagtactattactatctgtagtaattgaagagttgcaactttcattagaaaatgaagattccaagatagagactggagtcactggactagaatgtcggccattttgcaactttcctccaggttctaagttattgcttctataatcatccatctcactatccccctgagaatatgaatatcatatttgtttcatcaactacaatcagattatatggtgcaaaatcatgtttatggtattttctttgcgaataacaaatttgttctgactttctaaaaatcttaaacaaatgtaatgatagcttataaaaagagctaaagacaaacaatgtaaagtagaattgatcaggcccatatacctgaaattttggtttaaaactagacataggtggacgactggttgaaaattgaaagtcaaattggccactgaatttgtcatcagccattaactgttggtctttttgctccttcatctttggtgtagatatcacattttctaaatgtggcccagaacttgaagctgaccctcctttgacagagtcacggctcgaagaagactctagtccaaaagttagctcccttaacttttcttccaaaagcatactcaaagcgtcacctcctatgacattgtatcccagagaagataatttcatattgtctgaatcaagcagcatcctcttaccttgatggtccccagaataaccattttttctatgtccaagctgatcctcagaaccaggcactgatcttgtaagtggggcagtgaatgtaaaagaaacaacatccatgcctttctttcggttgtcttctgcccaactggattttattggcttctggtttttggcattcaaacttttgtcatcaatctgatctttattgaaatgaagatccccatctattgaccgtttctttcgagggacattcctattattagaataaggaagttccttttcaccttccacttgcgagcttgacttcctagatcctaattttgagttcccactacttctacttgatcctttctgatagacaggagacgaatctcgggacagaagtttcctaccctgcgagtttgaaaccagcggctttgaaagtgaattatctttatcacctaggcagttctgtttttgattattttgcctaagaatggaagaattttgtgaagaagatttcttattcagattcttttgagtattctgttgacttcgaaaggttggacttgacgacttatgctcattctgttgtcttggggtcacttcacttctagagctatttaagttgagaccttctcttttctgaacgttgacctttgcttgtatagcaagtgaaatagactttcctttattctttagaccagaagaaccttcttctttattagagatcttgaaaggagtatcaacagatccattccagctcttgttcattgattgtcccttaagatacttggcagcatttgactcagctggcctttgagatacttcagcaagcctggatgttctatgagcagcttccactttctgttttaagttttgtactttcatggttgccgacgaagaaccgagcaaagggactttttgtgtggcctccgccttttctttgagagcatgaaccttcaagggtatggaagaagaccctacaagaggcattttggctttggtagtaacttgaggtccaggctcaataatttttgctgcagcttccattatgtgagccacattattactcgaaacaaatccaggacttttgataggagacaaaagtttatggtgcgtaactggaatggacttagcagatttacggggtaaaacttcagtttggaacttctcaattggcctgcttggtgtcttcttgggcttgaactcaactaaattcgaggaattttcaccatcatcctttctaagcatgttcccagagaacatcatttgattgtcctggtaatattcaaaatttcttctgtggtaatgagcatcttgaagagattgagtatcaaaatatggggtagagtagggctcttgaaaattagaagtgggcaaagagtccaaccccattagcctggctactacactaggagctctacttccgtcttcatccgtaactgatgaagcacaactgtactcaccactgcatttgaagcttgtccctactccagtttcatcgtcatctacctgcaaaaccaataagcacatacaatcatagattcaatcaccgaatagacagatgcaatagaaagaaatgatagctagctagctgctctcctaccaatgatagacgagttgttggcaaattcccatcactcctctttccctgcttaaattgctctgataaaatgaaatgaaaagttattataacctaaaccaccaagaagaaccaagattaaccaagattaagaccctataaaatgaaaggaaacaaatagagttgttcaagtgccatattacatgtgcttgtacctggtaaatcatacttgtttgagaataactttttccgtgattttgctgtccagtcaaagagatgaaagaaaccaccaacataaccggcgccattttttgaaccttctttctcaaaccccatctttattgaagcagaaacaaggctactttaacatttatctattgcagtggaggcaattagaaacacattctgtaacaattgtctgcaagagatatagcatatgacttgttgaaccgttttttgaaatttgttcaaataagaaaaacacttaaatgcatcgataataaactatattgaagtagagtatcctatgacattgagcacacaaatcataaacccatcaataagagtttgtactctgccatatcttgtcttggtttatattatctcaagcacaaaactttgtaattgcaaatcatttcctctaatttgttagcataaactgaaccacttttcgaaatttgtccaatttaagaaaacactcgtgcatttatgatagatttatattgaagtaaagtgtcctatgacattgagcatacaactcataaacccatcaataagactttctactctgccatatatctatcttgatttctctcaaaatcataaaaggaaacacagcggactaactcatcctatttgatccaaagttccaaattaagtgtatactaaagtacaaagttacaaactactataagccctcaaaatgttgttagacaattgagagagaaagagagaagcttggatcttctatgcacccaaaaagataaaattcattacaacattagtaaataattcaagtcaaccacataagtagaagacatcccagaaaaaaagtgtcttaacaaacaatgcaataatcaacacagagctaccattgtcccaaattatctgggaaaattttaaacagaaaccttggcataaaaaattaacccagaaatcaaaaacaaaaaatcacacacaaaaccaatcaaacaaccaaaaagcttgtaggcccagaaaggaaaaaagagaaaaagcaagaaacttacgtgaaatcagggagcaatgccagctaactcgtctctatcacccataaatatgccgaaactttgtgagagtaagcttcaaagacaaagatgacccaacaattaaaattcacagacgatctgaacccacttatcaaaatggaaaattcttgatacccttttcttcattcaaacaattagagagaggagaggagagagattctcactgtgtagtgagaaagaagcatacaagttgaagcaataaatgaaagacaaatatatgaaatttcatatatttttatttttttggaattataaaaataatttgcaacaaaaggttaaaaaaaacaaactataacgtctctttggagagaggggggcttgatttcaaattccaaacgggactcctcgattatgataaagttacctggagtttatagtctttcaaatcactatccaatgaaattattacacgtgctcatcacttgctttttggtttgtctgtatgtcgccgtcgttggtcagcactagcagcctaaattgtaggaagcaacatgccacgtgtacatctaatttatttggttactggtcattttccaagttcaaaactttttctgtcgtttcaataggaaaacgacatgtcgtttacaaggaagaaaatgggaagaaagaaagtgatggagagaagcaaagattgtttggtaaaagaaaaaagaaaatttctccctaaaatatattttttagtat

SEQ ID NO: 17761 - DNA, 8719 bp, Cannabis sativa
aaattgtatgataattttttttacatttctaaatataaagaaaatagtaaaatagttactcatattattaaaataaaaaaaatttgaaatttaatatacattattaaacaaaatataacctcatatttttgcatttttttttggctggttaactttttgtttttttttctgaaataatgccaaactattattggtttatattatttgttttttttttttaacaacaattgctcttcatttttgcatttacatatatgttcttataaaatacgagagaaattatttgctttgcacgtacaggtggttaaaattgcttacacgtctatcaatgactgaaaaacaaaaaaatagtttatggttgttctacggtttaaatatcaataatattaatctcctcaatttgtagattccaagtttctacatcagaacaaaaatctcaggtattaaaatctagaatccaagaaggtagcaatgatcaaatctataaatatgaataccaaatatagctaagccagcatacatattcttctgaaagtaattgagaaaaaaaaatcatgcatagcatatatatcaatgacaaaactgcatatatatatatatatatatactccattattttctttgttcttgcaaatgaaaccatagataaataagtactgctcctcctctcaattatggatcgatggtgggtgcctgttaccaatggggttaggtcctgatggaactttgggaccatttcctttaacaagctttctggaattggcctttttattattattatattttatatagaaatgataagaagaaaaattcttgttagtcactttaacatgtgttcatgaattacaaatgtaaatcaattatatatatgcataaaaacttacccaagtaactagcatttgtcgtagagctaaactattttttgctggtgtacttgctccatgtagtttaactaataagtcaaaaacatatcatgatcagtacaaatgttaccaaaaaaaaaaacaatgtttgagtctctcaagctgttcataatcatttctactaaacaaatggtaccattatcggatgcagcactgaggtaatgtggaaaagaagcaaccagcaagagccagaggagtgcatagagaaaataagcaagaatttgtttcctcttcatcttgttttggagtatagacatagagtttattatgacttgttggagggttggaaggagtataaaatttaaggcatggtgtatttataagcatgatgataagctattcttgtgatttacttttatgttttatgatttgcttagtagaaaaaagagagagctgggaatccaatgatatgctacttctgttcagattgagttggttgataaggagagagagttattgtcctaaagtattaatattggaaaattttacggtgcactctttaaaaatagatgtatcaatatatatttttttttcttcgtcttttcaagatagtctcacagtgataatagaatatataaaaaaaaataaattactcttttcattgccaattaattttataatagaacctcatttatcttaaaatcacctaatattatcatatacaaaggtatattattgttctatatggtgaaagtaatggtatgttaacttagtttggatgcttttattttgagcccgtacatttttaagaaagtatatatataccaagatattttcatgctcaagtaatcaatttattttaagagttatatgcaaatattatatcaatggctaattatcaaaaaatgatttatgtatattttaccatgcccaagtccaaaacccaagatgtttacagttaattaatcctaattcattgtcaatgagaaaaagtaacaaaaggctaggcatcattataatgttgaaatgttattccatagcaataatttagtaatgtctggttgactcctaatcagacaagttataatgataaattaacactgttagttgggatctaatttttgtctgcattttattatgcaattatttgtatatatttttaaccctttttcattaaagttggttgtctaattacagtgtcctgttatgcatgtgtttgtaccttttccattctctcaagactcttgatcagaaaaactaaacttgtttgagaaatttttctctctactggtttctttttgtggtgtctttaactataaatttttggggaataatattacttactattaggaaagagtgtatttagcatgtttggtttgttgtaatcaacattgtaatggaatcatgattacaattccaatatttagtttgcctttaaactcttgtaatgacatttcattgtaatcactattacatcacttgtatgaaaagtaattacattcccgtacctcacgaatcttcattacaattacttaaaatgactatcttacccttattttatactttttcttactaaagtagagataattttgtcaatttactatctatttcaatattaattctaataacaaatcaaacataacaatcaattcctattacgattcttattctattacattactatattccattccaccaaaccaaacaccacctaaagtacctaatactatactgatgtgacgttttataattagttactaattttttatattatttattaaattaaaaaatataaaaattaatattaaaatacattaatagtgatatgacacttttgtggtaatattttaaaatgcctttttggcatttcttactggaaaaaattaataagcaaacctcaagggcagcatattacataataaaaaatcaaaaaaattacttttacaataatctattttgtttataaattcaaatttgactaaatctcacacctaaattccaaaacgtcatatgtttataactcttcaagcttactctcacactctatacacttcacattccctttcacttgtcacttcaaaacccactctttttctctcacacttacacacaaaaattctacatatttagagttctaaaagcattaggatactatgaattggtcaccaacacagctcctcttcacacaaaataataattatacccaaatttaaactttataaatatattaaaaattttgagtcagtatcttacgatctcgactttgccgcaatatctctaaactttacaattcaaacaatcaatgagagtaaacatatattgagctcataatctctttgaattagtcttgaacacttgcattaacattctccattttctgggtatgatcgtattaactttcttagaaactattcttcagaagttggggttcatggaaagatggattagtcttatcatgagttgtgtttcctcaactaaatatatgattatccatgggagatatgtttgggccctcttactccaactcgaggtattagataaagcgatctcctttcaccttatcttttcaacttttgtgcggaaggcctttcagtaattctttgtaagtatgagaataatggatgaattcatggttgcgaagcggccaacggggcacctcgtgtttctcacatgctcttggcagacgacaattatctctattgcaaggccacggttgaagaggcaattaaaattcaagagctgcttcaaaaatttgagatggcttcagggcaacaagtaaactttactaagtcctcgatctttttcagtaccaatacggagtcactagtttgtagccacctttgttccctcctaaggttgagtgtcgcgattagggatagcttttacttagggctgcctagctagcactatgaatcgcaataaaacaacggtgttgggttacctcaagactaaagttcgtaagcaccttctaagttgggaaagtaagtttcttttgcgtgctggaaaggaggttcttatgaaatttgtggtccaagtgctgcctagctatgtcatgagtgtgtttctagtacttcctttagatataggtagagatattgagaagctaatgacaatgttctggtggcagtctaagggtgatcgtaaggggattattggatgtcttgggacaaactatgtaaacacaaaaagggtggcgacatggggttttgcgacctacacgatttcaaccttgctcttctagggaaacagggatggagactcttaacagagccagattccttagtgtcaaaacttttcaaagcaagatactatccaaatggtactttcttatcagcccagattggttccaatccgagttttgtttggcgtagtattcttgaatctcaggacctagtgaaaagtggagctcgttagtgtgttggtaatagcgtatctattccagttttggaggagtcatgcctgcttgatgatggaaatcccttgatcgaatctatcaatccagctaatttagtcaatgcatctgtttcgaacgtgatattaatggatggttcgtgttgggacagtgagcttatagccgacttgttcacagcaagaggctagcgactaatactcaacattcccttacaaatttcagcaactatggatcacttgttctggtgcaaagaaacttcaggtttgtactccgttaagagtgcttatccgctgctccaaaaacaaaaaaaaaagtaaatggttcgatgacgaggtttctacattttggaacaagctttggagcttacaattaccaccaaaagtctctaatttggtttggtgcgctagattgaactatctgccaacgctaactcaactgtgatctaaacgtgttgacgtctcgattttttgccctgtttgccgagaacatgaggagaccatcctacattgtttggtcacttgtagagtgattaaaacatgctaaaattgagtagggattggcacaaaagtagcagctagtgcatcttttttcgactggtgcaatgcaatgtttcaaagtttaaatactgatctgaaatttaccttggcaactatctgttgggcaatttagagtgcaaggaacgatcttatttggaacgtgaaggaggtaaaatttcagaacattattgtatttgataaaacttatcttgataattggaagaaggctcaaaaatctgatatggatgcatcacaagttgagcttcagttgggtgatggaaaagagcattggaccttaccaaaagaaaacagtatcaagattaatgtgaatgcagctttgtttgagggaggtcatagttacgatttgggcctagttgcaagagatgccaaatgtatactgattgaaggttgtaccattttctcccatggtaaagtggaacccaccctagccaaagctatcggagttagggaagctcttaattgggtaaaggttttaaatatacaacagatgaaggtggaaactgattgcttgtgtgttgttcaagccttgcatagccccttgtctatggtatctttatttggtatcatgattgtaaaaatttgttagcaggtcttaagagtgtttctgtttctttcgttaaatgatctgttaatatagtggctcataatttcgcaaaagctgctatgttatatcttgatcgtcatttcagtttggagtatgttccaactgatttgctaccttatttgatagtcgaagttgttggttaataaagttgattattccattaaaaaaaaacattctccattctctcactcttcttataagagttaatgtattctttcttcaaacaatcactaattataataaaaattctcaccaacttgttgatttctttaggaataatttcaaaaaaaaaaaaaacacaaaaataacaaaagaattacaaaaatacagtttgtacggaattttaaatatttttacgattttttagattttattacataaaacatggtcttttgatatatttttatgttgtattcttattattttattgttggttttttgttatttgtatattatttcttatgttactttgttgttgttttgatataattttcttgttacttacatataattttcttgttgttttttttatgtttttataatataccataaaatatatataaaaaaattaaacataaaaatataatttttttataaaaattggtgtttcatgtaattattctatttttttaactctaaatgatggtcatttatgacttctgtctaccttcccaattcacttgctttaaaatttggtgggctttagaaaaaaatatattattatgcccttattaaaagaatatgtagtcttttaaaattattacaaaatatatgtataattttaataagaaaaaaaaaattagggggcgcaactgggtagaccctaggtgcttaggccaaacccgattctatacaaaattgttttccaactaatttatagaaattatgcttcttttaactctttaccactaatctcgacttgctatgagcttgatgcaattatcaggaaattttggtggataggtaacgctgagaagaatagattcatggcctttaaggcatgggataaaatctgtcaaccaaagttagtgggtggtcttggtttacggcggttcgaggatatgaatagagccttggtttctaaactggcttggagtctggctcaaaagaaggagacaccttgggttacttgcctcctgagtaagtattgtagcaaagactccttctgggcagttgagccaaggaatgggattcttttctttggaagagtatcctggcaactcgcaatattgtcctaaaaggctcggttactcttgctgctgagggaaagtccattgatttctgggcacaaccttggattccttggcttgatccaaccagttttgctcagcttttgggaagcctagataggagcaggctctcaatcactactgttgctgatatttcaacgaatggaagatggaacagtgaggctgtgatcgatatctttggtgctgagaatggaaggagaattctagaaagattccccttcatcattctgaccaagttgtgtggaaaggtaatgagaatgatgttttttctgttaaaagtgcttatcgtcttgatcaagagcatcggtttgggtagaggagacttctgtggaaatggttgtggagttctaagatacaccctatgattgggattctgttgtggagaatcttaaatgaggccatccccttaagaagtaaactccccttctacaatgagaagaattgtctgttgtgtggcgaagattttgaaaccagtctccatgtttttaaagactgcccagtatcgaaagcaatgtggtttccaggtccttttcctattcggtgtgataacattcctggtgattctttttttggatttgttgaaaatctaatgcttgctgtgtctaccgtggatagaatccctttgctttgcttcatgaggtgtctatgtcaggagatttggaatctaagaaataagatcattttcaaaggttctgccattgatatggctttgctcaagaatcagattctttctaagtggattgaaatctctgaagtgtctcagtcctctatttcaagtttggaggttgatggtgtcaactcggtctcggattgcttcattcgtaatgaaacccatgtggtgctgatgacgtacgcttcttggcagaatggaacaacatgtcttgctgcagtgaaggtggatatgaggagtggttactgggcttacatgatgcaaaaatcagttgcaacatctccattagaagcagaggtaaaagctattcatatggctttatcctgggttgtgcaatgtaagtggaatcaagtgtgtgtgttgtctgattcgattactactgttcaggctttccagcagaggaaaaacatttctaattggaagcttttaaatatttccttatgtactttagatttaattaaggtttttaatgtttgtattttctcttatatcaatcggcgtagcttatcttttgttgatggattggcaaaaaagctaggatatctagtgaaattgctaaaattttccaaggggagggaatttcccctgcggttctcatcgttttctctgtttaatagaacttttgttccttcagaaaaaaaaatagtaattttactattttttgcatactagtagagtgtacaaagttataggtttttgtcaacaatattagaggtatagtagagttatctactatactaaataatatcttttctaatgacgatgagaaaaaagagtctacaaagttatgacattaaattcctctttattgtaaaaacatgtcttacatcaattaatgctctcacaatgtcatttaaggtgtgtaataatagtgcatctcattttgaccaaatcaaaccaaattttggttgaataaactaaggtctacactattaatttttttaaaaaatatatatatatatatatgatctttcaccaattaaactgaattatagtagaaatattggtatgtatctttcgaggcagtctattaaagaatttttcattacgatatttatattgacaaattattattaaattgcagagagtgaaattaaaaatttaaacgaagtctctaacttttatttataagcctaataaaatggaatttggctagaagcctagaaacaaacatctatattattactctattagatgatttaagaatcatccattcacaattctggaaaccaacgattaaaattaaattaaaaaaaatcttgtcttgtcttgtgacatggtttgagattgtttggaagtctgagtttgtgtcgtgttttgtttgcgttcaactgttttattggctactgtttcattggctact

SEQ ID NO: 17762 - DNA, 2112 bp, Cannabis sativa
agaataaaatattaggatttttaaggtatagtttttcaaatttctctaataataataatagatagtcatattatattataaaacatatgtggtaagaggggactaaattctttaaaatgagggaagtggtccaagttgaagctgctatacagctgctgcagaccaggaatatagggatttgttgaaccccagtttgcagcccaaaattttgtttccattaatttaatttattaagattaaagtctatatatattttctggtatataaaataaaatgtatgaaaaagtttgtcggcctttttatttatttatatgcaagaactaaatgatattcttatggatatatgagatattgaaatccagttgttttagtcaaattgatgaggaccatatatatatgcacgaagagttgttcagtgtgggtcatctaagaaaactaaagctagtattgacatgtatgtacacgtgagtgcagtccctcgattcactgttttgatttgatatatatgttgccctaccctaaaagtgtagggtaacaacgctcatagacaaatgagaaatagccaaaacaaaataaaggaaggaagatttcatttcatttttatatattggtcaacaaaattggttatgataaaagaaagagaacaaagcaaccttatgttatcattatttgaaagaaagttatgtagaatatatgcaagtacaatgtattttcaaagaaaatatacgtatttaaagaaaattttgcccaatatatataatattgggagggggctccccatttgtaatatttattttattttcatatttgatgtaattgagttctttgaccaaggctcaaaatgaaggattttttccttcttttttttttttgttaaggtgtgaagaatttttatttttatagtttttttagcaaaaaagtttttcacaaaaaaaaaaagaaataatatgagaaaaaaaaaacaaaataaagaagcaaaaaccaaaaaaaaaaaatagagtgatcagatgttattgtttttctcatatattttattttttcgcaaaataatgtatttgaaaaataaaaagtatttttatttgtaaactttaaaataattttgtttatatttttataaaaatttacataaaaacttaggagcaaattatattgcaaaaaccaacggaataattatgaattagaagaagaaaaaaattaaaacatagtatatataaagtaattttttgaaaaaataaatatatgtattcataaattatatgtaaaatgtgtaattttcctaaattaagatagcactgatctttgattccttgtttgatagcgaaaataaaagttaaaaataaaaataaatatatctaaagcttccaaacaagtttttcttaatttctttccctaatgagcttaaaaataaaaagcctatagatatacaatgatggaactatgcacaagaataatgtggggccaaattaatccatcctcttctattatttaattttttttaccctaatattttttatgccaattgtcaaacacaaacaatttatcaagataatataaatttaggagaaattagttgctaataatctgttcgaaacctaagacactttgcttttaccacgttttgtcgtttaaagaagacaaataatgaataatattgatggctaatataatgttaataaaaataactccttatcgatcaatttcaatagctttaagagatgatgtaatgtcaaatccactatgggggtaataatatatataatatataattataaatgataataattctttgagctatttaaggccatgctcatgatttgacacaaatctaaagcaatttttgtacatgatcaattgcatcaagtcttagtgatcatgattcatgatagttgagtgttctaggtcccacaaccacaaccagtagccaccacctcaaattaaattcaataataagttcctatttttcttttttatttcaaaaaatacgtggtggttttaaattgcaattgtaatattagtatttttttatatcatctacaaaaatataggtagcacttccatgaaatgtagtaatcaaatgtggtaaacttaagcaggaaaatgttgatcaatccc

SEQ ID NO: 17763 - DNA, 2943 bp, Cannabis sativa
gactctatgaataatgtttcgttacggtttgttaaacgttctgctaatcgagctgcacatgttatggcacgtcagtctcggttgtttgctgatcgtatgttcacgagggacaatgtcccttcgaaacttgaatttgtacttttgagcgattgctcttgagttaatgaagttgattacttattaaaaaaaaaaatatttaaatgggctttgtcaaaaaaaaaatatttaaatgggggcaacttaggaatttcattcaatggagataaatccagcaggaaggccattttggtaattaaactcttcttcttctactccataccgtgctcatttcttaatctctctactctgtacaaaataacaaacaaacgaacgaactctcttctcagctaaactaaagcgaactgctacttttgcagttaaacaataaacctccgaatcttcgaaacctacaactctttcaacacatcaaattagtcaacccaatcacttaacttgactccccatgttttgaccttcttctaaagaaaaagaacagaagaacccacccaccatcatccattatcattattcacagatgaaaaagctcaaaaaagacatcgaaaacagagacccaaatccaaacatgacaaacccttttgatattttcaccgatgagatcgtatacgccattctcgaccaccttcacggagaccctttttccaaaagatccttctcctcagtctgcaagtccttctacttcatcgagtctcgccaccgcagagccctgaagccactccgctccgacctccttcccaggacttttcgccgctactcttcgatttcccacctcgacctctcgctctgttcactcgtcgacgacaacaatctcgccgccgtttccgtggcctggaaatccaccctccgctccataaatctttcccggtctagagctttttccagcattgggttgttgactctggtcaataactgttcgggattggtcgaaattgatttgtctaacgggacagaactcactgactctgccgccaaggctatcgccgaggcccggaacctggagattctccggttgtctagatgtaaatcaattacggatattgggattgggtgtattgccgttgggtgtaaaaagctaaagaccctttgtcttagatggtgcttaaggattactgatttgggggttggtttaatagctatgaagtgcaaagaaattcagagtttggatctctcttacttaccggtaactttattcttctttgttttggtagctaagattaatgtgaagaatttttttaattgtttggtgattgagttctgggatttttatcattatggtttaagaccttggtggggttttattgaatttgttttgtgagcatcagattcttaatatgagttttttttatttcagttgttttagataatgaattattactatgtcacatagttaaggctagtcgtagcttggattataaaacagttaattcacttttgagaaatgtgtatatgatatgcttacttctcttaagtcgttggcctgttttctcaaccaatatagatagtggatgaaaaagtgtatggtcctaatggattgtgggtccaaaaaagaacaagaaaaagtttccaagtgatgaacttatcttaagattatatataatttatgttatatacttaactttgggtgtacatgcaatgtatatgtttgtatttatatgtttatgttaagtattctcttcaaccaatatttacctatgcttttgtactgcagattactgaaaaatgcctttcacatatcctgcaactgcaacatttggaggatttgattcttgaaggctgtcatgggattgatgacaatggcctttctacactcaaccatacttgcaagtcaataaaagtaacattttctccttaatgccaatacttgagacttgagagttgagattttctcatatgacgtttacttttcagcatgttcataattgcatatgtagttatgctatgtatattaacttttaaaaaaaaaaaaagagaaaggcatttaaattgtaatgttctgaaatgtccaccttatcttatttagtctagtaatttggaaccattttaaagtcaccattccttctattgttacacttgtaaacaagaaacacattcagacatcttacttaaacttgttcacttaatcttgtggttttatgcagatgattaacatgtcaaactgtcagagtctcagttacattggtttatcctctctgactaacggcgctaattctttagagcagcttatcttagcaaatggcccttctgtaagcctgcctgcctgatacccttttaactttttttcattttgcataattaacaacctttcccttggctcattaagatatctctggtggttcaggtcacagctgatctagcaaaatgcctaagtcaattttccagtttgcgatcaattaaactagatggttgcttggttacatgttctggtataaattctatagcaaattggagtgcctctctagttgaactcagcttcagtaagtgctcgggacttactgatgagtgtctctgcttcctggcagaaagacataaagagttgagaaagttagacatcacttgctgccgaaagataactattgcctccattgaaggcataacaaaatcatgtacttcccttacctccctgagaatggaatcttgcagtctggtttcgaaagaagcctttgttttgattggacaacattgccaaatgttggaggatctcgatgtcacagataatgagatggatgatgaaggttttaaagaaatgaatctcaacattcctagtgtaaaaatttaaaatatgttgttcttttaagcaattcaaagtggttaccttatttgtttttgttttgcaggtttgaaggccatctcaagatgttctagacttcagagtctaaagcttggaat

SEQ ID NO: 17764 - DNA, 1930 bp, Cannabis sativa
gatgcttataagaacttaaggcattgtattggttgacaagatagaaaggtcttaataagattaacaacagactctcttgcggtggctttatagtaaataattgttgctgtccatatttaatgggttaacgatgtactaattgaataataaggcctctatacttgcaagttgcaactttattttgacatgtaagagacaaaaaatattgggacatctttaatcctttggtggaacgtatatcgttgaaccagtttgagtagcttgtgcaaatcattgtatccccctttgaacattttatgacccatttgtttcctttgccaggtctttgagggagaaaacagtttcctttctactgtaatggaatcctcagatggactttatgctgcagcagcaagccttggaattgacgtgcagctcttttgttcctattcatctgagttgactgatgaaattataatgagctgcattggatatgccactggaggtgtatatccaagaatgactgaatcagaaacacttgcagagtcatttcttacaaaatttccttcagtcaatcctttgactgctcatgcaattttatcttcgggaggcatgcttattgagttcctggaatggtcaaacgaacgcaggattcacgccctccacaaatttaatgttcctgttgaaagtatcaatttgttaggtgctttattgaaatatggtgagcgagaggattcgagatcaataatgacagactattcttcttcagtctcttctggtatggactctgaaaaatcttctaaaagaaaaagatggagctacgacgatagccttgacaacattgacatccgaatagatgaattgcacaatgattcagaaaagcaattttccaaagagactattaatacttcttcagggaaaaaaccattcgagccattcatgtcaaaagatcatgacacatttcgtcagttgaaaaacacaataccatatgagagcaatttgttccatcaagaacagggatttgatgaagctatgatgatgaatcattttgttgttccagagccatatgattttcagatgcctaaagaatctcaaaagtttaaggagactaggttgtcaggtcaactacagggaacaaacgtggatttgctgaaaaactttgatctgcatgatatcagcagttctgatattctttttgcggaccaaaaaggtgaagtcattgacctgaccgcaagccctgccccaggcaaagagttttcctctgttgccaactcctcatcgttttttatgcctgaaatggaaaaggatggcatgagaaagtccagaactgctagaagattatcctttgacaaagacaatcagcctaaatttccaactagtgcagaaatgtgctcaggttcaaatatttggaattttgtaaaagaccagaagaagaatttacatgttggagccagcaattcctcagatatagatcttgaaaataatgctacacctttagacaaacgtaacaagctattaaaggattgtctcaaacataggtctgctgaaaaatcccaagggttacaataccaagggaggaactcgtcacttcatggagacactccactctcacatgcgctccatttggccagtccgcaacaaaagtctccatggacaatggagtttcttaacaaaataaaggaaaagagtagatttcgtcatcagtcccttccttgtgagactgctccttgttttgggtgttcgggggatgtatcaaaggttaccaagcgaagaagcccctcaattcttgaatttttcaagtaccaaggaggcaacaatatgaggaagataccggaacaaaagaaacataagagatctacacagtcaagttcatcaaaagatgaaaaaccttctgcctctattcttccaacatggacacctctagataaaagagcacggcaggttgtctaga

SEQ ID NO: 17765 - DNA, 7118 bp, Cannabis sativa
  modified_base (5440)..(5451): a, c, t, g, unknown or other
gtgttctcgtattgctggggtagttctgtatgtgggtgtggaagatagaggcttggtatgcatttttggcatctacaatataaacgaaaaaaaagacaaagacagtataaatataatttttaccgtgtgacaatataaatgtaaacatttacccaaaatctaggggtcgtttggctttacaacttaaaaactcttttctgttttaaaaaatagaaaatagtttttaaaaactaatagagtcgtttgacaaaaatttttaaaatcagttttttaaaaaactagaaaacggaaaatatcaaaatgttgctttcaatttaaaaaataattttattttgtctaacatattatatttcatatttttgttcacatactcagatcctaaacccgaaccaaacccaaactcgaacccaaatgggttcatattatggtatggtgttaaaatattgattttttttagtaagaaaaaatttaaaaatagttttaaaaaacttatgccaaacacctttaaattttttataatgacaaaaaattgttttctattctcacttttaaaaacacaattttaaaaattaaaaactgaaaacaaagccaaacaggctcgagtattttgtaagtttcttaaaaaatttcccaaaatagaactcccctacacacatacacccttagtagtatcaaaacaaaaagtaaatttacatggtatactaacttttgccattttttttttataaaaatactgccagacggtattttttacttttttactgtatttttttataactttcatattgcagtatcctgtgttaagttttcactggtgttctactagtgttttttagttgttctatttttgttttgagttgttctactttgtgttttattggaattttataaaaacacagtatttttgaaaacttttccgggtgacagtatttttgtaaaaattaaccaaaattccaatatttttgtaagttccccaaacaaaaggtggtgtttgagttagcccaatatgagaagtccaattataaaagaaagtgggtttcatttcatggttccaacttccaggtcatagcacccaacttcttccttactcaatctctctatcgtcctctaaggctttcttcggttctgtcactaactcttcagggatcggagatcggagatcggagaggaggaattccgcttccctcattggccggattaacaattacattactcacatcaggtactctacttacaattttgaggttgctatgaggattaaatacacagaaacgatggaaactttgtctggctctttcagttttctcaattgattctatctgttttctgtagaattctacattcgaattctatagggctatgatttaactttcatccaattctcttttcatttcctctcctttttaataatagttaggtttgtcataattagtttataatgtttagttctaagatttagaattgtgtatattattacctttgaaacgttataatatgaatacgtgttaatgttcattcgagattttcttctaatctgaatggttcccgtatatttttcacaatctctttccatttgaaacgtaaggaccagggtcgaagaaactttcgtaatattctgattttggttcaataaaagaaaaattctgtttcttttcatgtgaatcccatttttatggtatttgttcctacatatattttatttcattactgtttttaagtgtgggatcattctatatcttggtgttgatgaagtatttgctgacattgagaaacttctgtgtaatttctttcactgctcatagtaataatattagttacctggaacaatgttgtgttgttgattggagagataatttgtacttgttttaaattttatctggtattttaataggagaagcaaaataggcaatgcttcattgaatagtaaccaattaataatctttttagagaagttttgaaccaaaatgaacaatattttgttgaatagctaccaactaacaacctgtttcgagatgttgtgaacaataatggttttttcatttgcatttcttcagcgtcattgtttgtatttgacatgttcctgttaaagttaacagaatttttaaaatatattctggtaagccactagaaattttgttcgataggatttattatgtaggtattatatgtatatataaacccataatctttattgactaaaccgaaatgtgatatctggatttcgcaatgaaattgactctccttgtctacaataaaagacattttcattccttttttaatgaaaggagaaatttagaaatatttcattttggtgaattgagttacataaatgtatatcaaccaaccttgtttgttttatttacgtatttattttgaaagaatagttagaataatgaagtgattatcctcagctttgtctctagaattctagtagatctgagatgataatgtatgcatttttagcttatcctctactttatttagtataatttgatcaaacccatttttcggaggttttctttcagatacaatggatggagagataatcaatatcaagaaatgggtagttatatatccagtctatataaattcaaagaaaactatacctgaagggaggcggatttgtgtgagcaaagcatgtgagaatcctacttgtgctgaaattggagattgttgcagccatttaaaactcccttttgcaattgaggtatctgacataattgttaactcaagtttatcttataaaaaataatattttgagctattgcttagtgtcttgtcaaagagtatgaagttttaatgcttttcattggtctaagatagtttttattacatttgaatttgattgacatttatttttcatttcatatgtgttttgaatgttatagatagataaagcctatccacgggatttcatgcaaagaggaagggtaagggtgctgctgaaaaaagaggatgggactctctataatccagctatttcttcaagtaagatcatttacttttaagaataacttttaggtacttgaaattgaggtgctttataatgtgtgtttgtgtgtgtgtgtgtgtgtgtgaatgtataaatgctataggatgatcttggtcaaatgtatttgtgaatggataagaatgagatccttactatgaggaggccattatcttatctgtcttcataacttgtttgtcttaaaagaatgaaatatttattcactcagatgtctagaacatgtttgcagtgccattgtaattactgttatgtgaatctctaatggcagcaaacagaatctcacttcactaacatggtagatgctaccaaaaccaatgattcttcataatataaatgcatctctgccttatggcgctggactgctacctttttagtgaaatagtaattgagagtagctggcctgttgctctgctgtgcggtttgattcccccatttacttcataatttgctggagtttcatgccaggaaaaataattaataatgttgcgcgtgttacatttatgaaggcaaattaaactatgtaggtattgataatcatttattttgaagtctgaaatcacaactcatccagcaatctaaggtacataaacatatggaattactagctttagagaaaaaccaattaagaagttatttcagtatgccataggaaaacaaagtaaaaaatctgtattattcttcttggaagtggtgtgttaagaatttattttgaattgcagtttgatctgtatttgagtgtaaatttaaaacataaaacttgcatttttgtgtttgatatttgactctttataagcatattttgcagggaaacagctgatgctgcgaatcgcagagttagtgccaagacatcctgggaggacaaagaagccagagcctgcatccacatcaaatgctacaacttcaaaatctggaaagggtgggaaaaagaagagatagctgtagttttatagatagcatatggtcttccatgtttacttgtgatcagacacaacagcatcggtaggcaactggcgttaggtcctgaggctccatgaggtttgggattcagttcctcatgggaacctaccttgcatgtgtttcttgcttcaaagatttcactgtttttaaaatgagaaagaacaatggataggcatcattaaaaagttcatgctctttaatagatacacgtgtgggtttagaacattttacttgtttgacgtaattgtggtttcaagatacataccaaagtactgtcataagttttctctgggatgatttcgataatcggcctagtataatttacaagttttaacaaaatagaatttgaatatgaaagtgtcatcgcggccatgggactcgggtattctttctatttctaaaagctatgtatactagtagaggtcgtgcggttatcgaccccttgatgtagttttgttgtacttacatttttagtagacataagatcattaatatattgttacaaacagaagctttttatatacaaccaaacactaggttataggtaaaagcttatttactacctttagctaaaagctaacttactgccaaaatgaaataaaagtaggcttatatacaatcaaaagaaagcccagaacacttagcttatgtgcaataacagcttagttagatgcaaaacttgaaagacttcaagtaagacttattatgtagttgatccttatacagttggtttgctagttttttccaagggctgaggaaaaagcatctggtgcatttgtgagtgttgttttatttggcagtttgagaagtgtgttgatagtgtatttgacttagatcaatgtcgtgaccatatgttgctgatttaacataagctgcaaactcttgattgtttgcaaaagaaagacagcttggaataccatcatttggttcccgaattttaaaagttaattgaaattagaagataataataggtacttatattttaataacaaaattttatttgatgtacctttgtttctaagctgtgggtcataagaatcaatgcagaggaagagaaactgtacaacattgttaccataattgtaaatacgtgtgtcgtgttgactcaattcatattttgaaaaacttataataatatgggccatgttgtgccgacccataaaaaaatatagattgtgtcgtgttaatattttaaaaggtaagtctgacacgaccagtaagcctatatcttcgtgttgtgctttatttgaactggcttgtttttcataagtaggtcagcccattttcttatatgtgctcaaatttaggtttcacttgttatttctttttacaattaatgagttaattaccaaattatatgtattttttataattttaattatttttatataacttttcaacaattctttacacataatcatatacaacattaattagaatgattaaaatttaaatatttattattattattannnnnnnnnnnnttattattattattattaacatgggtttttaaattagtttatttatgcttacgcttcgtgtcgttctgtgattaggtctattttctgtgttgtggtctgtttaagcctatttttgaactaacattatgtcgtgttgtgctcaaatttatattttttttttttttttttgtatcaagttatgttcgtatatcctgaactcgtaccaattttatgtcgtgtcataaagatcgacatgattcacaacattggtaggcaactagggttaggtccacatcagcataagtctaagtgcatctgagagcgagtatgagggcttccggaatcacagaccaaggcactcgctgaggtgacttcccagataggaaagaactagctggagtcaactagccgggactttcttctaggaggaataactagctatccggaactctcttccagagggggactagctttcctaaagcctacaccctgagtggacatgacaatcaaccaggaactcccttccagttggcaactatcattccatgagactcattttttgctggactagttagctatccgagaacatacttcgaggagataactaagcatccattactatgacagtcaaatggagatcgttttatttagaggaactatactacaaattccaccttgttactttaatattaaaagaataataatgatgaagaaaaaatgcatccatcatgattggtgtgctaggaatcttagtatactaatttctgagattgatcaagtatcaagttgaacttgtttaccgtcaagaccttagtcccaacatcagcatgatgatatttttctatcaactcttgttttaccttatagaaatctataagaccacaataatcaacacagcttctgaacctctccatagcctcctaaccacaatctttgccccatctcttttcattattgtccataattttgttgaaatcactgatgcaaaaacacactcccacaatagaatcatttatcattcttaaaagcttccgagaatcctcccttaaagactagtttgaattactatagaagcacattaaaaaaaaatataaagtataaaacgtttgaattaccatgaatttctggctaaatgtgactcttcctcagccccccctttgcttcactatgatcaatctttaggagccaaaattcgaattacctcaaattctttttacattgcttgctcaaggactcggctgaggccacatatagctaaccccacttctttggcccctcctcctccttatcggtttcaccaacctccaatcatctcggaaggcctattcaatgagcccacaaactactcttctggggctctatatggctcaatcctcatcccatatgatcactccccccacccataaccttaaccaacctcctccaattactactacatggctctatccccaacctactgtgaccgttacacaaactgctaccacccaaagtgtttcccctgccatctctcaaaatagcaccatcccctctaatccattatcctttccacccattaccactgctgaacaacttgctacacctcttcccacggttgtttccacttcggccgagactttggtggccaccactggagcatcccaacatgtggtgcccgtctcccaagatttctctaccattttggctgatct

SEQ ID NO: 17766 - DNA, 6522 bp, Cannabis sativa
taaaggtgtacctgaatgtcatattgttctgcaacagtcaaacaattgtctattgctgcaggagtagttccccagtcctcgtgtagcttcagtcccattgctccggctttaattatttcatgtagctcatcaggttttgaactgttaccctgaagtgaaaaagtgttagcaaaaccatagggggatagatttcagggctggaggtttaagccatctactcttctcagttaatgatactgataggctcattcttgaatgtttacaaagagacaaaggttaaaagaagtttaaaacgagtagttaacagaccttccccgtaaaaccgaaatttaaaggcagctcatcagttgattgcagcattagtttcatttggaaaggtgccggggtgcaagttgttgcacgggttccttctgaaggtcctgttccacccccaacaacagttgtgatgcctacataagaaatcaaattcaagcacaagttactccttactcaaattgataagagctgttgggattgaggtatataacttacatacaaggtagagtcataaacataataaatggataagaatatactaaatatcttctaaaatagtttttcctgacagcattttccagcaaatgtatttacacaaatgaaatctgtacatcgaattggattataagtgcatatatttgttctgatgcagtaagctatgtttcacagaagtatttatgattctgtagcttaccacttgatattgcttcatatgccaattgagggcatataaaatgtacatgacagtctatggcccctgcagttaaaatctttccttcacccgcaataacctcggtgttgacctagttatatagaaaaaataccataagtatgtacgacattaacatggtgagaacttatacagtaaagactgctgagatagaatttaccccaataatcatgttgggagatacaccattcataacatccggattgccagctttcccaatggaaacaataagaccacctttgataccaatatctgctttatatattccactataatcaattaccaaggcgttagtaataacagtatctaaagattcagcggttatatgcccacatgactgccccatcccgtctcttataacttttccaccgccaaacacgcactcctcgccataaacagaaaaatctttttctatttcagcatacaaatcagtatcacctaactgaattttgtctccagtagtaggcccatacatgttagcatatgcctcacgagaaactaccatgttgaaaggcaagccttctccagtaataccttcactacaaaatcagttgtcgaggaaagaagacactatcaagtatacttattcacaaacttagataaccaaatcgcaccttgctagaacggaattatgtcaaaacaggcactacaaattgtcaagtagactgacctagcatttgcttcttccttatttccaaatcctctttcatttaaagttctgaagacttcttcccacctggcatcatcaactggaccatctacaatgccgttacctcctctgattactctattacctcctatgcttacaagtacaacacttttgcattcccctggctggccaaacaaaataatcattaatctagagaatgtatatgtacatgagaggaattgaatagcaaaataaattggtataaattaaaattaaactacacaacctcaaatcttgtggctgttccagctagtatattgaggcgcatgccatatgatctcattcgatcaaaaactaagaagggattaacctcaatgaagtgatagtggctgccaacctggaattatgctaagactttcagaagacacaacaattatttttctaaagttcttcagaaaataaggtatttacacaggacaatatcaaaatcatagtgaaatctgtgcaaatgagataattggggtgttctttgaaaaaatatatgtattaggaggttagagagtgaaacgaagactaaagtaacgactaaaaaagtagcatagactcttacagaaatgcatagaaaagttaaagagacagggaatgctaatattgatgacctgaaccggcctgtctccagtattggtaactttgatgactactgctttccttcttggattaagcataatgtccccatatccatgtattatatgaccaggattctcatcatcttctatgctagcaaatttgtctgaagaaggcactggagaacgattttgtatttttaaaatccattaatcaaaaataagcttatgaatacttgttcgccagttcgtatatgaaaaaccaagaaaacatctggaacaatatttttgaagaataaagttaactgcaagtatctgaagaatgttgaattaaaacaataaggttcaagccatccaaatttcgatctctaattcacatactgtaaaatttcataatctcataagttgcttgcactgacaaaagggagcattacacatagattagaagtatattggtcccaaaggaaagctgttccaatatttacattctaaatctgtaaaatctttacctggaagaaaagaaccatgtaaagctagctccagatttccattttcactggcgattggatcgtgaacggttattaatttggtaccatcaggaaaggtcccctcaacctacaaaattatattctcatcttctctctttctctcaccacagttcaaatatacacataacaacagtaaatttaaatgatatctatagattgcaattgacattgctaagctcaaacaaaaagtttcaaatattcgtacctgtactgtatccaagagatgtggaacagcagagagaacatgtctcctgttcaaaaaaaaaaaaaatccatgaattcacaatgcctttaaacttaatgtaatataaatttctttttttatgaacaatgtaatataaatttcttgaataaacataataaatacaaaattgaattaaatttgcttctattattattaccttcctaggaattgtttccctaagtccatcaattctgccacagttctgtcaccatctcggacaaactctaaaatctacccaaaataaaattagaaaaagaaaaaaaaaaaaaataataaatcaggaaactcattcttcttattgattcagtctaaacccatgtcataaaattccattctttatcccaaatcaatcaaagttataaacttttctttttctagtcaataaagtcaatagattttcattcaaaaaaaaagtcaatagattagaaatataagaaaaagaaaaacctgtgtggctatgagagccactgtttcagtatagttgagcttcaaaccacgagcaagacgcttctgagcgaggaacccagcattgtgaagacctaatttttcaacctctcttggcgttaacttcatttttttcttcttactattctgtttacccaattaacgcttctatagaaagaatatgacaatcagtgcatataattaccataacactttgcactcttcagagaaagctttcgaatcaaatagtatgaagaaagtcagcttctttgagattgagactgctcttactgcttgtaccttgcactgtcttcttctgtttgcttatctcttaaatatgcatactttgttgtactctgtatttttttttttattatttcagtattctaatcataaaaccatgatatcataagacaagacagattactcttctttcttagtttttttttttttttttcagtttgatttatgagttaggtactttggttggatcaataacctgatgcaatcattgtttatgaaaaagggaagaaagaaaatatgactgtttaatattgccttgtattttcgtaaagtcatttcagttttttagtcccacatcgattgtgaagtacagtgagcttagttctaatactataaaaagcaagcctctttaccaattatacttacgcagccacgcggtgagcacaaagcgaactattctttcgccttttactaaagaataccgtgtgctcgccgcttacagtggcatacgccaatttttggaggactttcttcggagagtccacacaagtctagttaaatattttagtttatttcatttgattttaactttacttaatatgaatttgtgatgacaattttagagtcaaaagattaatttctgagaaattcatgctattttccaaatgaaagtactcttcttttatgtcaattttgatgctgaaacattattattgaagagcaaaaaatgattgaattgacttctgaacctaaaaattccgacctctgtcaacttttttattcgataaaaatagtaaaatggcctctatgaagttgaaaaaccaacttaagctctcaatgtttggcaagtgaagaaaaatgaagttgtggtaaaaagagaattaaaacaatcccatttcaattgagtcttcgacttgtaatcctttaagagagagccttcagtacttcagtggtgacctcttttggaggtttttctgcatgcagttgggcaaggacacctttcttggcataataattgataacctgtgcaatagaaaaggaacaaaggtgagagccagggtttataaaaattccaatcatctacttcactcttatttcaaatcaaatttaatgaagaaaaaataaatgatcttttaagatgatgcaaaatttgcatgaaagttcaacaccttttgaatattgatactgctatactcactttaaaatacatgtaatgcaggatttttagattgaaaaaaaggcttaccggttctgtttgcttgtgaaatgcatctagccttgacttaagaacttctgcagtgtcatcttttctttgaatcagaggttctccagtgacctttaattcacagcatgccccaaaatgcattttcagtagttattaatggaacgggtaaaaagaaaacaaataagatttattcattattattgaaccatatgtgatcttgaaggggctaagtttcatataaaagcttcaaattttccttggtaagattttgagaaacagcaaaaactaaagaaattagtaatggttttgcttgactaatcaaagataatagaaaatttagcttacatcatcaacaccagaaacttttggaggtgcgaatttggtgtggtaagagcgaccactcgaagggtgtatccatcgaccggtgatcctctcctccaatatggagtcatcaattgcaaagtcgagaaccttgtcgattttggctccctgcttttcaagcatctcatctagctgttaaacataacatatgacagacatgttaaacttcaagtagagcaatagagaacaatgctatgctgtggcaattggcaacatgaacaaaaggaagagcagagaaactaggacttggctatagacatcgcagtctctactcgctatggagaaaccatgaagatttttgtagtgtctttgaaaacattcattgaccagtcagttgaaattatacttttagactcaataatgattcatgaaccgcatcattgagtttctttatctgggccaatagaggctgttaacaagttagttctcatttctggttattatacttttgtttattaaatcacaagagtttcagaaaattaggtaagagcgaaagctgaaaaatgaagcaatgaaaacttaggcacattagcatgaattaagagaaaagagagtgaaaccttttgagcttgaacaacagtcctgggaaagccatctagaataaaacccttttggcatgatggttttttcatggcttcatcaattataccaacaaccaagtcatcagatacaagttctccctgccaaaccacaattccatcacatatacacatatatctatagtcaccaaaacatggttatttgataagaattatgaagtaaaattaggaaaaaaaacaggtaccttattcatggcttctttagccttaattccaagaggagttttagcagcaacagcagctctcaacatatcaccagtggctaaatggcataagcaaaattcatcctttataataggtgactgtgtaccttttccagatccaggaggccctgccattgatataaaatcgcataagatgcaaataaaagtaacccattttctttttcttaattcaaattcagtttcagctcccccaaaaaaaatgcgtgagtgtcagttccctgcccaaattggattttccattttgaggctgaaattgaaagcaatataacaaactaaccagtaaccaagaatgaataaacacacaaactaatctgataattttccattacaaaatagtgaagaattggtaaataccaacaagaatgaggcgtttgtcgggcttggaggaacacttgagacggcggaggagttcggtcatcatgtcaagggaaggtatgtcatccaatgcaattccagagcttcccattttctctttctctcacaaaaaaagggtcttttaagttataattgttgtgttgtgtgtataatcagaggagattcaaaggcaagaaatgaaaggaaagcaagggtggtggt

SEQ ID NO: 17767 - DNA, 5856 bp, Cannabis sativa
ccttctcctgcgcgcgctaaggctgctagcagcctctcctaggctgcaggtgaagcctcctgggcagccaaccccaaattgcgatttttgtggttttttccccaaaaaccagatcgacaaggacttttctgtgtcttctgtacgaagattatccctcagctagttcttcctctaagagcttgtcgggcagctctttgagtgactttgaagtgagaagtagttctccagaacgtgaagtttaacatcaccattactattctggatgaatatgtggtgagatctacgaaagattagtctgggaactgaactaagggtggagacagttccttcccaagtcttggacttatattgtctgtcagggtgtgcttgacacactgcctattggacagacctcttttgtatctagagatcctcctacaacaatggctactgtgactgttgcccagcactctgagcaatatcaaaacctggcaagaactaaataaatgtgccacaaggcacctctaatggatcctcatattgtcgacctcatggcaagaggaatggttcaccaagttgaggatgctaaacagcttgaggctagccaagtagaggagcctctggctggccaagaggaggagccagaagttgatcaggctaagcctaaagcgaagtctagggctacttcgaggcgccttaaggaatgtcatgtgatctagggtaacccttcgggctcttacggtgatgctagaatgcctctaaatagcagggtagtcaaccctcaaagattggagttgaccatattgaggacgaggctgccgagccatggattttacaaatttgagaagaagatagatgggtaacttttcattctacactattgattgccaagcttgacgacatcatcgatagtgggattatcggtcatgcctgatgcattaggcctactcgagatcacttggctcaccatccctagctaaactggatagcgtggtctggccccatgttgagcaaaggtgcaatactccccttacacccatactttaaggacatagtaaacttcttcaagttgtgtccaactcaaactgcaacaaaaaatataaaatacttgttcgtactttttgtcatgtatgatgagttaggttggccgcaaccttcgcctttttaggtgaattactattttgagctaaaattcagtccaggccagaataagattggatacttctactttaaccagtagggctatcaaaggttaggcgacactaatgatacaaccatgttaaaggttgaaggctacgccaagagttactctatggcatataacataaaaggagtccgctaattcttccatcgtgttccaacttacagtcagccatccccacattgagactaagggacagggccaaccatattttttcccttctagctgctcgacgcaatatttgtaccttggcttgttaggagaactttaagaaatatggcttttactcttcggatgagggtgttactgctcaagacaaccctcccgaggaccctgacaatgcccttgttgtaaaggagaagagcaaggaaaagaggcttgttgttgagaagaaattttctagcctagaaatccaaaactaatctcatctcatacagaaatggggttcttctcctttacctttgcaggcgttgaattaattctcatcggtgcatgggaagttttcatttttctttcctcaaacccaaatcaaatctcacttccatcttcacctcttacctcgattcaaacaccctcaccatcttccaaatcaaactctcagataaaaaccccgtctttttcttcctcctacttatcattcatcttcatctccatactctctttcctctttattataaactcattggtttccttatatgacatgattgagttacgcaatcgagttggaacggctctccaatgaaaagttctagcaattatttctcttttcttgctttacggcgtcatggatcttttggaaaatttctcttctttgctcgtcaatttaatcggtctttttgctttcgttgaaaaatttctattgtttaccttaaaagaaaagacccaagtataattgaaaatcgttactttgatcttttattagttctcataattgtatgacaattctccacaattcttaatttcaaatcacccaaattgattttgcccaaatttgctcgtgggattgggtttattttacaaggaatgtggtttgtacaaatggactttttgttttacactaatttaatcactcatggttgttcattgcatgaaaaaaaagtaaaaggaagctacatgatcaagtgtaaggacaaagggacgcaccctcatgtatgaataaagaatttttcaatatttatatataaattatttaatattcatacatatataaaaaatattcaactcttatttataatcaaaaatatttttataggcttttcgagatataaaccctaacacatgccacaatatttattttgctttatagaaatcttgcttgctcgttggtacaaaggggacaagatgtgatatttttctaatttagtgcaaaaagacacatgtgggcctcatgaaccacgtattgcttatttaggatgtatgctcctctaaaaaatacgagttgtccgaaagttagctttcttttggaatatagaatgcatggtccaggatcgagactttcatttaggtcgtagagatcagatcattttaatatctaagaaggaagcatggtttccttatgccttgctacctctaggatccagaagagaagtatgtggcgtatatgcctttgtcttttgcattcggaagagaaattgatcaaggacgtcccgtctttggtaccactttgatgggattgttcaagtggtacgtgactcttcacctcttaggcccatgaaatcagttttccttttgggccctttaataatttttctctcaaaggttaattggtgagagcatttcatggagatgcaaattgataatttgttgctaaaatatagcatatattgtaaaaagttttctccaattgtatgctaaaagtttatccagatttatcacatagtaaattgatttaaatgcatgttgatcacaatatgacatgatgtaaaatttacttcacaatagatacactacttttatatttacctttatgctattttttatattttactattaaatttagttattacattaaattataaataatttacatttattttgtactattttatacaataaaattaatgataaagtcctttaaggagagctcgaaatttcaaattttgggaatgttcgatgctcgaatcaaaggtattaataagagaactaaagaaaaatgttacacaaagaattagcatgtgttggcctaagaaagttaaggcacctaaaagtaggtggttttaaagtttgtaattagtcatttgaattgtatgtaaggggttttggtgggtaatgtgtatacttgtatagtttctctttcatagtgcaatataggcccaaattgggtgctattagtttgtaaaaactagttttgagcaatacaaaattttcttgattcatcaaaaaaaaaataatgataaagttgttatttttttatacttttaataaaaacattaaattttgtataatttttttttttttagatgaatcagacaattgtactacttcaatcttcatttatgtcctacacatcttactaaggcctgaaagtctaatgtatacaaacaaacaagttttgccaaaaaaaaaaaacaaaaaacatttattatataagcaatttgtatcaaatttgtaattatacatgtagatttttctatgctcaagataatactaagttaatcaagaatcaactaaaaccaatcacaaacacttcgcaaacaaaacagaaataagatcaaacaactctttgtacaaagttctttctactctaatgaagatcacaatgatggattgtttgactggagtaggagcaagtttactctaaaataactaggataaatttttcgtactttcattattattttgaacacagtcaataactcgattggaatctttcacaagagtatttctaagctttgatactcacaacctggaatcaacacgtactcttagttgactcgaatacaaaactcaatttccatagctatctttctcgatctctttctcactctctctttcaatagttttctctccctctcccactttctatgaatgaagagatgaaacctttagtatttataggctttgataaacttgaatagattgtcttggtgtgagctgaccttgtgacggaaataattaacttaactaaagagttgttaagttaattatggctagttagtgtcagaaggaattaaaagtgtattgatattcctcaaaatacaagagtacatagtaccacatatttataataagtggagaccaaagaagagacacatgtcatcatacaataaaagcaacaaaatacaatgaaataacattatggtttaacatcccccctcaaactcacggggttgggaagcactgtgagtttggtgcggagttcctgaaagcgagaagcagtgagtggtttggtgagacaatcagccacttggtcttcagatggagtgtagcgaaggtgaagaagcccgttctttacgcgttcacgaacaaagtgatagtcaatttcaacatgcttggtacgagcatgtaaaacaggattggaagcaagatgaagagtgctgatgttgtcacaatgcatagtaggcggtgcagcaagagggaaaccgagttcattaagaagagactgaagccaagaaacctcagaggcaccattggcaagcgcgcgatattcagattctgtgcttgagcgggagacaactttttgtttagccgaagaccatgagatgaggttcaatccaaagtagatacaataagcactagtgctgcgacggtcatcaggacatgaggcccaatctgcatcagtgaagcagtgaagttctctagtagagtcaggttgaaggagaatgccaaggtgagtcgtgccattgagataacggagaactcgcttggcagcttgataatggatggtagtgggagcatggaaaaattggcatagtttgttgacgacgaaagaaacatcgggtcgcgtgagagtacaatattgcaaagctccaacaagactacgataaggagtaccatcggtaaggggctcaccatcatagagagacaaagagttaagagccatgggagtagtgaccggttttgtatcaagtaagcctgttttggtgagtagatccctgatatactttgtttgggacaagtgaaaaccgtcgggagagcgatgaacttgaaccccgagaaagaaatggagaggcccgagatctttgactgcaaaccgtgtagatagatatgtaagaagggcatcaatagcagatgaagatgagccagccacaatgatatcatccacataaattaagagcactatgaggacagaaccggatctgtaaatgaagagagatgtgccggcttgtgaagcaacaaatccccattggagaatggcagtgctaagcttgaaaaaccaggcccgaggtgattgtttgagaccatagagagacttagttagcttgcaaacatggtgtggatgagcaggatcaacaaagccctcaggttgagtcatgtatacagtttcggtaagatcaccatgaaggaacgcattttgaacatctagctgctgcacaacccaatttagagacacggccaaagagagaaccaaccgaattgaattcggcttaaccacaggactgaaagtttcattatagtcaagtccttgagtttgatgaaagcccttggcaaccaagcgagctttgtagcgttccacg

SEQ ID NO: 17768 - DNA, 4662 bp, Cannabis sativa
  modified_base (128)..(131): a, c, t, g, unknown or other
  modified_base (4617)..(4627): a, c, t, g, unknown or other
tataattgtctgatgttagacctaatttataagatatttaaatatataatcacaataacatgatctcgttgtaatatttccctccatcattatcttgatgatgatccaccttattattattattattnnnnttattattattattaatattatcacttgatcgtacccaaaaagccttctttagcccactcattaatctctcactcaacttcttgttcttgctcctcggacttcgactaactactttctctccaccactgcgaaaactagccgacgaagcagctcccctattacacgccttattattattattattctcggcgccaaaatggaagctagccgacttacccgactcgcgatcggttattctattcgtgccctctctggacacgtcatccagaaaattatcccttaacagcttcctcatgccgttgagctcttcctctaagctttggatacgcgatgtggtcgcttctaaagaggccttgagctgcgagttttggcgttgagccgcgtcacgctggagtagggcgccgagcgttgtaacggactgcggaggagtgtcactgtaccggcggcggtggtggcggccgttggtggtggttgtggtggtggatatcatgcagtggcgcgtgttgagctgctcgactaacatggctcggaccaagaatctgaggggcattatggggttttggacagcctccacaagaagtttaggggagagtttgttgcagtctatgctactgcatatttgggatttttggtcctctgtcatcttcccattatgtccctgtcattaatcaattaataatcccataattagtaaaaacaatagtgaaattagtttacatacccactttattttacatattattttttataaataatattctaattatactagattaatataaattaggtaggtaattgatatattacacaacttactcacaaaaataaatatattttaataaaataaaataaaaataatgttaattaatatatacaaaaatatttcttaacttatcccttaattatactattgtctattctaattaattgcaattttgatgttaggactcggagtacaatacattacatggagtggttgctttttgtttgtttgttattttttctttttggtactattcgaaatctatagttgaattgtacatttggataattggtagcccaaagcctcaaaaaagtcaagaaacactataattaaagggtcacatatcggcccaatcttgaaagcaacactacaataggaccatcctaaagtaatttcacaaatgctatttgattaccatttttttaaaaaaagactttatacaatttgattttatttaatttataagtattatattcgtacattcagacattaaatggtggtataaatcagagagtagacaataaacaaaaagcttgatataattctaataaacacgagtatttctttttcttatgaataattaatgtgagtactttttttgctgggtaattaataagagtacttaaccgacagaattgttacttatatatgtacctaaaaaatctaatgggacatgcaaataaaggtgcaaatatatattttaaaaaagggaaaataatctccatataaaaaaagaaatgatagaggatttttgaaaaataactaatatttatacagtctcaaaaagtgttattttgaaaactatctaaaatacacataccaaatattactatctcagtttcttttttgggataaatgaaaaaaaaatacacaccaaaaattataaaaattaaaaacgactaaatttgttttttaaataacattttagactctatttttgcaaaagttactaattgtgtttttcaaaatagtacaaatagaagctaaatgaatttttaatcaaaataaaacgtaataataattcaatttagagatgttatggtaaaagtgttacattttttgtatttattcgtattataaattgttatatttttactattttgtaaaatataagtccattttattattttaatggaataaaaattagtaatttttattaaacacagagtccagaatgatatatatagagagtaagcaaaattataagtagaccccctatattaaaaaaaattaacttaaaataattttaaaaaatcattcattttttcaaattattttttattaatgctaataattttctattattattattatttgaaggagcctgtagtttttctaatttttctgacaaaaccataattgtatttactcataccaaaaaccttaaaattaaaaataaataaaacagtaatatatagtttctttataaaaatagaaggtgaatttgtcaaaaatcgaaataatataaattaaactatttaagacttaagagggatgacttacccgaatatattgatcaacaatcttataaacgacatcatgactgctgaaacgacgatgcatggcctctgcgactatatgaaagtcgtcagggtgaaccattagtataacgtcttcaaacaagtcaaaaccgccgtcatctccgtcatcatcgtccgttaagttcaacacttcaatgcacttactcacgagaaacgacgccgtttcggattcaggaagtagagacaaggacgaacggaaaactatagtcgcgtactccctattaacggcgacaactcgccgaaaatacgagtctgtaaactgcaccaagttatcgttaccgtcaccgtcatcctccgtcatctctaataactcggcagcagttttaagagccgcgagattaaacggcgttacgacgagatgggctccgtaacagtagtccgctacgagagtaaacgtttcggcggaaatgtttaacggcggagagagagtaaattccgtaacggaatccgttaattgtcgctttaaatacgtacttttcgatctcagtggatcctaagaaaaacaataaaagagcaataaatatttacatataagaagaaaaaacctttactgttatcaactactttcaataccaacctattttaattttaaaaacaatggaacagtggagcataacaaaagaaaaatgtcgtataccatgaaatttccaagtgatatgcaaagttattttaggggaaaacattgaatttaactttattaccaaaagaggaaaattaaagaaaaataaaataaataacgaaatttacatgtttttaaataatgacagaaagttagatgtggtaggttatgttccataattgctttcttcttaaagagaatttgaacttgaagtgtagatctctctctcaaataataataataaaaaaactccaaattttatgctaataataagaccattattattatattgactctttttatgtgcccaacatttattaattaacacatttgcatatatcttattcatatacttataatcatggcacaaaatttcttaaatctgagtttctggaatccataaaactggttgcaattgcaaatctattgcataatattatttttttttatgactgatacgaagaataaaagaaataaccaaaattatcagatgacaatatatagatcatataatatgatccagtagatcaatatatagatatatataatcaattaacgaaccttgtgaagaagaaaacattttccacgaacttttatcaccacttctgtttttcttttaactgcatgtgacctataaatggtaacattataaagaaatacagctgaattagaacaccaaaatttgagtataaatatatgtgtgtgtatagtgttcatatacatatatctatttatatataacccaactgaaaagggatcataattaccatttcctgactctagattgtagaggtgtaggaggagaagaatgagtaggagaaagagaagaagaagaagaagaggaaaactcatattcttcttcataaattgtagcaacagatcctaaatttttccagcctttcatatttttctctcttttctatgattttattttaattttatgtacttgtgctctctctctctttttataataataataatttaaaaatttgcttattgatctctcattagggtttttgtggattggagagaattttcatggttataggggttttgaatttagtagcaaagaggtatatttatggctggcatgtgatggctcataaatgctggccttaactccctatcaaaagggttttgcgtctctacatagaaactaaggtaaggatttattttagattaagaaatatacttatttatttctttttttgtatggctaagaaaataataatttaatcatacaaggatttgggaaatctttatatttcagaaatttttgcattttatttggggtatggaaaatattgatcctccgagtaatatatttgaatgaaaatatgaatataattaggaagatgattgttttgtatttaccaaaattataaaatattctaatagatgttttcttgatttatttcttgatatatatggaagtaataaacggttatcacgttgtaacatttcttttcatggaatgaatttaataacattaataccaggaataacatatttacctaataaactataaagcattaatcctttccataaaaaaaaaaaaaaannnnnnnnnnnaaaaaaaaaaaacccaaaaaaaaataaaaaaaaaa

SEQ ID NO: 17769 - DNA, 3229 bp, Cannabis sativa
tctctcttgtacttatttatttgttatgaataattatctagccatatggtgagagaataatgcaaatgttgtatactaaataaggctatactaaattgttttagttaaactaagatttcattagttggactttggcatgtaaatttgttatgtttttaatataattgtcttgagttgggagcaaacttgaggaagattgtatatgaaatggtttattaaatatggcaatgcacatgatgagatggatttgtaaatacattttgtgtattatcttaattcttaagattcaagttgttgtgaaatctactttgctgttgattcttttagcaatattaattagattttggatgttaggtgggagggattcatgccaaattttgtatcccttcttaacttatactccaacttgcaatatgttgtcaatgtcataatggcatatttaaaaattttctctatgaatacatgtagagctggttctttggaagtgcctcaaagaagatcaccagcaacaacacctcgaactgctcgcaaactcacgacttctggattggatgctgattcagtttcctctcgaaatatggcaaataagactccaaaatctagtcctaaagtcattgatcgtaggtcacctcgaagtcctatatctgaggtaattaattaattattattcttcaatgggggtgtttggtaaaataacatttagactgccatgctacattgttttgccaaatgatcttcctgactcactcacactcttgacatcctattgaaaattcttaacattatttgaaggccacttttcaaaacttatcaaaccattgtttttgcaaagtgacggttaaatatcgtctattttcaccaattacacttatcgagtatctttcatactgcatctatcgttttcggttcttattagtcactaactcatctttgacttgagtttcagaagaagcgcccaaacagagtttccgaattggagtcacagctgactcaacttcaagaggatttgaagaaggcaaaggaccagctgaacacttctgagtcatggaagaggcaagcccagcaagaagctgaagaagccaagaatcagctgatgcagatgtctgcaaagcttgaggaatcccaacagcagctgcaggatatctctgcgtgcgaggatgatcggatccaagagcttcgtaaactttctcaggatcgagacagagcatggcagtctgaacttgaggccatccagaagcagcattcaatggattctgctgccttggcttctgccatgaatgaaattcaaaagctcaagtttcaactggaaaggagagccgaatcagaagccaaccaggctaggcatgcagaatctgcacacgatgaggttcataatttaagaatggagctatcagaaactctttcactggttcagaagatgaaaaccgagctcaatgattgcagggaatctgaagctcaagctttagaagtagttaatagaactcaaatgcaattggaaacggcaaatgaaaccatagaaatgcttcgaaaagatgcagccaaatcagtggagtcctacaattccttatccttggagttggagcagtccaatgctcgagtcaagtcgctggagggtcttgtgggaaagctccaggcagagcttattaatcgaaacagccaaaactcagtggctcctaaggaagagaaaaatcttgaaaatggagaaaacgaactaaatgagttgaaaatagagcttaattctgtgaaatctgaagtaggtcaactgagatctgcattagatgctgctgagatcaggtaccaagaagaatttattcgcagcacattgcagattagaagtgcttatgaacaagttgaacatacaaaatctgaatcaagtcagaaagaagctgagttagcatcagagttgaagaaatctaatgcttatattgaggaattgaaggcactactgatggataaggaaaccgagttgcaaagcatatcagaggaaaatgagagtttgaactcaaagattgagaaaactctatcaggtcaatgcgaatttgaacttacaatggaactgaagaaatcagaagctacattatcagagttgaaggcaagtttgttggacaaggagacagagttgcagagtataaccgaggaaaacgagtcgctcaagatggaaattaagaacaaggaaaccgagaggagtaaggttaatgatgaaactgctgcattagctgatgctgcaaaggctgcagagcgagaggcactcatgaagcttggctatgctactgaggaggctgacaaaaacagcaggagggcagctcgggtgactgagcaactggatgcagcacaagcatcaaacatcgaaatggaggctgagttaaggaggcttaaggttcagtcagatcagtggagaaaggctgccgaggcagctgctgcgatgatttcaaccgggaacaatgggaaacttgtcgacagaacaagttcacttgacaatacctataatcccatggattcgccttattcggaagacatggatgatgattcacccaagaagaaaaatggcaacatgttgaagaagattggggttttatggaagaagggtggtcagaaacagtagttttctatggtaagtaggcctctttccattcctcacatacatatacacatgatatatatatatatatatatagacacaaactttttacactccatgtttgtttaattcatgacagatgctactgaccttgagtttcacatgcaaataaaagaccaatccctttttgcagactgtatagaggtacttgaagatgatgtatgttgtgcacaaggatagtgtttttgtatcttttgttagaaactcttctctttatatgtctatgctacagtcagtctttcacttactacgttggagcaattatgtgataacagaaagaaagctttttttttttttttttgagttgtgatttgtaagattagactcttcctcattatgtgtatcactatcccaacttccttggtgtataagaatagctatgtgtccctttctcttatttgccttcgttttttttacagcaagtttagaagataactattgagattcaaaaccatctttcaataaaaaggcaaaagctttgtacgtgtgttgagcttttttttattttagtttattatggtggtgaagttttagtgtaaataaattaataataatgccataccaagggaagttctttcaaaaaaaaaaaaa

SEQ ID NO: 17770 - DNA, 4145 bp, Cannabis sativa
ttttttttttttttttaatgttgcgtaatgctattttataagctagtctttagtggctttaataatccttagttaagcgtactcatattacattaattaaaattccatctaatttgactaattgtgattggatttgacaacctatcaatttaattataagtaaggttaaatattgaatatttaattgtgattgcatcaaattagattgatagtgtctgaaaatttaatatatacaattaaactaattaagggaattatatttatactatttttttttaatttacagtttcagtggtttttgtgagtttctatgtggatttagttgttatttaaattgtttctttagttgttatgtggatttttataaatatatataaaaaaaattattttgaagtgtaaaaataattttttttttaatattttcatttagtttgaatgaatgattaaattttatgttcttatacgaaaaaaaaatatatgtatatatgaaattaatattaatttttttaattggatggatctaattaatagataccaaatttaaaatattagatggatttgatgtgatccaataaatattagttaaatacgaattaaaccaatagatatacatgaaatatatttattggatagaactaatctaatttaacatttattagatgttgaattaattggatgattgaaattaattgaattgaatcagatagtaaaatctaacatttaatatatgattggattggattggatctgaataaatctaaaaatattaaaaaatattaaatgacacctctaattaagtggttcaccagttgaagaatagtctatttccaacttatgttatgatactttttgtctatttttgatataaaagatcaaaaaggagaagatagggcaagtgaatcttcatggagcttaaagtaaataatctcactacgataaatttgcttattaggggcaatttgttgctcctaaacagtcaccctaaaagtattattattatttatttattttttttgaaaaggccctaagagcaactccaatgcaagcatttaaaaaaatagctaacaatttttacatcattttaaaatactatatatttttttttcatccacattatttttgaccactttactcttaaaattactccaatgttaaacaattttaaaaatcatgagaatggacccacactctattatttaatatattattaaattacttttaatattcttaatattatattaatacacctttttgatagaaaaattataaaaaaaataaaaattaattcacctaccattgcttgacagtagtaattgtagtagcccacacaattttctttagtagtgaagcaatcaagattgctttttttagactgacaaaagtttcatgagcaacgagcattggagctactctaaaagtattattagagcaacttttgttgctccgaaaagtaatttttagattctctcttaaatatcacctctaatcttttcaaaaaaaaatattacctctaatgatattactatttttttttttaaaaaaatattataatatcataaatatttaaatatattttataaataaattcaaaaaattaataatatcattttttagagtgtaaatttgtactagtacccataaaaaaagagaattttcataaatatttttttttatgtttatttataattttatagcctaaaatttttgtgggtacaaacaaataatacccgcctaaactttccaatatatatagttaggatattcatatttaccgcttcatttgaataatgtcttaaattaaacccaccgaccaaccaacgagtcttcctcagcactctaagcatgagtttcgactccgctcgctcggcgggctcttccggccaaaactctaagcgaagtctgaattcctcccgttccgatctctccaagaagcagaagaaagagaagaaccagaaaaccctaggcgctgcttggggctcaacttctctatcttcctctcgttcttcattccgtaaatcccctttctccgattttggcaggtcatttctctttattaatttcgttttatgatttcattcgtattccttaacctagaactggtgccaattcgagaaattgttaggccgtgaattgagaattcatgatcccgaaacgggaaatgattttaaaagttactctgtatagtgggcttggttcaatttcttatgggacctagatatatctgctctgcttcttatatagattgttggaaacaatttgacatttttgtgagtttaagggttttctgtgatatgaaacaaaatgaggaatgggtttgaaaattgtgtgttcctattaatttcgtagtaaaagctatttccctttattttttattttttcattttcctgggaattttaaattattttatgttcattttttaaaaatgtatatatttgttttatccactgtactggaatttgattggcgttggtgaatgcccactcataaaatttgatgcagctatatggcagaaaagaataagaaacttcataatcagttcaatggagtggcttcaaattctttaaatagtggctccagttctgagcattcaatatttacaggagtttctatatttgttgatgggtttacagttccgtccaatcaggtttgattgctttctgattactttttcattttttctctaaaatgctgagaagtgataatggtggtttatgaatttgaggcattagtatttgtattagtttgattttcgaaatagaagagaaataggtgtgtatggagaattaatgtttatgttgtagagtagtggagtaggatatatgatgtgaagtagtagtagctagagtaagtaagatgtgctagtgatgctgatgttgttgatgggtcaaagttgaaaaaggagtttttggtatatgtatatatagatgaacgggagttgtggctggtttagaatatttaaatttgctctagtggagcttcagcttccgctcttgattttctttgataaattttggtaagaaagatggatttgttaaatgtagaaagatggatttcttctctttgtaattgtaaagtaaacatttcaggaactgcggggatacatgttaaagtatggtggaagatttgagaactacttttcaaggcgtcgtgtcacccatattatatgtagcaatcttcccagcagtaaactaaaaaacctccggtatatatcaatacgttctttacgttcttcaaatctcgagatatatgaaccttagaccttctctttatctgatttttaagtttttgattccgccaggtctttcagtggagggctcccagtggtgaaacctaattgggttgtagattctgttgcagccaataaactcttgagttgtaggcccattattgtatttttgtttataacttctagtttagattcattttgacatgattcttttttattccattgagcttttatatcaacaaattagatttgctattaagatattatgtatttatcacatacagtggcttaatttgaagtatgtttttggtagtgatacttaagagtatgaacttctcatgtatgagtccaaattattgctgttgtgccttgagagcttcatgtgtgtgtgttatgtgcttttagctcactgggtagttcatttttatgattccagggatcccttatcaactggttcaactttctgacaaccagccaaggctgtcagatttctttgctactaaactcagttccgtttcagaggattctcgtcttgttaattatgacaacgactatacatataatagagaaagtctaacagaggaggaatctgaagttggtgaagaaactgaatacatgaaccaaaatagaggagagtctgatgatactgcacatcaaaagagtcaagcactaattgaggaaccaactattggaagtgaaaagtctttggaaacgaaaatactgcatacatataatcttgacgcagaagatgatagctgtgtgaaacattctgtttctaggagtccttctcagccctctgcctcattcaacaataatcaagattccaaagcctcaccaagttcaccagctgttaggtattatgggcgtcattcaactctcactgatccaaattttgtggaaaattatttcaaggtactg

SEQ ID NO: 17771 - DNA, 11381 bp, Cannabis sativa
acagttgaagagggcttaaatggattttttggcactacctatatcaataagatacatcttgttttgatagcccatcacgaaagatctccacaattaagaatgtttgacctgaggtaattttaggatgggtgacctcttgagaattcccaataagtgtgcgagtgaggacaaagcacgctggaaacactcgtgctggtttgtaaggctagttatcagtccaggaagcatctagagtgaggttttcatttataagagccataaatctgttgaagaaggcacaatagaggcttgaaaagggacgttacagtttacctaacctaggggcccaaaaaatcattttaaaaatacatgtacatttttttgcctcttaaactttttacactactaagttgtgtcacaaaaaaatatgcaacttgtaaataatagtcctcgaaatatacattaatgtggttcttccatcacattttattcaattttttttaaaatgaataatggatggtaattaataaattgatgcaaattatatatttttcactatttttacattaatgaataatctattaaaagacttttttgttttttctttttttatgacaattcatatttttatttatagttgtttattcattagtgtaaaaatagtaaaaaatatataatttatatttatttatcaactatcattccctacatcactcatttcacgaagacaatgatcttgttgtaatacaatgatcttgtagttagtcgtaagagaaagaccttgtagctggtcgtaatacaacaaccttgtagctggtcgtaatagaaggatcttatatctagttgtaatacaaggaccttgtagcttgtcgtaatacaaggaccttgtagcttgtcgtaatacgagaatcttgcatcttgtcgtattacacaatcaataatgcatcttctcgtaatacatgctcagctatgcatctcctcgtattacacagacaacaatgcatcgtcttatattacatagacaacaatgcatcttttcgtattacacactcagcaatgcatcttctcataacacatgctcagcaatgcatcttctcgtaacacttgcttaactatgcatatcatcgtattacacaatcagcaatgcatctcctcatactacatgctcaggaatgcatctcctcataatgcatgctcaacaatatatctcctcgtaatacatgttcaacaatgtatctcctcataatatatgctcatcttctcgtaatacatgctcagtcaggggcggaggtatatacaacatgaggatggccaccccacccccaaaatgaatatatatttatatatatacaataatttataattttcatttatatatgctttgtaaatttaattatccacgtcgacataagtaagagtgcatccgggagcgtatatgagggcttttgaaatcacagactaaagcacttgctgaaggaactttctggatagaaaaaaaccgattggagttgactatctgtgactccattccatgaggaacggctagccatccaaaactcttttctggagaaaggctagttttcttgaggactacacccgcagtgggcatgatggtcatccaggaactcccttccagatggcaaccatcatttcacaagacttcttccagattgacaggttagctgttcaagaacattttttgaaaaccttttcatttaaaagaactataccacatatagattttaaggtcttctcttcggtatcaaattgaacatacgtgtagttcttgcatttcattttcacttttgcctattttattctggctgatttacattattcatgttaatggtaagtcttgataagaacatttctatgccccaagtacaacctcctccacttaatatacaagtacatcaatagagcagtaactatcgagagagagactactaaggacccattttgaatttgatggttgaaaaaaaatttagtacagccccacgtggaggtgatggtaaaattaaattaattagaatcattttgaaacagacactgttgtcagcgaattctatttagagtagtagtaagaccatttagctaaaatccaccaatcaagtttccacgtatacacaaccaaaccccacatgagttttgtcttcattgtgtgtgtgtttgcatttttattttttttcaatgtaaagatttgattttaagattttgtttctttctctactgcttcaaaattataaagattttctcagctttgtctctctctgtttaccactttctcaaaccatgaatggatcagattcagatactgatattgacagcgtggacaccaagatagctatcaacagaatcacaaaatgtgacgatttcatggctactttaaaaggcacgagtgggaaagaaagataatcaaagtactgctgacctgagtgtctttctaaacgaataaaattacatgcttttgtcatctaatatataataaaggcttttccttgtcctttactattgcattcttttacaaaatttggagtttggacacagaataatccccctgtactgtacctttcaaaagctcaggaataaaataaagaaaaccttttcttttcttaaaattaatgttgtcatatagttagaagcttctgttctgtgtgacctttccatagatttcatgctcagcaataacacttgaaagaggagagaggatattatatggttattaaccaaattaaagacctaaccaaaagcttctgaaacccttttattttatttaagaaaaaaagtatctgggggaactagtctagctatttaagaaaagaaaaagggaaaaaatagcacaacaatattacaactaaaatgtaccttttaacatatttccaaccaaaagtgtaactgcttgcccttcaagacaccacctcctcagttctacaaggctccatgggaaaggaacctgaaaagggggtgaaaagtaaacccagaaaaaaagaggaacaaaatggccacagctactatgtatccattttaattaggtataaactaaatttatgtagcaacttgaggaaactagagtctaaagagacacccataccatactaccaactacccctttgctatttgaaaatcttacttggggtactacctattctccttggttccgtgaaaatatacaaaaacaaatatgtactttctcaaaaatgacaacaagtggccttgttcagaaatgaacagcagcctcagtcacactttcaatcctcttctttcttggttgccaccatgtacatcaacaaaaaggaaaagaggattcacttgggaaggggatcaattaattgataatcacagtgaaagacattgtaccccatccggcacattctcaggcattggaactgcaacgatgaatctctgagggcacgggtttaatgtagtcgtctcagaggaagctgtggtcccagagacaccaggtggtcgggtatggaacctggcaaagcgatggacgatagacaccttttccaactcttggcattccattcttaactctaaaatagaagtggccttgtctaagctgcattaccaaaaggaatttaagaaagaatttactccacacattgttgtccagctgccatgtaacagcttgttccagaaaaaaaaaaaatacgattgaatttcatgtatataaatacatatacatattcatattttcataccttagcaagtcgctttccagtttctttgatctgctggtcagaacttccacagcttttgaaaaatgttggacatcggtgcactcagaattgtttagctcctctatgatcctgaacaatacaatacaaaactaatactttaatttcagaaaatcctccaatcaagatttatccactacaaactaatgcccctcactcgtgaaaaatcatgaagagcagcacttacatgttaccattaattcgttcacccaaatcatttcttttgccacagaccaggctgcacgtatcccccagcaagaatctagcaacatagtatatcacactgtcatagtgcaatgcagcatttgcagtgaaaacaggagctggaggagggcaaaacagctgctgcataagctgtgttgtcaagatgagccttctcttttttcgaagcaatggcagtccaataactccagcatcttcttctatctgctaaagtgaatggtgtcagcgacctttagatctcaatctatagggcttaaaaaggaacatataatgactcaaataaaagaaaaaacacaccttttcaatcagtcgatttgaggctcgtgcccactcttgttccgcaatactaagtggagggaaacatacaaacaaattagcagaaaaagaacaaatgtagaaacatataatatgcagcacaacaacagggataagacaatatttacgagtacataaccacgacttaaacatgacttagtaaatgggcaacaaggtacctaatatcctgagacctcttggaaccttgtgtcacttctttgtgccatggtaaacgcccagaggccatagttttgcgtttgtttggtctttcggtagccacagtttggtcagtgacagctgaagatgccatatttgaagctgaaaaagctttacttgcaacatcagctgtcgttgtactaggccaaactccactctgagtagcatctaaaacatttggccttcccacagaagaatgaatatcaaaggtctgagaaggttttacaagtgagaactgcacgcctgcagtatctgcaagctttgcttcaaatattggtggcatctgcccatttcttgaagtctcatactgcttaaaccaagatggcgctgtgtttagattagctaaagagttttctgcattattagatatcacaatggggacattaggttgactatgaaaatcattctgacgagatgaaaccattccttgagaaggtatatcttggatagccattttggtgtctccacatgatgaattaatatgtaatgcagaatccattgaattatatgttgcatgatgatcatatgctgactgacgttctggtatagcagttagccgttgagcatttagaactgttctactttggccagtttctacattcttcattgcttgcacttggtgtagcaaggagtagttttgacggaaaccatgtgatggttttgatgcatcgccgagggactcgtgacttctttctgaggtagtcagtgaatggctatgagtctgatgtaatctgtccagatcttgctggtgtgagttaattttgtctgagacactcttagcacctgcctgtgaagctttaagcaccctaggtgatttaagcttctgggacccgtcttcaattgactgatcttcatcaaagacagagccttgagaatttatggaagatgtgcttaatcttgatgggtcatattcagctttctgagaatgttgattatttggctcctgttgagtcaataaagtggtttccgtactattgctggaaggaaccttgtaagatttcatagcagagagatgctgatgtgtatttgtcagcaaactctgtggcatccctgaaaacccaccctgttgaggaatgttggatacaacaggaaactgtggcgctgcgacagcctccaaaccttgaaattgttgaccggaagtcttagtgtgtgtatgttgagaagtatcttgagatgaggcaaggttaaaaggtggatgtgctgtatcatgcaatgttgcctgagatgggtaaaatgtaggtccattggacatgaattgcatttgaagctgatttcttgaaataggaggaatggaaggcattgctgcaacagaactttgatgtaaatacagagatgaggccatgtccatgcgctctgcaatgttaaatttatcatcccatctgtctcttggagaaaactcatttgaagcgggtggtgactgaaatgatgatggagaattcaactgggtctgatttttctctcctggatcataatgtccatgcctaacattgagattacttaaattttgtgaagatccctgacagaacagaccatttggattagctacccgttgaggaggagacaacctcaaagaaaaaccttgagaaccagaagactggttgtaagtttgagcaatatatccttgagcatttccagtcttagataactcatatgaaggactataaccagtggagccaaaacctgatacagcaacattttcctttgattggtcaaccttgggaagaagctggagcatatcttgactgtcgtagttaagccaagcaaataattaatgaacatatatgtgatcaaagttaggcaaatctattatgagataacagcagtaattttcggcaatatctccttacaaatagaaacacaaagtaaaactgaatgattatcacacaaataaggcagactgaacaaagtttatctaggaaaccaaaaacatgccctataattactctaaagatatcacacacgaaagtaaagcttctaatctaagaaaatatattaattaataccttgtttgagcatttataaatgggccaccgaaacccattgatctgtggaagttagcagatacatcaaaatcacctcttgagtttcctagaagattgggtaaatgcccctgtaatggaatataaatgcatttataaatattatacattcaaaacaaagagagagagagagagagagagagctacagcccaccttgttcaagctagaaacatcacccatgaacttgaactgccctgtatgcacttgtttctggattttcaatccttcagggctgtaactgtcataggagttgtcccttggatagcagttctgctgctgtctaaaagtttcagcagcactgtaagagttctgcataacattagagatattacccatctgataatgtttcactcctatgttttcattctcctcattgttcatagatattttaacttgtttcatgtaatcaatctgattaccatctgcaacttgttgactggtttcctgttgaggcttggctatgcgtgatgctgaaacagcagaagagttgaacagatgtgagctttctttgctcagcagagcattatcagattgtagttgtgtaaaccctccagttgatctaaaaactgaagttagctcactatcagtgccagccttccatggaaatccatcggaatcgcttttattgtacatggcttcattagtatgacctgtccaacaattatccacagtgtattactacaataaatatctgaattaaaagcaattccaatagatgatctggacataattacttaccttcaggtttggtagttggacttctatcagtcttgtatgatggtatactttgctgatgtgcattattttctgaaaccttattaatctggccagcccatgggtgcagaaatcgctgaacctgctcatttccttccttaggtaatgtgggttgaggattataatccaaccacaaccttgtgtctttgggagagttccgaatagattcatgtgagtcctcctgacaaagatcttccctctgattggtcatgaatttagtgcctgtgggatgaaatccagggaagctagtactaacactagagtcattgagcataatcggggatttagaactcagtgatgattcattctgcagattgttatcagtccaatctctctgttgcttatcattgtccaagatgttcgatgtccggttatcagtagagagttctgcattttcaatcgtcaatccactccactcttcctgcaacccagtatcgctacttgaagcttctacaacagcagattgcatgagagcactccaactgccactttgaattgaaggacatgcatttaaagtttctatttgttccaaagtgccaaagcctccagcatccatgtcactgtgcccactaaatgaatcgttccagacattatcatctgtgtcataaagtatcttctcttccattggatctagggaaaccaaatcatttgaagagtcatgctgcattgttttttgctgtaagggtgcaggccagccaactaggtcttgctttctggtaaggtcatgcagtgatgcatttgcttgtaaggatctttccagcagggaatttccaaaagtagcagtagtattactatgtaaatcctgtaaaaaaggggcttgcccaaacatatttttcccatgaagtccacttttggatataacctggtctggtgaaatagtacattgaccacttataaagggtttactgcctgctgttgattgaacaacaggtttttgtgtttggccactgaccttgtttaacaaattagaagaatcatgtgacatcccctggacattagaataatggtttgttgtacctctggcactagctacaggagtaccatataatgaaacatcaaactgctgagaaaccacaggcattgaccgcagattctgcccttgctcttgtgaaaaaacatctctgttagacataccttgtgctgcaggagatgcaccccgctgcacccagttcatatacatttgtgaagcatcattaaccagtgctccgttaatgagtgttgaatacggaactccagaagcctgctttgggagtgaagagtgctgatgtagagagttcagttgccttgcatcaccaaattgttgtagttgttgctgcctctgaagttcttgaagttttttcaacattatctgttgctgtaacaactgtacatcattatacccagactgctgcactggggtaggttgatgaatacctggttgctggccacttacttgttgctggcctccaatgaagttaaattccgtagaagcatctgtcatttctgacctttctgaattagttgtcagggtgggactgtccactggtgcatattcttgctgagacttaagaacagataaacctcttgacattaaattatgtgggatagcacctgtgatgtcccccaaaaagtccaactgattctgcttttcctggaaattctgttgttcaagcataaagccatgtgtatttagctcttgattgatggattcacttctataaaagtcaggtctttgagttgattgtccatagttttggtcaaaaggactcaaaggttcactaccatgacctctgaaagaatctgcaagcattaacaccaataaattataggtttagtggaagcaacaaggcatttgaaagcaccacaaacctcagaaaaagaccaattgagattctgttttccagccattacaaaaaatacggcaaaacacttaaccccaccaaccccattttcctttaacttatttataatttacaaaacagcttaaactctcatgcagtttatgaattttttactagaggaaataaaagaaaaccaaaagcaaaacgttggtttaccaaattgttccacagtagaattcttcagattgaagctttgtctctgtttttcaagccattgatcataaataagcactgaatggctgtcatctacagattgggaacgatgctgacccagggaaacgtttcctagctcgtaaaggatgcggatcttgtcttcaatttcgttaccaggcattaaatatgcaatgacaaatttacttgttaattatgttctatatgaaaatagtgatgtccccagaagaaatcatgatggactggaccacttcattgtcccaactcttcttaaacacaaacttgatgcgcttagaaggcaattcgtagttcaagtgtacctcaaactgaaactcactcacaatcggagcattttatttttgcaatcacctgcataaaagtgttataatacaaaaattagattcaaactaatgctgaccgatagcaaacaccaatacaacctatacctgaaataagattcaactaagacagaaacattgtataatcagtcgttgacacaaaaatgaacactccaacaaaataatgaactacaagtagttatatgtgaaaaatacaaggacatgttaatgtgtctaaattaaagtgggtcttaaaattggacaactgcagagaggattccacacaaagcgaaaaacatcccaattttcgaggccgtgaatggaaagtcggcactttggaacatagattgcactgtcaggatgtcaaaatgactctccattaacttcgtgttcgtgaccaaattgacatagcccagaaaatatgttcctcaattttccatttcaagatattatatatgcatgaataaggtatattgtaaaaaccaaaggaacaaaatttggaaagcttgagctaatgtgagctcaaggttcagacgaagagtaaaaagaaacagaaaaatttgcactcaaaactataattcagctatagaaaagcacaatttaagcaacaaatcaaaccctaaaacttccaccatacctttgacctcaattcaacaaactaacaaagcaaacactacaatttaacacttacgaagctaatttaaccataattaaagccaaaaatgctcaaccgtttccacttaaattactcattcttacaccacaaggaagctcgagcatgaaaaccagctagcttcaaacaaaaattacagagacccagaagacaaaacaagctgaaggtacagttgggaagctcagtaatatagtgatctgagagaagagtgttagggttattcaagagcgtgtgacttacggcgttgtttccactttccttcacgatcaaactgtctctctctctttcacacacagacacgtacaaatatatatatacaaattcttcaaatcttcaaaacgacgacgcagaatgcttctcacaatacaaagctctgaaactctcactctctctttctctctccgaagagtgatgaaaatcactttatgtaattgtgaacagccgagaaagtttgagagagaaatacaaaactgatttttcagacaagggagccgaagataatgggatcgaaaaccaaacagtgttgtttaaaattaaaacttaaaattaaattaattgcattttcaacgtgaaaaaaaaaattaaaattagaaaatagaaattaaaagtacgttggttaggactatccgaagccgaacctaagaccatctaaaagctatatttttagcacaaaaaataattttatgataaatttacattaaattttaatattattttttaatgtacaattgtaaaataataattttgaatcaaagattctcgattaaaaagtgttaaatcaattaaattttgataaatcaacttacttaatttatattaaataaactaattatttttattgattcaagtttaattttttaataataaaaaattaattcacatattaaatttagattaatttaataacgtatgatactattttttaatgaaaaaatcttatttattaattttattattattttaaagttaattagaattttttttccctgaacttttaatatcgttaaaaatacccctgaattattgagattgt

SEQ ID NO: 17772 - DNA, 4069 bp, Cannabis sativa
gaaagttggatttttattaaaaaaaaaaggttaaggaaaatgtaggaaaaaaaagtgaaaaaaaaaaaaaaattagtatttcatatttggcatggaaagaattgtatagaaaaaaaaagttgattcaacaaaaattttcatatctaatataaaaggttgagttttttattttattttccaattttttcccctactttttccttttatcttttccgatcaacttccaaacatagtctatgtgaatttgttatatagctagaacatgagattttcaacaaattgctctggcaattgctgtagtttcaaagaaggcaaagcctaggtgaaactttatttttcctatgccgtaaattatgttcttttgattatgctgtgaggtttatatttttcctgctcccttttctccacctaatgtcaattaatacaatcagaggttttttttttcctaagacttcatacaaatttgtgggattaactactctacgctttctgtagccaaggggaacaagatggcaggcagagaaaaaacgaagtacagcagagaaaaatgtgagtttgagtgttcttcagcaatatttttctggcagtttgaaggatgctgcaaaaagtattggaggtaggaattccttgccctatgctcttttctttactggttaaacaaaaataaataaataaactattatgctattgtggctatattacttttgtttagacagtcatgaaagtgtggttgatactcctatactagaatgaagtttattttgagattttagaatatttttaaagttagaaagagaggaagagacaagagagggtcagggattcaaaatctcaacacttatgtggtgtttggtgtaaaaacttcatttggtgggttttagttgaggttaatggaatctaaaattcagtatttaaagagagtactccaaaattatacttaaaagtgagacccacttaattataagccttccactaaaatgatatcaaacatatgtttggttttgcattcccaaaatcctaaaccctcccataacaaaatcttattaaggtttcgtaacttctatataatagaattattttaatctatttgaaatgaattttagaattgaattggatatgtcctgtgctatggcagtttgccctactacgctgaaaagaatttgcagacaacatgggatctcaagatggccatctcgtaagataaacaaggtaaaccgttcattaaagaagatacaaactgtacttgattctgttcaaggagttgagggaggtttgaagtttgatccaactaccggggggcttgtggcagcaggctcaataagccaagaatatgagtcacaaaagaaaattgcatctctgcagaacttagatccttcattcaccgtcaaattagaggaggatgagtgttatacagatggagtcaatttaaattcttataagataaggaaacccaatatcattgctccaactaattctaataaagactctaagattgcaatcgaagctggatcaaaaccaattagtggaactttttctgaaaaaatttcccttggttcttatcctgcaacagaaggcatgacatcgagtcacagcaagtgtagttcaaaatttgagaattctgatgctcgccatgtctctcggaattcaagctctctagctgtgggtgatgagatggatacatcagaggatggagaagacgacgagcttcttcaacataaccagcctgcttcttcaagtatgacagactcatcaaatggctgtggttcgctgttgcatggcagttcatcaagctctcaaagctttgaagagcgtaagcatcccaaaggaaaggcgagttgtgctgacagctattctaaaataattgtgaaagctacttacaaagaagatactgtccggttcaagtttgacacatctgcagggtgttatcaactgtacgaagaagttgcgaagcggttcaagttgcacacaggggccttccaactcaagtatttagacgacgaagaagaatgggtgatgttagtgagtgacatggatttacaagaatgtttggagatattagatgatgttggaacccgaagtgtgaagtttcaagttcgggatatgccttgtgttgtgggtagttctggtagcagcaattgtttcttgccaggaggcacataataaacagtaaaaagtctaaagaaaggggattttcttttttcaatttgttttttacttggggttctgctatgtaggttttactccattatgggtgaagtaattttcaacaaaggcaagaggagcattctgtattttaaggattagacttttttcttcccggagtcttgtaattcaccatcaaccaatcatgagatggacacaacgatggaattagcttatattggaagaaaatgaccattttggaatgaaggtatttatcttacctgatcagttgttactagagttttaaagggtagttgaagttgaagccattatccatatgaatctccattctttttggcgtaattagctatactcatatcaagaagaagggcatgctgccccaagctagtctatgtatatataccttgtatcataaagaaaataaagcttcgtagcttgagctgtttatttttcttgtttagcggtaatgcagtggtcaataaaattatcaggtggaattcaatggcttgtggaaatagtttagcatgcttgaaatttgtaaacattcaaatctttggatcccgctcatgttaaaatttgcactctgctgtttgtaatttagtacaaatgcctagaggacattcctcttatcattttctttgccctttaccactttttgaactcattctttgattcattttcttttattttacacttatattcatcgtaaccataataaatttatatgaatgcagagtttactttatattaacatttacttctttttttttgaaaaaacttaaattatatatgagacatatataaatatttaaatgaaattcaacttcattaacaaagattgcctttaatcaaagatgataaactagcgaaaacaatccttccactataaacactttcaacataaaaagtagaatcgcgtgccaatgcatagacaatgccactcacagattgtttaactaaagaaaagaaaacattatctaattacgaaattaaaaactaacaattactaatgatattccgatatggagaaactatataggttgtcttgctaatatcaaggaccacatttaaacagttagtctccacctctacttccgaccgattttttcttttaatccaacttaaacctcctttaccctcatagcttcaattataactggactaaacactcccgaatgacattgttgcactgcttctaacacctgtccaatagaattcctagcaccccaacaaacccatattttccttcagtcgaaaaaatagctccatcaacattaacttttaactttaagaaatccggtttgacccaccgcccactcacttccggcctcatctgataactgtatcggaataaaagacttctcttgagcaaaatgccattaattaaaagtaagactagctgatgaaattacctcatatacctttggaacttttttgttccaaaccacatcgttgggaacttgccataaagcccaacacaacatcgaaatctcaacccgaacctcctctctccatgaaacagcccccgccaccaaccaagtagaaaacaaagtgccttctacaaacctccaatctaaactaaccttacttcacattgctgccgagaacgagcagtatagaagaatatggccaatggtttttggcgtccccaaacacaatggacaagagatatcaacatggacatgttttgttctaagtttaaaacaagtagtaagaatattagtggctgctctccataagaaatttttaacttcagggggaatcttaagatgccacaaacatctccaaaattctaaattagcttcctcccaacattttcttttagcacttagtaatttttcatagtcacgcttaattatgaaaactcattaaattatatatgatattcttatttttcttcttctta

SEQ ID NO: 17773 - DNA, 2453 bp, Cannabis sativa
agctttgtgattgtaggactcaatgttcacacagctcctgttgagatacgcgagaaagttaacatccctgaatctcagtggcctcaagccataagtgaactctgtgatttgaaccatatagaggaggctgctgttcttagtacctgtaaccgaatagagatatatgttaaggctttatctcagcatcgcggggttaaagaagtgactgaatggatgtcgaaggtgcgttttgctgtctttatggtttatactttatacactattggttcttttttagtttgtaatttatactgacataattcttctctgttggcagacaagtggagttccagtttcagagctctgtaagcaccgaattttgctgtacaacaaagatgctacacagcacttgtttgaggtggcttctgggctggattctcttgttttaggcgagggtcagattctttctcaggttaagcatgttgtaaaagttgggcagggagttgctggctttggtagtggaattggtgggctgtttaagcatgctatcactgctgggaaacgcgttagaactgaaacaaacatttcctcaggctcggtctctgtcagttcggctgctgtggagctagctctattgaagcttcacgaaccttgtttcgccaatgcaagagtgttggtggttggagcaggtaaaatggggaaacttgtgatcaaacacttgatagcaaaagggtgtgaaaaaatggtggtggtcaacaggagtgaggagagagttgctgcaatcacagaagagtttcgaaacgttgagattacctataaacctttttccgaactgctatcaagtgcagctgaagctgatctcattttcaccagtactgcatcagaaaccatcttgttctcaaaagaagaagtacagatgcttcccccagttcatccaggagttggcaaccgattgtttgttgatatttctgttccccgcaatgtggattcatctatctcggatcttgagactgcacgagtttatgatgtggacgacctaaaagaagttgtgtcagccaacatggaagacagactccgaaaagctagggaagctcaggtgatcatcgatgaggaattaggcaaattcgaagcctggaaagattctcgagaaactgttcccaccataaagaagttcagagcttatgtcgaaagaataagggctgcagaattagataagtgtttgtccaaattgggtgaaaacatctctaagaaagacaaacaagctgtttatgatcttagcatgggcattgttaaaaagctcctccatggtccaatggagcatctcagatgcgatgggagcgacgacagtggtcggagcttaaacgaggtactagagaacatgagggctctaaacagaatgtttgatcttcacactgaaacatctatgttggaacaaaagattctaacaaaattaggaagaagcaaaaaataggtggctctttgtggccattttttcttgcttcaaagattttttcaaagaaatcacacattttttattcaaaaaaattgaacataagaaggacaaaacacgcaaattctgtatatgtaatatatatatacacatatttttatatattcttacctcactcaggcaaaggcaaacgaggaacaagtccaaaattggtggtcacctcattttgtgtacaacagatttgtctcagcaatcactttacattgattgcttttcttttttattttgtgtcaaatgaagtaattattgtgctgaccaattcaagtcattgaatgaaattattaacatattgttcttctttagattgcttgtatgtcttttccctttctgttattattcttcctttaaaacttaatcgattgattttcttaagataacttaatgttagttttagacaaaccctttgtttgtgtgagctagattcttacaatatttgtactatatttacaccacttgagacattattattgaaattcaatatggaatctcctatattttatttagtgaaatgctaagtggtattttaagatactaaaacactataaattatatatttgattataaacattttaatttaaataatatgttaaattaataattaatcagggaatgctatgttgacgatctaataataattacaaaaaattgatctaagatgctacatgttggaaattttagaccatttttaatgaatagtgtaaattttgtgctaaatttagttcaaaatatgaattaatattatatttaattaaaattttacaactatgttctaatatattaggatgatttttttttctttttcttgtagaaatgtgtaaaaaaattaattacattaattagtataaaaaaagtaaataaaaaaaggattatttcacagatacacaaaaagaacaaaaaaattacaaaaatacggttttatggaattttagacattcttacaatttttttgattttattaacagaa

SEQ ID NO: 17774 - DNA, 5462 bp, Cannabis sativa
atcgtttcttctgctggtttattccacagtacaaccataatatgagtcaaatgtccatttaaaactagattagtgtctttactttgtactattaaccattgatcaagtgtagtagttgccaatgttatcacattatgtaccaaaggattaatcttgttccacaccacttcaattcaaattcgccaaaccgcccaacataacaagcatattctcctcgtcatttcttttgatttcatctacatatatgaaaggaccagtcagcaaacaccccccaacttcctattggtttcctcacatgagccttattccaaaattcttaaacaaatgagcactaaaataatatatctaaaccggttttaggttcgccaagacataatcgacaaattgaataaaagtgcacctatatcatttatagatgacttctagcaggtaaagagatagtggatggatgccaaagtttgcattttgctggtattttcaggttccacaacttcctccaaaaatgctattgtaatttgtgtcccactttttaagctcttgaagaatattataggcaaacctaattaaataatacccttgcatttctttactccaatacaaccattcttcttcactgaatatgtgaaaggtgtttgcatgatgagattaagatctctttccaagaaaacatctttcaacagaacctcatcccactcacgattgtcaaacttcattaggctctatactggttgattaagtagcattcgatgttgagtatgcacatatggatcaacatcatttcgtaaccagaggtttattaatatatccacttcaaaacctaaccctattaatctttccccaccttgtctaagtaatggctgagattctaaaatagatctctagacataactatgattaccaccaaattttgttgtcataaaaaaccggtaggatagtatctagctctaaataacttccctaccatgctctcactattttgaataaggcaccaagcttatttgcttaataaaaatgaattaagatctcaaagatttctaaaccccatgcccccttgacttttataaatagtcattttatgtgaactcatccaatgaatagtatcctctttgaattagagcttccccagcaaaattaactcatcatttgttgttaatcatgacacatatcctatgaaagaagaaatacattcattgcttcattcgataaagcctgaactaccttcttaatgagtctttccttaccatctcaagacaatagctatcaatcccatttttgtatttactttctcaccatttccttaaaaatacccaataactcactcttctttcttcctaacatacatagcaatcttaaatagttgttgttctcaccaaactctttaatatccatcaatgagaaaaaaccatttcatttagtcatatctatatttgtacaaaaaatatggaagatttggcaaaattgagtggactgaagcaactcaaaaacactaaataattttatcacatctgtagtagccttacaatataaacaactatcattggtgaaaagcatatgaaagattactaggggcccctagtcaccttacattcatgaatcaatcctctcatctcataagctgaattaggggtgagaaatcttctacacaaatcaaggataagtatggtgaaattggatcaccctgtcgaacccccttattagaacaattggccctaacacaaaccttcccctcatacccttatgtaaaactattgaaaggcactgctaaactatttgaaactgtttctactaaaaacccatgcaccttaacattgctaaaatgaaaggtcattcaactctatcatacgcgttactcatatccaacttaagagtcatataaccctctttccctttatgcttcctctacaaataatgcaagactttaaaagagaccatgatgttatctgtgttcaaatggcaagatatgaaagtactttgaactctaaaattataccatgaagtaaatgatttaaccgattagcaaggaccttagacaccactctaaacaacacactacatagaaaaatttattgtaaatctcccattgtttttggatttttattatttggaattaggaccactttagtatcattaagtctcttcagaagaacatctgtgaggaaaacattatgagcccccgaaaccatatctttaccaacaatatttctgatgaaaggcttgattcataccatcaagtcttggtgatttatcaatatgttttttttgaaagagtgcatactttacctcctctgtttaatcaatacttggttctcgatgtttgtaatataagggtttattaattccacaatcacttcctaggtagattttgaggcttggaaaatattattaaagtaattgagcaatattagataaactatttctccaatctacccaatttctatcttccctttgtaacaaattaaactgataatttctacgtcgagcactagcagtagcatgaaagtacttattgttttgatttatggctttcaaccaaagttttttgatctttttttttcctaaaaacatcccattgatgaaagacttcaaataacagctacctttgctcctagtataactagatcccctcttcatcaattttgtgtttcaaactcttgaacttcttgttatattctttatacaatctttgaattttctattggttttttacaccattcccgaagctcctctcaacaaaaataaattttatcttgtatcagtacatccatatgagtatctaaaatattttggatagtttgttcacacattgggttactaatacaagaattttcaaaccaaaattttgagattcgtgaagtaggtaatataaattatagctataacagtttagttgtatgatctgaaaaagagatttccaagttaaataatttggcaagaggctataatgtaagccaatcaagatttactgatgctctatccaactgaatatccacctatgacactttacccttatccgtctcccaagtatatttataccctgtaaattccatacaaatcagactaaaatctagaaagacatgttgaaacccttccaccaaccaattcaaataaggctagccaccttgtttatctccatggctaactatagtgttgaaatcccctatcatggcaaacaccttttaacatgaagctatcttaacaaattccaagtctctcttcatatagtttggtttggttcaccataaacccatgtttgctgatatgaactatatccttcagtagtaattaataaatcaacataattgcgtgaataacccaaaagatgaacttcctcatcaaacctctagagaatttttaaaccccctatctgaccttgagcatcagttataaaacaaccttcaaatcccaattgatgcttaatggattcaatatttacgttataacataatgtttaacataaaaaaaataaaattaggcttcttttgaacagaaagttcttttaggaactgaatagctcgtcggtttcaaagcctatgacagttctacgacaatcaataatctagcaaagccctaccttaaaggcccacctctaatgcatgttttgaattttcaattgtacagtgaagtgaaacctcctcttcatagcctaataaactttccatacccccatcaccctgattgttgggcctacctcttttttatctttaattataaaacccttttgttttacaaaataaacatgcccactccttccttttctctagaagtataaaatgaatttcattaacttcctaactttacacccccacaatttattacttgttcctcaaattctatcttgactctttcccataatgagatcacgatcaccttgatttgtaccaattcttcattcataattttattaccattagaatctcatcaatttacgatatttgtatgatccatgtctggcaaataactgacctactctggcaactaaacacatatttttgtccgcaaatatttttctctgattaaatgattctacctgtgaggttacactttaatcgaggagccataaggattcacaatcttcttaattggattttcaaataaacttggtaaaaacttttgtcaggccccattaatccactcatataaatgaatgtcagaatattctcatatttcaaataagcctagaactcgtcacttctttcttgttgtatatatcttcattctccttcagaaaggtttatggatattaattgtaacacgaatcctgaaaaatccctccaaatactaataaaattatttttattagtttcagcaaaaacaccaagttaattaccaatatttgttattaccctttcagacatgaatccttgttgtagttcaaaaatttgtaccaaaatatccaacatatcaataacaacaggtcgtgaattcttacctccttttaatcgtttgatcaaaaactatttccaattatagatccatggactatctacaatgactatcccaatatcaatttcatagcaaatcaataagtatggatgatgttctaacatctatataaaagcctcctttaactagtttccataaagaagtcaattggtgtttcttagtgtcgaaatcaatagcacctttcgtcaaaatctaccccactaaacacattctcatatccacaccctcagaccactgaaatgattgataagaaactacatcctcttcttcatctttaaaacgaatattatcatattgtgattttaaatttgatacccctcgattactagaaactacattattaaaagaagaatcaaaggatacaacactaaaaaaacttatttaagaaaaaaactatgtcaaaagacaagactttatatttagccttttattaagaaaaaattctaattattttttcataggtgtcatatatttaacaaatatttaattggatatttattaatacatctaaagaaatatatttaaataatttatgaacatatatagctagcaagtaaggattgtaatgaataaagtcatcgagtaagcactatacattaaataatggtaaaatgaaattattttcattaatttattttgcagaatgagcatatgattgatgaattttctcatcttcgagggcaggtacatgtatttttcattctttgtgtatatatatatatatatatttaaatgctatgtttgtggatgagtactatattttcaatactattgactcattacaaaggtttgagtaatttgcaggaagaaatgttgatggaagaaaacaacaatttaaaaaataaggtatgttttaattccctaacctatacctagttgtatgataaaattaattatgagtgagaaacctcaaagaaaaacaaatagacctttaaagctcacagccaaaatatagcggagaaaaataggtatgtttcccaaaaaaaaaaatgaacaaaaaaaattaggagtatattatc

SEQ ID NO: 17775 - DNA, 1885 bp, Cannabis sativa
accaatctcatctcatttctcatttgtgtcttctgtcttcaacttcaaaacccgccccatccacattaatttttaactgtgcagcagccggtttggaccagcgttctcttgtgttagtgcgattggaagacagggaaatcgagtccagccgcttagactgagcacacttccattgtcggagagtggttcgagccagccaaacaacatcagcagcactacaacttttaccattccaaagcatatcattccgagccttccaaattgcccaactaaccatgacaccttcttcaaccaacctcatattgcctactgccaacacttccataaaccagtcaaaaaaataatcaattatatttttaaattatatttttagaatctctaaaagataataatcttttcagtttaaaaaataaaaataattaatgaaaagataattttaatttttaattatcttttgtaaaagacaataatctttttctgtgtttagtttttaatttctaatataaattaccattatttatttaactaaaaaatcattatattattttgttttaagcagaaagtaaaatttgtgttatgatttatgatgcaagagatgcaagaagttatgtaaaattttaaaagttttaaaataatttataatatataaaacaatttgaaaaggaaaagaaatatcattccaacatgatcaactcaacacaatataaaattaataaatacattaatttttacttataaaattaataaatgaaaattgccctattataaattctatctaattatctctttctttattttatttttattttcatcattcttattctaatgattttatttatggttatttaaattttaattaaaagagtgccggtaatgatgatgataaataagagttttaacatgttttcttttgagactggtcttataagatgagctaaaagctgttcaaaataatatcccaactgggaaattgttaagatttaattcaaatgtcaaatgtgatgtgaatttacttggtttagatttgaaagttgcctattaacaatataacaagatgtactttacactttttagttgcttcattcaattgatttttaggttacttacttacataatcaaacataaataacaaaattaattaattatctcaaacaacaaacaccacatgcaatgtatatactcataatagtatacattcatataacttagtttacaacatatcatatacaataatgcaagggaagcccatggtagagagtgcagtgagttttttagtgggaaagctttcatctttgttggatgatgaggtgaagctcgtaggcgaatttcgaaaagaagttgtttttgtgaagaatgagttgaatgaagatgaggatgaggaagacatcattgatgatttcttgtatagatttgagcattccaagagacatggtggaatcaaaaacttggaagctcgctgtcgaattgcagagttaaagtttcttagctcactatctttggattccccaacagaagatgatgaagttcttagtttgtctagattatgtttgagtcattacaagatttgcccaatttagtttcacttgagtttggagtcactattatgtaggagtttcttaatgctccaaatgatctatattgataaaatggagaacttaagaagggtgatagtggaagacaaagcatttgcaaattactgaacaaaataccatttggaattgaacactagaaaaacctattgaaatgggattagatggccattgactttagagatgtaagatattcattagtaaattttcaaacttcaatcatggacaaatgtggctagttgcagagaaaatggatgcaccatttttgtaaattctaattctgatgtattatttgt

SEQ ID NO: 17776 - DNA, 4861 bp, Cannabis sativa
gaatgatcttatcaatacaagcaagaaaagaaaacagagagatgaaacaaaacagagcttgcaaaagatgcaagactcaaggaaggcaattgtatttatagaaggagtacagcaaggttacaaaggaaacagaattaacaacctttgtaacagaaacaagaaaatacaggtaaatacaatagcctaactaactgacagttgaagacttgctttatcatcccccctcaaacgaaatggtgtaatagacacattgagtttggctttaaggtaagcaaatctgtctttgctgagagattttgtgagaatatctgcagcttggtcaagagatggaacatatctcacttcaagttctttggcaatgagttgatcccgaacaaaatgaagatcaatctctatatgtttcgacctcgcgtgaaagacagggttggctgcaagggaggcagccccttgattatcgacccagataatgggaggtgctggtagtgagacatgaacttcagataggacagaacgcagccatcgtatctctgctgctgtgttggctaaggacctgaactcactctcggtactgctccgagcaacaacactttgcttctttgcagaccaagagataagatttccgccaaagaaaacaacatagccacctgtggacttccgatcatcgagacagctagcccagtcagcatcagagtatgcttgaagagtcatatgcaagcttggtcgaatatgcaaaccttcatacattgtaccttttaagtatctaagtaatcttttgcaagcgtcccaatggatattggtaggggcatgaataaattgactgagtttattgacgatgaaagcaacatcgggtctcgtcaaggttagatactgaagagcccccaaggtacttctgtagagtgtttgatcaatgaatggctctcctatgctgagagcaagagtatgagccgaacttgtgggactcgggctaggtttggcaccctccattttgagctttgtgagcaaatctgaaatatattttgactgagaaagatacagtccagtagtgtttctgatcacttctaccccaaggaagtaatgaatggagccaagatctttgacagaaaagtcattattgagggcagatattagggcagagatgttgttgtgatccggacctgttattaatatatcatctacgtagacaagtagtatgatgagagttggaccagccccataaatgaacaaagaaggatcggatcttgatggttgaaagccttttttggtgagagtggacttaagtttatcattccaagctcggggagcttgcttcaacccatagatgaccttatgtagcttgcatacatgatgaggttgtgtgggatcaacaaacccgggaggttgttgcatatagacagtctcctcaagggtgccatttaggaaggcattagagacatcgagttgttttacatcccagttgtaagagacagctagagttaagactatacgaacagtagctggtcgaactacagggctgaaagtttcttgaaagtcaattccaggtgtttgatgataacccttggccaccaacctcgatttacacctgtccaaactgccatcagcgtttaattttaccctatgaacccatttatttcccactaatgtcatgtgaggttgatatggcacaagtgtccaagtgccattctttttaagggcatagaactcggctgtcatggaagcattccattttgggtcagctaaggcttgttttagtgttttgggttcactgggaaggagagattcaggtagaggatattttgtggcaaggtaggcttttggtttgtaaattccatctttagatcttgtttgcataggatgagtgttttgggaggaggtgatagggttactggtggaaggctgggtggttactggtggtatagtggtgtggacagtagtgatttcagccgagttatgtactggaacagcagggaaactgggtgctggtgcagcagacaaattagttgctggtgcagcaggcaaattagttgctggtgctgagacaacatcagcagaggcagcagataaaatagttgctggtgcagaagcagtatttgctggtgcagaagcaatatcaacagtgggcaaaatatttgctgaggcagtattgagaactgcagctgcagtgtggacaggtggagagtgagagctgctggcaccaactcctgaagtgcgaggaggaattacctcaggggcaccaaatgacattgtattagtatggccaaatagaggagttgtttgaaaaatagtgcaaggaaaggtagtaggtgcaagtgatgatacctggtttgtcttaggtgatgaaagagcaggaaactcagtctcattgaacaccacattgtgtgtgatatacactcggccagaggaattctcacaaagatatcctttgtgttgcaaagagtatccaatgaaaatgcacttctcagatttgacagtcatcttgtgtgtatgataaggcctcaagtaagggaagcatgtgcatccaaaagtccttagaaaggcatagtcaggctttttgtaaaacaaacattgatagggacttacatcatccaaaactggtgttggtagccgattgatgacataggtagcatgttgaaaagcatgccaccaataagatagatcaagacctgattgagctaatagtgtcattcccgtttcatttatgtgtctatgtttgcgttccgcacgaccattttgctcatgatcatggggacaggaatgctgaaagtgaacaccatgttctttcaaaaaagaagcaaaggacctgtactcacctccccaatcggattggacagttttaatggggaggttaaattgtttttccactaatgatttgaattgcaagaaggtgggaaaagcttgggacttgacagtgcggggaaagatccatgtgaatctactgaaatcatcaagaaagtgaatatagtatctaaaaccttctttagaaggcacatgtgatggaccccataggtcggtatgaattaattcaaggggaaccgaggctctattggtggataaggcatatgggagtttgtgattcttgccaattttgcaagcatcacaaaactggagactttttaaagtaccagtatggttaatattggatagaaccttggctaaaattctaggtccagggtgccctaatttggagtgccaaatattgatgtcttgagcaacattaacatgaaaaatttcattagtggaattgacagtaagtacagaaatggatgttttatttatatcagaattggtacatgtgggggagactgttataacagtctctttattacaagtattgttacaacttgaagaacaaacaggaggaatagaaggtatggactccttagtagctaaattgcactcaagttgcagagactgttttgcaatggatggttgagttagcatgtacaagccattcttaactctccctttgagaagaacctgccctgtgttcttgtccttcacaaaacaacaagtggggtgaaactcaagaaaaacatgattatctttggttagcttagatacactaactaaatttttggttatgtgagggactttgaaaatgggattgagctttaaaggacgagattgagaaggtaaagaagtggtaccaagatgagaaatagggagatgcttaccattgccaaccgccaaagattcatggccatgataaggagtctctatttcaaggtgttccatgcctgtggccacatgtgtgttcgcacctgtatcggcataccaatcttgatcatgagcgaaatcaggaactgtgttggatgagtagtgatggtgatcatcatcttcaatttcagtcagaaatgcttgattttctccatgtttgggtggaacaaaggttttgtcgaagcgatagtggcacaccgctgctgtgtgcccaagcttgtaacaaacttgacagagaggcctcgagttactactcccccatccaccagatccatagccacgcccagaagatctgtattgagaattagggtttgatccgcgaccaccatagttggaggagcgatagttggacgggccagaaccaaatcttgatgaagaaacggagagattagcagtcattgtggaaggaggagctccagcagtataatggcgttctaggcgactttcatgggtgagaagaagtgattgaatggattcgaacgagagattgtcgacgagactggtgacgtgaaccaccacagggtcatattcaggacccaatccattcagaagatgcataataaggtcactttcctccattggatgacctgcagttgacaaagaatctgcaagaagcttaactttgtcattataatcagcaatggagagagaacctttttgaatcgtagataactgagacttgatttgaagtaatcgagctttcgactgagaggagaatcgctgttcaagggcacgccagacagagtgagaggtgttgtgatgagcaagagaaccgaggatcgtttcagacatggacgatcggagccagctgagtagaagttggtcctttcttttccacgcaagaaacgcagggttgacatctccagttaccagtaattcagtcggagcaattccagcaagcaggatttcatctagaccatggccgatgactgtgggaatgacctgagatttccaggccaagaagttggatctgtctaatttgacagtaagggaagaactgagggaattttgaaagggattccatgtgtttggggagggattcaaagatccagagtttggtccagtaggacgtggtgggttttcaacaaaggtaggatccataggagacttttgtcaatggcttgctctgataccatgaatgatctta

SEQ ID NO: 17777 - DNA, 4568 bp, Cannabis sativa
caatttcctaccataaacttggcaaatattatgctggtgagcttgatttgcagtctgttattagtgaagattcataagcttagctacttgttttgaatattcctattaactagttcaggtttcagtctcgggtggacaacattccagactctcccaaatttagtatcatttcttaagttacgattcaacattgataaattcaaagaaaatgaaatttttatgttaaaagatgtatagagaaatataatggctctagtaaactgaacaacattgttgtcattagaaaatacaaggtcatatgtactcatcaaggatttcgacaagaattttataatgtaacatcagctaatacaatcagaaacttaatatacaattttgtgaaagtctactgttgttttttttactttctgctcgtctctactaaagcctctgtttctaaccacaaggctcggtctgagcttcacaaatctatatacagtattattacatgtgtacaaactaacatggcttatttttaacacaattaagagcacctgcaaagcgagtaagcctcgtcacaaatgtcccaggctttgcattgatcacgtctttattaggcacatttttaactgtactaccagattcaacaaagaatgctccattcatcatgagatcaccctctgacctccaattccatgtcttccagacactctcaggtgcataatccctctttgtcacctgaaatcatcccaaaatgaagaacaatattaaatttatcatgcagatttacaaattctactctagtaacaagaacagctaaatgatctgctgttgtgtgacaatttgactaacatctgaaaattgtttgtgtagatgtgtccaagaaaattaaaattaaaataaaatagaatgatgtgattattatcaatttttgatgcatttttctacctctctgaataggtctgcgtgtaattcactgtaacgaatgacataattgttatgtccaccataatgggagttctattctctattctcaatagggctgtattctattttagtgagtgatattgtgctcgcactttggaaatcaatattatagacaattgttcaagtgtaatacctctttgcaatttatgtcttgaggagcaatgaaacggttgccttggcttatgatggtaggatgttggctaccaccaacggcatacatgagccaatgtgtataatcattgttaactacatggatgaaaccccatctgcatctgggcattctctggaccaatccctgaccgaaatggttgaatgccacagttacttgcatgacttgatcctccgaatacccatcacttgcaccaaacaacatcacctgcatttgcattattatgcatattattgctttatccccttaaagttggcaaaagtaaattagaaagtcaaactcaacactttagagtttagacatgaaaaaccacgcaagacttggttttgactaactttctataacgagaaacttgaatcgacaattattattggtacctcattatgatgagttaggtgacaatttgagatggtgacagccgtggacgccatgatcacgtcaatgaggccgtcttgacaattggacatcgaaatatgatcgatccaaacccgcgtagatccatagatcgagattgcatccccatcgctacgcgttctgaatccataatgctccatcgaatccctaatcagccctccattcccagccttgatatcatgaatgtgcaagccatgaattatcacattttccacaaactgaagtgtgatttgaccaccattacttatatgaaccctagctccacggccatcgatggtcttatggctactcacgatgagctcctcggcgaggcgaatgatcatgtcgtgggcgaagatgatccagagtggctccggctggatgacagcatagcggagcgttccaggcttggggttgacgaggtcattgtcagaggggtcggtgacgacgtagatcttgccgtgcttgccgccggtggttccacgggcgaaacctagggcacaattggcgagtctcttccggtgcttgaaccagtccttgtcacatctccaacaacggtcgattgggtttgtggccgtacatccacttttttggctttttaggtttcttctactgtttgttttgttactgaccacgtcatcatcctctatgcccctttttttcaaaaaaaaaaaaaaaataataatgatactactatcattttatttctatttatttatttaaaaaataatactactgtcattttattcagaaaaaaataaatacaataagtatttttcaaaatacatcactactttttttttttaagtttgccccaaattttttatatttcattaaaaaatataacaattttaatcacgtaacattatttaaataagcaatttattaaaaaaaataaacaagttggaagagaaaagagtaaaaattatcattatgaaaatcagagaaactaataaaacaaaaaataatttatgtgagttcatcatcgattcatcacaatgatatatggatatatgttgagaaaataactatactaaagacttatagtggtatgatataatgttgagagaaatgagtagaagagattaaagtaatatacttatgaacgtgataattaaaatcttgagtgactttatgaggatcggggtggtaggccttatgggcattcttcctggcttgtatagctcgttgttgccatacctcatcgaagtcttttatgttagcccttgtgtaatttggaaataatattgcaaaaaatacaataatcaacaattcaaccctaaagtacttctctaatctcatgattaattttcaattagttttctctatttttactttttggttaatgcgtgtacttctcttctggggtgttatttattaattaggttgaaacttcaaaaataaacactatgcttataattaccacaagaagtatatgcctaaatgaagcaaatagatgaaataatgaaaagtagagaggcaagagaggggagccattaattactacctttccctaataattaatttgtccatatttagatcattatcgttttcaatataaatttccttttgttttcaatttggatgagaagaaatttatagttatttctttaaatcagttttgaaaaagaaaaagaaaaaaaaaatgtaaggcagcatagatttttgtgtattattagatagttgaattgtgaaacatagttgaattatcactacatatgtatcactcaacgtgttgtgaagatcaattttaaatagaaatatcttggcctagtttgatatttttgaataatgataggtacatacatataaattctaaagaaatttgacatgctaagtcacttttaaaaaaggttagagttccaatttgaccttatgctttctagttaattgctagcacattttctgtgcagtcatttttttgtcttttattgatttcaagaattttttttggttttatctagatttggtctacctccttgtgttctgctacgcttgctttgcttgtgttccgtttagtggaagtattgattgctttttctgcttggggtggttatgattttcgctatgagagattctagtgagaatacatgtgatcggaaatttattgctatggagagggatcaggaggcatgataacgatattaatgtctcccaagttccaggaggggataatgaaattaatgaaccatttctcaaaatggtattggctatgagaatggtattgaaaactctgatgagctagaaatcttgggacaaaatttctttgagtctatgactcttgaactggaactgaattttgagcttaatgcaaacgttactcggattggggttttggcgagcttcttcgaatggaaaggagtctccaggtcaagattgaaggacattctggtccagatttggaagtctggtaagcttaagggaaactggcggtttaaaactatgaggtctggtttatagggtattttctttgacttgaaagaagattgtgtcactgttctcgacaatcgtccttgggtcattaatgggaagctcttaatcatccatgaatggcctgaatatggtgcttgacacaatgttgatatgggaaaagttattttcttggttcaagccatgggccttcctacgccttacctcaactgtgttaacactccaatagttgtagccaaagtaggggaatataaacgtttagacatggttgaccaaagaaccatcattagtattgctggcaatttgtgttattgtgtcgtgttcatgtcgacgcatttatgaaatgacacaattaagataaacacgaacatgacatgtttattaaacgtgtcaaaaccccaaacacgaacacgatacgtttattaaacggtttgaaacctcaaacatgaacacggcacgttaattagtaggtcacatgacacaaacacgacacgacacaataacacaattatgacacgagtatcattataaatataaaaattttgaatttttttttataaaatatatgaatattaattcgtattatcgtgtgaacacgattatgacacta

SEQ ID NO: 17778 - DNA, 8227 bp, Cannabis sativa
atatacagtgtataaaatagctttttgttcccaacaagtaattcgcaaatcaatttttggattcaatttacaggcctctcaagagggaagtgtcatatacttcacagtgtttcttttccttagtcacgtataaacaataccatatcataaagtactaagtacctcattgcacgataaagggggcgataccacaaaacatatgctccgggaacccctgaaatgaagtatatgatagccagaaaccatattgtcggacctacaagtaaagacaagtttaaaccaaatcaagcagaaaatcaatgcagttattatgcaagcacttaatttgcaaaactcaccttctcctttgatccaggctgtggtaacagcaacgatattccacaaaagacacacaatcaaacctgaagaataaaaagtaaattttcaataatttcaagtcatagaagagtgaaacattccaatcttttgttactttctctatgcaaccaaatgtaaatggtaactaaaaatgtctaaacaaataatggaatgttcaaaaccttaatatttgtgaaaaacaaaatgaaatactgatacaagtctcccaatgatctacaagttttaatatcagttagctactcttacgattaagtactgaaacaatggaacataaaccaaaaaaaaaaaaaacttgaatttcatcatataatgtatgataataagatatacatatatatcttaaaaagttcaaacaatgaaaactttctagtcagcacttgaacatacccaaaaacgttgtaaatgcaacatactggatcctctggagatgaattggtatttcatttgcaatgtcatgatggaaaataggaaaaaacggtggccaatttttctcctctataacaataccagctgccaaaacaaaacaagtgattcatatttatgtaaaaaaatacatggcacaacatggtcatgtgtttctttgaagcacatttaagaaaatggtagaacctcgttgaatagcatcttccttccttttcagttcctgcaaaccatagcaatcaatagttaaaaaagagttactacaataaagcataaaaatgtacataagaataatttatacagaaaagcacaagagtatccaaactcaattttaatgttcatgtcaaaatttgggattaaattctacatcatacacaaataagtaaaagcaaagcaataaaactttccacacttacacatgagagaacggttgagataacaaacaaaaaaacagtaaaacaaaatacaatttcaatgttctactaacatacaagcacaactcaatctacaagatggctaaatgttattcttagtaagtatttaagtttaaagcaaatcactagaaaagaaagttctcatatttgcctcaaaaagtaaaatagagcataacaaacatacaagcatttgcaatgtagtaaattgaaattaaagaagctaattaatgatatataagaagaagaaaatttgaatacctgttctctctttcgtaattcagcttctttagcttggagttctttctcctttgcttttatatcctaagattaaacaaaccacatattaactatgaataaatttataacagggtacacatacataaactgaggatgaagattagcgcacaatgcattttaccttcgcattgtcaagaggaatatcaatagttgcaccacgatcataaggttcaggaggtaggggtgaaagccttgaggttgctgggggaacacttccaggattctaaaagtaaatcaacaaaatagcaaatgtttgaacagaggataatttttgtaccaaaaagtattgagacataagcctcaagatttccattaaaaaaacacttaaagagtgtacaaatagcaagaaccaataacaaaattcataaagcataaatcataaacataatactagaattcagacaaaaatctcaattaaatcacaactaaacattcaaacatcaaacatctcaaacaagatatataaattaaaaaaaaaaaaaaaagttatgcattcctttttccattaaaagatgatttgatagttgaagtatcagtctaatgggcctgataaatgaaaagttattaaatatttatgatataaatctatacttgttataacaaccctgaaataattactaaacaatataccctaatcactatggaaacataaccactgaaaactctaaagttgcattacaaaagatgaagggatgtcatctacattacaacctttgttggctaacaataatatttcctttatgcatcttattgataattaatcagatgctctttgttgcatttgtaaaacgtttgtgttctactataaggaaataggaaaaaatcaagttaaagcatgctatttttcggtttctcaagaataactgttgtaacttgcttgttattctgcttttgattcttatgaacaaccacaacaatcctcaaaatcttgttcacatgttctttgattatttactaagcctctttagtactggctagttttgacaacctaaaagtgaggctcaagagtgctttatatgaatgaccatacaaaagtaaagggcagtttgtattaaatattcaaattatgcactctctcattgcccaagctttttcagatgcttatgtgcaagggaaaggcgaagggcaaacttactgtcatgtaaaaagcacccccgccataattcgattgccccgatcctttccctctacctccatggtcctaatatttagagcattaaacaatacaaatcgaaacaaatggcactttttcataaagcaacaaaactcaaccaaagacaatatatataaacatatatatttatacaatcccatcagctgtggatgaataatggcaaagaaaagaatgaataaaatcaggcaaacattgtgtgccacaacatctcgtgaaagaagtgcaaaataaagagtagagctaattaatggagcatatataactttctttctttaaaacgtaagataataactttcctatttccttgaattgagttaactatttaaatttttggtacataactaaaacaggataagaaaggaaagtaatatccaaaaactaatatgtttagattggagatttagttcctcaaatggaatccttgtccctaatctaatccaattatccgaatccaaaacgaagcacaatatccatttaactagaatcaaatcgaaatcaataacacaaatttcatgaactacatacattataggttttcaaatcacagagttaagataatctcaacaattataataaatcaccaaaaaactaactcattcatccaactacaaatcgacatcgaacaaacataataagaatccaccaaatctggcgcgtaaaattccacacaccctcgcaaatggatatcaggctacgggaatgtacataaacaaacagataaagattgagaaaagaacttaccgcgaagggattaacctcttcttcttcaaaagggttagaatcgtagcgactcatggaaccgaaccagcagatctaaacctgtagtaggaataagcaaaaaagagggatctggataaggaagaaaagaaaaattccggtgatggagaaaagctttcaggttttggttgctatggtaatttgaggatagagagattgaaagagagaaagaagtgtgtgtaagaaaatgaaaatgaaaatgaaagggattcaaattgcaataacagttttatttggtgtgaagaaaatatgacgagaaataaaggggaaagtgttggcgcgtgaccacgataactatagcattattaataaatcatttattatttattattattattattttgaatattattatttcaattattattatttttatggtattagggcaccgctttactctcctgtctctctttttctgctctaacattctcacgactgtggcagttgcagagagagacttcgttcattccccttgctctttgctccgtttgagtccgccgcctctagctccggctctcttctacagaagctctgctttttggctcttttctttagctactcagccccgacaatgacacaggaggcagaggcatggtaagttttcctttctatcttcttgagcatagttatattgcagaaaaaatggcagcagctccaccagttccactttttaatttttgttccttgatttttttccaatataactttaaattacaaataattttaatgtgtgacacatgtaaataaacagagaattgaagaaaagcggagtgtgagcaaaggaaacttgcagaccctaaaaccttaatttaaaccctacttttccggcaagggaaactcgccgctttccaaagctcaatgcaaactcacgtcttctctccaagtaagcttcaaaatacccagtcccctttcagagctggggtttttctaggatttagtctccgttaccagaatgtagcaaagagacaacactgtgctattcctaatgctttaagtgttgaccaccaaaatgttgagttcattgtgacttcgcatacccagaaggggaaatcgagagggccaagtgtttttgtggggtttaagctccactgtcattcgaaaacactgacttttcctactaaactatcttcagttaatgggaagaagaagaagaagaggtatggaggtgtattgcctttcattttacgctctttggaatccaataatgatatcgaaaaaactctcagtgaatattgtgataatcttagtccaaaggagcagactgtggttcttaaagaacagaggagttgggaaagagttattcgggttttcgagtggtttaagtcgcaaagagagtatgaaccaaatgtaattcactacaatattgtgctccgagtactgggtagagctcagaaatgggatgaattaaggctttgttggattgatatggcgaaaaatggcgtcttccctacgaacaacacctatgggatgcttgttgatgtttatgggaaggcaggacttgtaaaagaagcccttttgtggattaaacacatgatagtaagagggatttttccagatgaagtgactatgaatacagttgttcgggtcttgaaggaaggaaaagagtacgatagggcacacagattttacaaggattggtgtgttgggcagattgagctggacgatccatattttgattccaatgttgatgactctggttgtgaactcattagttttaagcattttttgtctactgagctttttaggaccggtggtaggatttccacactgaaaaattcgaccactttggaaactgaaaatttgattcggaagcctcgactgacttctacttacaacacgctgattgatttgtatgggaaagcagggcgtctggaggatgcagccaatgtgtttggagaaatgttaaaatctggggtggcaatggatgctataaccttcaataccatgatatttacttgtgggagtcatggccatttgtccgaggcagaagctttgcttgctaagatggaagaaaggagaatatctcctgatacaaagacttataacatctttttatcattgtatgctgaagtgggcaaaattgatagagctcttgaatgttataggaagatcagagaggtgggcctttttccagacatggttactcacagaacggtacttcatgtactatgccagagaagcatgattcaaaatgtcgagtctgtgattgaagatattgagaaatctggttcgcggattgatgaaaattcagttcccagtgtcattaagatgtatgttgaaaatggattgattaatcgggcgaagttattttttgaaaagtgccagaaagatggtgggtattcatcaaaaacgtatgcggctataattgatgcatacgcagaaaagggactttgggttgaagctgaggaggtgttcttccggaaaacaggtttggttgggcaaaaatggaatgtcattgaatataacgtcatgataaaagcttatggcaaggcgaagctttatgacaaagctttctctctcttcaagagcatgagaaatcatgggatttggcctgatgagtgcacttataattctctcattcaaatgttctcaaaaggagacttagcagaccaggcaattgacctcctaagtgaaatgcaagaaatggggctcaagccaaaatgtttaaccttctccgctcttattggatgctatgctcgtctaggccagctttcagaagcagtagatatgtatcacaaaatgctagagacagggacaaaaccaaatgaagttgtatatgggtctttaatcaatggatttgtagaatatggaaatgttgatgaagcgctaaagtattttcaccagatggaagaatccgggatttcagcaaatcagatagtcttgacatcgttaataaaggcctatggtaagatggggagcttgaaaggtgccaaagcactttatgatcggatgaggggttttgagggtggccctgatattgttgcatccaacagtatgatcaatctctatgcagagcttggaatggtatctgaagcaaagatgatttttgaatatttgagagaaaagagtttagttgatgaggtttccttctcaaccattatgaatctttacaaaagcactggtatgcttgaagatgccatccaaatagcagaggaaatgaagctggctggtttagtgaaagactgtgcttcattttcaatggtcatgtcatgttatgctgccaatggacatttgcgcaagtgtggtgaactattgcatgaaatggtaacccgaaaactcctgccagatccttggacctttatggtactatttaccgtattaaagaagggaggtttttcaattgaggcagtgaaacagcttgagttatcttaccaggaaggtaaaccgtactcccggcaagctgtcatcacctctgttttttctgtagtgggtatgcaagatttggcactagagttctgtgaggtcttcacaaaagcagatttaaatcttgattcttcggcttataatgctgcaatatatgcttatggggcagctgggcagattgacaaggctctaaacatattcctgaaaatgcaagatgagaacttgaaaccagacattgtaacctatatcaatctggttggttgttatggaaaagctggaatggttgaaggtgtgaagcggatttacagtcaactaaagaatgaagaaattgaacagaatgaatctttgtacaaggctatcatagatgcctacaaaagtgccaataggcaagaccttgccaatttggctagccaggcaatgaaatttgcgcttgaatcggggcaatgtgttggctctgaaactgaagaagagtctgatgaaactttttcagatcttgaaagtccataattatttagaattctaagctttctagtctataatgtgacccaaagatcaatatccatttttgtggacgtcaggaagataaatagatgaaagtatattgagaaaccaaaaaaatgtacgcattcccatgtataattgtaatgtttcaaatattccaatagtaaatacaattttgttgatctaatctttgtccattattgctaatcttgctcgttttggggaagttatttccttagctttacctcactgagccacccaagtagcttttgactcctctctttgaggcaaaggcttcagattcgccagctcctcctcagcatgatttatcctcaattgggatagcaatcgaatctcattcaaaggctctctagcctcgttgtaacccccaaggggttgtctgtgcggacgtcacagttcctaattggcctccggccaggtcgagctccttcctcaggcttagcatgctaaacagtacaaaaatgtgatcttggagcgaggtatgggcggagaaatcgaggatgatgatttttccttggcacaacggtagaaaaatatgaagaaggcttcaagctttcttcaagctttttggttttatctctctggggattatttaaaagaaataaaaatgaaagtgaaagcttaaaacaataaggaatgacttttatataagcgtcaattttatttctcccgaaaatcaattaaataataaatttattatggggaagtggaaagagcaaaaatgggtaataatgggaagagcagtcgtcatcacgttttcccacaaaatatgcttctaaactaccattatgagagctggcaattaatagtcagttgaagagacagaagtgtgatagtttatttctacacggtacaactgtca

SEQ ID NO: 17779 - DNA, 3340 bp, Cannabis sativa
ataccaagaaaatttgttagaatctaaaaagaacatgataagtttgaccaaagtaaactaaaagtacctgtagttagtatgagcaccagcaccattccaatcaccctagaaatggccaatgaggtaataatatgacatgagaagagaaaatgttataagaacataactcaagtaaagatttaagctaaccgggattggttttggatcaaatgagacagtaactccagcaatttctgcaatcctctaccacattataaaaaaatgaacaatattaggtgatcatactcataagattggctcaaaaatgagtccaaatttgtaacattctcatatcatgctatgctaaagatacctcgagaatgtatcgcgcagcccataattgatctccagcagcaataccaagaacaggtccaacttgaaactcccactgatccatttgtaaagcaaaattgaaatgagtaaaagccattttggttacttttatgctctactaaactcaaattttacctgtccaggcataacttctgcattgattccactgatgtcgattccagcatagaggcaagctttgtaatgggcatcgacgatgtctcggccataggccttgtctgctcctacaccacagtagtaaggtccctacacaaacacaaaacataacacaccaatttagttcctatgctgacaatgatgatgagtttttgtagccattttaagaatggtatgttatgatgtttaaaactaaaatggcataagttaacctgaggagcagggtaaccaccaactggccatccaattggccatttagtgtccttttgaagaagtgtgtattcttgttcaatgccatacctgaacatatatatcaatgcatatgcttatgttaaaactgtaaaacaaaactatacatatttatttattaaaaataaagccacaataattttggccttcacattagttataaatacttttctagccgaaaaaagttataataacttttcattttatatagttaacgagttctctccactgttaacattcacctcttcgtaaaaacaaaacaagaatgataattcactaatactgacaaatacatttactaaaaatcatcataaaacataataattattatctgtacaaaaaaacccttgaaatgttgtttgatattttgtgcttttagcttgatcctaaatacaaaaagttatctgccaaagaaattctttattctagagtgtcacttttttttacgacaaaaatggggtaagtaagagaacacctaaagagcaaaacggtctaaaaggatcgagggctaggagtattactgaatcatggcatcatccaaaataaggtttttgatacaatttagatagtcagccaccaaaacaaggctggcggtaagtagttgttacgatatatttggctagaaactattataacaatgaaaaataagacacaaaagacgagtcgtccaggtgcacacacttgttgatcttgtgaagaatgctttggcaataggtacatttagttggtagaatgaaaatactggaatagtttccttactattaaaatagtaaaataaccattctatcaaaatgtaactaaaaatgaatgacatacatgaaaattcattcttgtctatttctatttccatttcaacaaatagcaatctcaataaataaagtgttattattaataccaaggctcctcagcagcaacatcagggtgactgaaaatctcggcagcactgtgtcttttgttggtaggaattgggtcgccacctggcgtgtatgcatcgcaaataacctattattttccatcaaacacaacattatcatgaaaatcaccaaattaccccttcaccaaatcaatcaacaattctcattcattcattcattcatttctctcaccactcaccagtatgttctttcctccccggaatggatccctaaacactgcttcaggactgctcatcatcatccagtcaaaaaagtaagcaaatccgacggcttagtttcaacacaatgtatcaaatgcatttaatcacagccgttgatatatattaatttatacttataatttacgtactgtaagataacttcactgttgtccccagttgcttggtttgtgcttgaaccatcgtagttccacttaggcagttttgctggctctgtcacgtgtgatggcagtgtctgtaaattacacaccacaattttatttttttttcattttccattaaatatacagttttgggcttaaaaaaaattatacatataagtgaaaaattagtatatatatcgcacccttgctttgcttctcaggtccatactagatccaccaccgatcctgaaaaataagaaaaatattgattatttacgtgtactcaaaaaatataaaataaaaaaaatatattattattattattgttgttgttattatacatactaagttactaaccatatgtattcggcgatgatcttttcattggtgtttgagaggtttattttggcaagatcagagaggagagacatggctgaaaatgagagagctagaaagagttttctttgttgttgttgatattaataatttgatttgataattgattgtgattatatagataggaaaagaaaaagtctgtagagcatacaataaatttcctatgaaagaggagagcaaggcatgtggaagatactatatctaactatcatacacgtatatcaagtataaacacctcaataatcaatatcgtataaaatatataaaatcacgggatctctcaaattctcagtggactaaaatggaaatttaattaaatcagaattttatttgtttttaaaaatttatgaagtaagcccattttaataatttttattttgttttatttataaaatgtaattatgtaaatgaatttttaatttaagggtaatttttttgttttctctattaactttaatcaaatatactattatttagaattcaatctttataacaatttttagtttttatgccttttacgtgtatttttgtgctttttacggctttcgtgccattttttatagcttgcccttaactgtttagagtagttttgtggtacagtcaatggacaagagaagtgatccatattgtgctcttggcttctacatcaacgacctttcagttttgacagagaagtatttcaagtctttatatttatgaattgttttatattataatatggattatttactatcttaattttattttagctactttttcattaaattatgtaataatagagttttatttattgttgttttgtaggtcaattttgtggagggcctacgattatagagactttgtcgggtaagtt

SEQ ID NO: 17780 - DNA, 3834 bp, Cannabis sativa
ggacattgtcccacaataaaccgctactccttgatctgtgggcttgggcactcaatttcattcttcttgaatcttcttcgtcaacttgtatagaaaggatcatatataattgatgagcatggcctcttttatgtccacttagagagacagaacgagatacgtacatcactagtaccacatctcaaagataaaagtatttataccaacaataaagaaaaaacactagtgttcttttctattatttatacaaatatataatcatatgcattaattagaagatggagagtactttaatgctttcacatttattaaagccagttatatgattttaaagatgtctagcactcacattgtatattgctactgttcctatacaaagaaatttcattgagtggcctaagatgcaaatgtgaccattgatattgacccccctctgttcactctcatatcctcaaaatcaattcaacaattttaatatttaacaatataacacacctcccaagtaacttagattgaaaaaatgagctacatttatatttacattccctttatcaatcaatactcataaggaaagattaatagtgtctctgccactgccattcatggctcgatatcatcaaattggatatatatctcttaatgttgctctgatctttacatagttattaagtgccataacagcattacttggtctatcagtactgctcatcatacatatgcatgagctaatatttcagaaagaaagaaagaaaacaaatggagcaactggagcagagtcacagtggcttgattgaatttgagacagattacttctgatgtaaataattttgtgttcatagtattcactttatgaattgtccaaatgattttattattatgttctaggcagttgaaacttcttcattgcagtaaaatagatgtggttagcatgagaagcactaaaaactctctcacctaccgctctaatggcccaccactaaaaaaaagaaagaaagaaagacaaaaacttcaaatctacctacttgcactaatcatttttcccatcagaattttctgtctttcttatttatctttttatttattcttataaagctttcacactgcatagtgttattcctaagataatgcttccttaaatgatcagttctgtttaatctaatctttttcaaaaaaaaaatgcttatgatatgaaatgggtcgtcatgaattccattacatttatcaatgacaagggatttgtaataccagtacccttattcaatgatatatttaattaagatcaccaccttatctgactgagtgaggggggaccattttctttcttgggacaagaaaacctattgccttaaccttttcccaaaaattaaaagggaaaatgataaaaggctctttcagcctaattaaccttgttcaatctttctcagtctcagaggcactttaaatgcacaagctgaagtgagacagaggcaaggctaacaccatttaataccccactaaatttaataggtgaggtgagacttgagagatgaggtgaagtgaggttaatttcttttgtacgagtgttttaacttccacggctttggctttggctttgaccacttggcaagctctgcagtttgcaggctggcaaaggagacaagctccatcaccaaacatttgggaattcaaggaaagtataaatatattataagaaaataaattaaagcaaaaaaaaaaaaaagacactcctagaaagaaaaagataaatatattatttttggtgttgttaaagtaaaataaataaagggtagaaaggactgtgcctatttaagtagttggaagtaaatggtggggttaatgtagagacagagtgcaagagaggagttagctaaggtttctttgtgagttttgagcctttaagggatactgttgtgaacaacagcctttgtcttctttctttcttttctttaaagtttaaatctttagcaagtatgagctacttgggtgttggagttagtccagggaacgtcccagtttatcatagtacagactcaagagttatagatcgaagagtaagaataacagagttggtgttgagatgtgtcatatgtgccctaggactagttgcttgtgttcttatagcgactgatacccaagtcaaagaaatcttctcaatccagaagaaagctaaatatacagacatgaaagctcttgtgtatgacttagattcctcttcttacttaatctcatgtttcttatttttctttttcatttctatttggtgtgtactaacttttattatgttgtttctatgcagatttgtggtcatcgtcaatgctatagtttctgcctactcgttgatacaagctttgcgttgtgttgtgagcatggttaaaggaaatgttctgttcagcaaacctttagcttgggtcattttctctggtgatcaggtacataacattatatcaaattcattaccccatttgcttcaaatagctttcatgttttgtaatctctttatgtattattcctgttttctttatgcatgatcattgttgtagttgctatttattttccatttaaattaggaagaggaaattcgtggactgaaaatgaacacgtctcaatcaatagcttttcttttgcataggccacagggcatcttaggcaaagaatgttgttttttttttaaaaataaaaaataaataaacttaattgtgcagtttttaaattatggtaagttaaaaaggtgggaatgtttgtagcctcaaatttctttttacatcttctattttgtgtttggttaaaaagttgggggcatttgtaccttatcgttattttcatacaatctggataatgaccccatctccatttatatgcttcttgcatctctgccagaaaaaataaaataattataaaatatatatgtgtgtgaagctttagaaaaatctatttgtgtataaaatcatgcatatatatctttagtatttatggtttgaaaagttgaaggcagaaatgtaattaatagataagcattgtacaattggaatttccatcttaatcaaaccatactagtccattttcaaactctatctttcctatatataatatgcagcatatatttaagtgtcagtaacagtttataattatatctgttgaattgttgtctttagtactaatgcatcagtctaaaatcaaaccagtagtggctttaaattattttaatacagtttgtgttttccctcatgttgttaatgatttttcattattgtatgaagtcacaagaaaattcacaataattttgatcaaagattggctgtaaaaagtcatcttgatgattatcttgtactgtatttttcaagtgacctcttctattgtcttctacttgggatcatgattgtatagggaccactataccatagaataattttctataacagggtcagtacaatgaaacaagttcatgaaatatgaatgcattgagtcctatattgatcagtacaggagtcatgttttcatattggcctaactcccttgttttttgcataggtgatggcttatgtgacaatggctgcagtggcagcggccgcacagtcagcgatgttcgccaagctggggcagccagagttgcagtggatgaagatatgcaacatgtatgggaaattctgcaaccaagtaggagaaggaattgccagtgctgttgtggtcagcttgagtactgtggtgatctcttgcatctctgctttcaatctgttccgtttgtatgggggtaacaagtcaaagagtagtgcaaggtggtgataataaggttatagtcttataaagattatatattacttctttacatatgatgtc

SEQ ID NO: 17781 - DNA, 7082 bp, Cannabis sativa
  modified_base (3164)..(3165): a, c, t, g, unknown or other
aaatacatcactttggaatcgaggtggtttcatgataaatatttacctaaatatgcacactgacatgattcatcctctaatgacctaacctaagcatcacacactttcttgtcacgcatgaagtacacggaccaagaggctgaagacacgtataatccacccattagaacccaaaggttcatagctatccacgattattggtatgcaagagaaaaaggttgtccccttttgaaatttcccacatgtccgttatgatctgtgaagaagattgcaagcctccgcagctctcaagttctgggtgcttggggggtaaatattctccatgtttctagaaggaggacaagtgtcataaccaagccaaatatgatcaactaaagcaaaatctggggcccaatttaagtaacgggcttgatccacatgaatagatgagtcgcaggtccattcaagatatgagtttcttatgctccaattctgatctctctaggttttgggacatcatcgcgtccaaagaagaagataataaggaacgttcagaagagctattgggatgctatcataagggcattccaagagacgccctagaggcataggctgatgtagcgatcttttaacaccaaatcccacaatattagggctttgttctctgtgtcagaccatcgaagtgtgcacactacaaaagggaacataacctttgtctgatggtgactactcagacatctacagtatgcggggagtgagacacgcatgccacctatcagcatcaaatagtccccagtcgtatggaagatcacagccccacaagttgggcttctatctatgggcctaagtcaatgtagtatatgtattttcccctttagtgggtcgtcacatgtaaaacctagtgggtcttgggtgtattatgatccctttaagcaaagggttgaaaattcaatactcaaacactatagcaaaaagctaggattcttaagcttatcaagaacattagtgtaatacttcaaggctacttatataattgactcgtgactaaggttcattaatacctaaaccacctaaaaatctccatctctatttcatctgattgatttgttgtcttagttcttattttattatattgtgtttttgaaaatcttggtaaacaataagaggaagatgaatttggtaaaatgtattaagcagtataaagggggacagttgatgattataattgtcctaattaaattctcatttttatttttaaatttttattcctattttcttgttatttcctttgtttaaaattttcaaaaattatttgaccaaataaaaacccaatactaattaacttgtaattgataattaattcttgtggaacgatacttggtcttaccatgatttattaaaaattatgattatatggacttgcatagtgattaaatttcacaacaaaatacaatctcatcctaagtgagactttcaagaacccctgctgaattcatagtactctccatatgaacaaaagtcacattatcactgcctttctcgttttctattctagcgttttgtccttgttccgtatttttcaaagattcaatcaactcatctagatcttgtttctccactccatgtacttctttaattgaggtgactttgaatataaatttcccatgaagaactccaaggatttttcctacaagcttagcattagaataggtcttcccaagagcatataaatcattagagatgtcatataatttagcatggaattcatctacggaatcccttttttccatattcagattttcaaacttagtagaaagagctcttagacatgatttcttcactccatgcatcccctcatttttagttttcaaattctcctaagcctccttagccaattctaatttgctaccacgtatatctggttagttgagaaaatattatatatagcataaaattttttgaattatagttgacttgctcaatatctattccaatgtccaatctgccatttgcttggcagatttaaccgcatcgacgaccttagagagagccttccaaacttaaaatacggccatctaataaattctatcatcctgtgctttcaagaacgccatcatttttgtctttcaataggaataattagccccttcaagtatagggagccttgttgtggaacctctaattccttgaacaaatcaattggcataatacaaaataagaaaaaaaatccaaaagattgaactatgagagggtgagattagtctaaaaacacaataccagatcaaaatcaacacagataaacgagcaagaaacttagatcagacaatgaatagggtatgagatcaatagaggcacatctaaacaaaaattaaaccaagaatcgatcaccaaagctctgataccaaatgaaaattaattaactacctaactattggatgattactgagttgtatgcacttaattaatttttctcagatttagattaagccataaaaataaagaaacttgaatttacaaggttcattgcaaccgaaaacgaattcaagctagctactccttgagaatttttagtttgggaaaaagatttaactaacaaatcaaaaatttcttccagcaactcctgaaccagatcaggctccttagttgacagcccttgaccccgcctctagatctcgcaacaccaccaacacaaagtcagactatccccttcatttaagagaagtttgaatcataaccctaccgagtgaaatttaagccatcacaacttaaactgaaaatctaacctctgaatacgaccccatcaccttcacacagtccgacagctgcaagagaaacccaccgagaacatgaccaccaaatatttgaaccctcctagatccccctaatgaaaaccctaggacatagatcccctctgccagggtcggaaaaactgccagtcaggccggtggtagccccaagtacgagaaaagaaaaggaaaacctaggcagcggctaagtattacgacattagtgttagttacaatttagttaaagccattcttttctcggttagttaggcctgtcttgaactaagctaagttagttatacctctcctatttacctctatatatacttctctacatgtaatattcaaatacacagaataataatagaagttaaaagcttttctctctctctctctctnnctctctctctctctctctcgcactattttttctcatatggtatcagcgaaaaccttggcaactgcatcaatggtgagaccctccacagactctcaagatggtgttcctccatccacaactgagcacaatcaatctgagttcaatcctaatgccacttctgcacctgtagtcaacacctctgttgctcccgatgagttataacttcaagattgcaatctcagaccgacgatgacatcctcgaacaagttcactattctccagatcctcctgttggtgaccttcatcaacctactattctgtacttcacccttcaactctcgatcgtttggctcatgaagatgtatcaagccctttcttcctcagtacaaaatatgacactagcctcattctggtttccaccgttctcaacggtgctaactatcaatcttggaaacgagatataacaatggcgctgatagaaaaaacaagtatgccttcattgatggcaccctacctcgacctacaactggtaatccccaccttatttcttagattcgttgtaacaacatggttatgtcttggcttatcaactctatttcttctaaaatagcaaagagtatcatgtattttgatcttgccacagatatgtggcatgatcttcaagaaagattcaatgaaggtaatggactctgaatctttcagctacaaactcaactcacaagtttgcagtaaggtgatcaattcgtcacctcttacttcacaaaatttaaatcaatttgggatgaattaaaggaattcgaacctaacatcacttgtacctgtagtaccatgaaaattttccttgattactacaattaaaaccaagttttttagttcttaacagatctgaatgagtcgtatgctttagtacagactcagattcttctcaatgaacctatccccaatatgtctacggtgtttttcatgatcgttcaagaagagagacaaagaaaccttggctcatcagaattgacttccttggcatcctctgttcgaccatcttcatccaccaatcctccacgctcaaaaaaaccacgaccctcatgcaccaactgtggcaaaccaggccattatgttgacaagtgttactttatccatggtttccctccaggcttttgagacaagaaaaaatcatataaagggaaatctactaccaataatgctactgctagccccaactcagacaatgtcgctgcaaactcccatgtagatctatgctagcaactcatttcacttcttagccaataacttagccaagcacattccgtgatgatccaaacactacccctgcaacagccaacatggttggtaacaaatctttcttttttctaaactttttcttggatcatcgacagtggagccacacaccatatgtgttctaccaaatcttgttttgcttcattttctaatgatgcttttccacaatatgtgattttacctaatgacactaaaattccagttaagggtattggtactgtcaagataaacaagcacatcactctcaataatgtgctctttgttccaacattcaacatcaacctatttccattactgcttttcttgacaacaccactaatcttgttttttttcaacatgattcttgtgtcatacaggctcattctccaaatgtggtgattgggatagctaaaagacttggaaaactctatgttcttctccaagaatcgcctcctatagctagttctggttgctctttgtttttttaaaataatgtagaccaatggcataaatgccttagccatccctcaatttacattttaaatacattcaataaaaaatatatattctagtttttccatttcacaaaactatcattatcatgttttccatcttgccgaacaaaaaaaaaatatcattcatatcaaacaacaactttgctaaaaatgtatttgatctaattcatatgaaaatttggggacctttcaatgttataagcatcgaaggatataaatatttccttacaattgtcgatgacaagtctcgatttacttggactttcatgctcaaaaacaaagcaaaagtccagacagtcattcccatgttttacaacctggtatgcacacaatactctaagcctattaaggccattcgatcttacaattccatagaactaaacatgcaatctttttatgcatctaacggcattgtccactaccattcttgtgtagaaagcccacaataaaactcagttgtggaaagaaaatattaatatctcctcaacatagcaagagcattgtgtttccaatctcacttacctcttgtttactggtcattactcattcaaattgccacttatttaatgaatataacttcttctgcactattccaaggcagcacctcttatgaacaacataacaacaaatcacttactaagatgttttggatgtttagcctatgattccactctaacatccacaagacacaaattctcaccaagaagtcgtgcctccatattcattggctattcccatggcatgaaggtatacactcttcttgacattaaaaccaagcaaatttaccactctcgagatttcatcttccatgaacacatttttcccctcactggtcaaagttcccatactaaaatacatcagtttttccaacaactaatcacttcagttcacataccaataactctagatacaacaactacaactactagtattaaaaacacaccagttcatactactaaggtacaaccaactaattcctcttctggttcaataattaaaccagcctccactactgaggcaccatcgagagacaatagctcttttaccacattggaccaagcttatgaagtccagtctatcacctcaaaaattggttgccacataaacagacctcctcatttgaaagactatgtctatcatactacatcaacaactcatcccattgaagagttcatttcttatgcaaaacttagtccccaattcagggttattgttcttgcagcatactctcaactagaaccctattcctatactgaagcctcccaattcaaacattggctacaagccatggataatgaaactcaagctcttgagaaaaataaaacttggacagtaatcaaactacccctggccataaagccattggaggtaatgggtatacaaagttaaatacaactaaaaaagagaagttaagaggttcaaagctcgtctagtagctaaaggattcacccaaaaataaggcatagaatttgtacaaacttatgcccttgtagctaagtttaacacactaaaattttttcttgcactagctgcaaatgtacaattgggaatgtccacccaacttgacatcaacaatgcatttcttcatggtgatctccatgaagaagtgtacatgaaaattccaccaggatacaatgccccacccaactctgtttgtaaactcaataagagtatctatggccttgaacaagcctctagacaatgatataaaaagcttagtaccacactccaaactgaaggttttatcaatctgttacacaactccctatttatcaaaagaataccaacaatactcctgtgttgatctatgtagattacataattgtagctagcaacaatgagtcggccatcactcacttcacacaattcttggacaaaaaattcaagctcaaggacattggctcgcttagattctttcttggcctagaaataggtagaaccaaacaagacatttctatatcacaacaaactttcaccctacaattattaaatgacacatgttaccttggagctaaaccagcctccactctaatagaacctaacctaaaactcagcaaggataaaggaaattttttaccagatcctaccaattacaaaagcctcattggtaaacttatttacctcaccatcactaggccaggcatttca

SEQ ID NO: 17782 - DNA, 4363 bp, Cannabis sativa
taaataaaattgtaaaatgccgtaaacaaaaccgaatagagtgtgaaaacagtcatttatctttttaagaattgaaacagtgttttgtgttttatgtaatatattctctctctcaatttccacgaagttgttagcccagccgcgttagcttactcggtaacacacagacttggtcattaagaaagaaaataatactaaaatttccatatgctccatgaacacaaaatcttaattgtcgacccaaataataattattagttcatctgttgtgacataataaaaaggtacaaatggccagactcatttgtctctctctctcttcggagtcctgctcttcttccagaacatcctcataaactagtacgtactattctttccatttgggtagttgttactcatccaaatatacaggaaagaaatatagtatttggttgggttaaagatgaaaagcaagattaactctttgttgggtagaagtttgatcaagacctcaaagttcaagcctttggtgagtctagccatctctcgccttgctgttctcaaaaaccagcgtcaagtcaggtgctcccaagcccgctctgatgccgttcacctcctccaacagggccaccatgaccgagctcttcttcgggtaagtttgatgtgacctctgtatttttggtttttggttcagacccagattttgattttctgtgtttcataacattgacaggcggagcatgtgatcaaggagcagaatatgttagatgtgtatgacatgatagagggctactgcaaccttttggttgaaagaattcatctgattgaacatgaaaggtttgtccttttctttttgtttgtatatatttgaaatttataatatctatatatgatcgatcaatctctaattttttttttgttgggtggtgtagagtgtgtcctgaagaattgagagaggcaacatcaggcttgctttatgcagcttcaagatgtggggattttccagagctccaagagattcgtggggttctcacatctcatttcggcaaggaattcactgctcgtgctattgaattacgcaacaactgcggtgttaatcttacggtactatacacacactatacaatataaaattactgacatggtatattatagcagcatgaatgtagctgatattgcaattttcatttttgacaattatggtgttattaatgtttttactcactgggtttttgtagttgatacaaaagctatcaaccaggcagccaaccttagagagcagaatgaagttggttaaagaaattgctgctgaaaatagcattgctctgcaacttgaggaacctatttcttctcccactcaggtaaagctataagcaaagattaaaattgtgtgtgacattgatactgacagacagtgatgtaatttgtttgaaaattttaataacttactcatcaacttgctgctttctcctcttgtgatcaatgaaggagttggatgtacaaaagaaccaacgccaaccaccaccaaacccatcttcttcgagttcaggtggaaccgggtcaggggatagtttgcacttcatgccagaagagatcgaaaacaatggttcgactaagggaaagaagaaatacagagatgttgctgatgcagctcaggcagcttttgagtctgcagcttatgcagcagcggctgcaagagcagcagttgaactttcaagatcgggacacgattcagataatcaagatagccctgtaagtcgacaaggaaagtcagctcgcaaaaacaagtccatgaaaattgaatctgattcagaagaagagaagactccagttgaaaatcaatctgctgaattgagttcactgtcttcttcgagttcagagaagataacccgaggcaatctttcagagaaggatgttgtttttgatgaggatgacaatgagacaatatctggaaacaatagtaaggttccatctaaattgcaaattccttcaagatttcaagcaggtctggtggtcgactcagctcaacagaactccatggaacatgaagctgagagctccgagactgggagtacaatgcgcttaaacttagagagagggccattatcggtgagaactagacgagtgcgagggtattgaggcttttcctggtacagtcttcatatgcatatgaattttgctagtgtggtgataacataagtatattcccttcatagttttgttttgttttgttttgtttcttcttttactttcacttattgagctgttcgatgtatattgccttttgaaagcgttatctttgtgctttgagcttttataatgaagttggaagtgtttcaaattggaaggtttctaagttgtgtacattctctgtgacccaggactaatattaccaattaaattcacatgtactggaaatagctttaagtgttaccatttctcaaattctcttccacaaactaaaccaataaccatacgcaaggcatatctaaactaaaaatagctattttttctttagaatactgaaaacaagtagttgcttcatgattcatgaaactgctatacctcaattaatcgtttacgaaactttgaattggataaactgttgtacatactatatacaatttaaccttactgtaaaggtttaaccttaaatatacataaatggtaagctattttcatgagtcatgtagcagtttagcctctaacatacataaatggttaaaccatattggattctgaaactccaatatacaagttaatagaacgcagaatctgcatttttcactagtgaaaaaagcaagaaaagaaccatatgtattttgtgtaattagctaagataagacaaaacaaaaatcgactggcctcgctgcctcttctaaccacattgtagaagctcaccgaatgactgtaaactcacgtcaacgttttcatattaaagttagttccgcgtttgtggaaataaattgtcatatataaagtgaatgagtggcaattggttttgagatggaaccccatccatattatcctcaaattctaacacttcatcatattcaagttcttccaacaaattttaccacctctctatttattattaccaaattcttcattgcaaaacacattctcaaaagtcaaaccagagacccttgaatggactgaaaataacaccttgaattccttgagattcttcggtaagttctcaataatagcaccccacaaatctttaaacatccttctacgctttctccattgacttattttgtcagtgtacaatttttcaacagatcttctgccttcaccaatgtaattccaccacgtaatttccagtttgtcctccatttctttgacctaacatatcgttacaaaatctccccaagttaaaatcaaagaaattttctaactctttcgtgaaacaaattccaattcaaggaatagtataattcaatcaacctccattcttagtttggcttcctttgcacgtttttgttccagtgtcaaatttgactgcaaacttttgatttctagagaatggaagaagttacctccttcaacatcgccaatggatttcttttgttcctcaagctgtttatgcaacctagcattttcttccttcatctgagtaagctcttcgctatttgggacatcgaattggtcttggccagcaagataaatcttgtgcttaccatactccttgaaggaaagcggcccaccatcagccagattatcaatatccagggctttttgtattgaagccttcttgagactgaacttttgtaaagcatcagccacgtacattttgtgaattaagcggccatggcttgccaaagaagcttagttgagcttaaccacgagaaaaaaataagactaatatgaaaagggaaatttgtgttctgtttgtttagaaagaaagtaaaaaaaaaaaaaaaaacaaaacaaatgattcttttctccatattgacgagattttattgtagctgcttcgttatggaagatatagaagaaaatttataaaaatattgagacacgtagattttaatatttttaatgttttaagtttataaaaataatgtgttaaagttttaaaattataaaaatatagtgttttagtaaaataaaaaataatcttacaacaacttaacaaaaaaatatgataacaactgtaaacaacaaaaaaaataattacaaatcaattgaaaaataacaaaatattgacctaatttcaataagtaaaataatatcaactccttaatatgtttttgtattactatttcttttacttagttttgaaaacttgatttatctttttgtactattatattattttttttttggctaattaagatttttttcctcgaactttgacatgtaccaaattatgtcctct

SEQ ID NO: 17783 - DNA, 3387 bp, Cannabis sativa
aacataacacatgcccaaagagtaaagacccataagaaccgacatcctttgatcctttcttccacgtgtcaactaacttctgcatgtacaacacgtgtcacgttacgtgtcgtcaccccatctcttctaccaattatgatcattatccttattgaaccttgtctcattttccaaatctatatatatagtaattcatagagtttaataaagataacaaagatagaaaaatagcaaaaattaaaggatgaagagtgcaaaggagaaggtcagcgacatggctagctctgccaaggagcatgtaaccacatacaaagccaaagcccaagaaaaggtactaaatatctacacacatatactatacacatatatagtatcatatatcataagaaaattttaattaatttgattaattattattattaggtagagaaagcttcagcaagaacaaaggaggagaagaagatggcagaggagcgtagaaaagcaaaagaggctgaagccaagatggaattacatgaggccaaagggagacatgcagctgagaagcagcaccaccaacaccacatcttacatcaagatccaccccttgttggcaccaccaccactaccaccactaccaatcccctccacggccaccatgccaaccccatcactggcgttactaaccccacttatcccactggaactcacttgccagggcacaagcatttgtagaagctttcaattcataatatataaaattaatatgcaatatcttgtttttgtacttttgaattggtttgtctttattttcttcttgtattaagatatacccttttattgtatgtgataagggcatctattttctctgtactattttttttcctatatatagtaagacctagtttccataaatttaacaatcattcaacaagcacttgagaattcatgagaatgaatccaaaactataggtccaaataaaaataataatttcttataatctgaaatcaagacacgaaaaataaaaattaattaattaattgaatatgactttttatttaattgaggtgtcgaccatgtatatatgcctttaaattaagtaattaagtcgagtgcatatttgttactccattaataataatggtttttgttttggttggaaacattatctaaaaatacggagaaatatacgcttaaagaaaaagaaaaatgggagaaatactagaagggtgctaaaattattcttaagccttattttgcagtgattctaaatactttcagtatctaataacaaaatagattaaatttttttaaaaaaaattatgaaaatattgtcattatatcgctcgatcatgaacttcatgcacaaacaagacaaacaatgcaatgaatcaagtcattatcgaactagtggttgtacgtaatatcacctgtttactcttcgaccagaacagccgtagtggctttatatttttattaagttaaaaagaatcgattagttgtacactaatgtgttctcaaacacaatctcttaataaagcttttgcttcaattacgtacataattatcttacttgaactggatcaaacacatcataagtcattacaaatattcttttttctctcttcttttctttataaactatagctcactaattattcttctaattatctctcttaaaaactggtaccatgatataaagggttagctatatatagcctttgtttccaaaacaattactgtcataactgacagttagttaaaatagttagaaactgttaaaagaaaacatcctcacttgatgaccaatcacaataattattcgccttaattattgagattaagagagagttatgtcattaagatttgaagttgaactggtcttgaattctcatctagcacttgagggtgtttagtaagtctttatctaaactaattagctaaactctcatacttcgtcatcatgtctgcaagattttcttttatcccaaattttttcacattcacttccttctctgctatgatgtctcgtataaagtgtagtttaatatttatatgtttggacctcttatgaaatataggattcctcatcaaatgtaagtgcactttggttatcacagtgagctgctatgttttctgatttgaaccccaactcttttgtgaaacctttaagccaaacaacttcttttatggccactgttgcagtactaatgtattcttgcctctgtagataacaaagcaaccaccttttgtaggttggatttccaactaacacataaacttaaaattgcaaaggcatgtccagtgatgaattttcttgtatctatgcttccagcatgtttgaatcgacatagccatttactttaatttcatctttagacttgttgacatagatgtttattgagattttaaaaattaataaattagagcttaagaaaaatataaaacaataaataataaacatataatttttacgtggttcggacattaataatccctaatccacaagtccgttgtattagccttgcaagcaagtgtttgaatattacaagtgtttacaatataaaccctagctctgtactccttttgcttttcttgaagaagaagaaagctagtagaaattttagtagaggttcagtaagtatgaaaattgttcaccctttgtacatagaaaatgaagttatttataggcttacatgtgggtaagggcattctctttacttacctaggatttcgtactactacttgttgcaagagtaaaagaatacaactggaaatctgaccgtcctacattgaagaaacttcttgatcatgcggtgtgcaaagccagtggctagtactatttggatataagaaacatattgctcaaatgtttctcctttaccgaacactctctagacaggtcgttgggcaaaaggcatgttcagaggtgcatatacatattactatggactggcatgggggacaagatctgatcttgtgtcagaaaaagtgtaactgtttgtaggtcgatttccatatggaactgacgtggccattcaccttgaggtagcaatcacggtccgcaaccagtccgtagaaatcttcactcagaaatcatttacttgagtcgtgttccaagacttcttggagatggagacgaatatggttcttctacgttccagagatgctgcttgagctggggacgactctccccgtcgaatatccataaagctcctcccgaattaccaagatatctctgcgaggaaaattaatagttaactctgctaatccgggaggttgacaaatctccttctctaatcatgctaggagcctgcaaccttttctcgaaaaccatctctgccaacactcagttggcaccgaccaacacggcaacaaccaatgcaacaacaaccaacatcaaaata

SEQ ID NO: 17784 - DNA, 5107 bp, Cannabis sativa
aaattctaattagcttaaaatatatcttggggtcatcaatgatttttggggtttaattgttgcaaatagtaatagtgcctatttaaattaaaattgtagtcatttttactaaatttgtttatttttttggggatttagttgtaaaaaatatttgtagattttttttgatatataattatcaaattaaaataaatatatttaattttttaactgtgctttttattaatggggctgtaccatatgatgttagtagtagtacatacacaacaattattatcactattcattttgttgatgatgatcttaacaccaactatttaattttattatttatgattaaataactttgaattgaatagtgaatacaaacaaattaaatgtttcacttgttatgtgttgactcgatctattcatttttcctttttaatattcgatgctttagtgttatttatgtaaatagttagatccactaattcttgacaatatattattttacctttattgaattggcattagaatgaagatggtatattaaagtacaagtacttgatgctatgcaccatggctttcattaagatgactaaagtatttatatagttaatttgtttatgtatagtaataatgattaccatttcattcaaactccaaattgagtattactatctttaaacaagttaatcacttttaacttttgttttactttttaattattttgggttaaaatatatgtatgtgaagtcgattgagatgacattaaactgaaatagcaatgataaattaaaggactactttttgtgttcacatctttattattattattatgcctatgaccccccttttttttaagcaactttataataacactactactcttcaacgtggtagtgaaatttgtattttgcaaaaaattggcatatggagaaataactgatcttgtatatatacacatcaccaaaaataataataataaaaatatatttttttttaaaaaaatgattgattgatttgccaagcacaaggccaaattaagcttgtgcctgtctatatcttattttcatgtgttttctaataagaattcttatctcttgatccatcatgttcatgagcacaaacgaaccctatccttgaatttgaaatggcttcaccatgattgatttgctcttgacataccccaaaaacttgtaacatccaataataccaaccattactaaatagctccctttagtcagatcgccctccactatatacacatgttacaatcgaacactattgcaggtttcgattgaaactcacaactcgagtcacgtaattgtttaatcgggttagtcagtaccctataaacaactgccaagtagcagttgttgtagccttgtagggtcttgactaatttggtgcaaccacatgactcgggttagaaattttatttgggactaatgattttttttttaataagttatatttaaatagtagagaaaataatagaccatcatcctagtccaattaaagtaacagtctcttataattaatttggaatgtaatatagttgtaagttgaagaaaataaaatatgggaaagaatatatactttagttaatttataagaacaatttccatctacaattacagtgttattagactttaggaattttggagatggatggtgactgtcaccaaattaattaccaatttgatctttttccccatctttcttggtgatggtgactttgttttcatcatctatatatcttttcaacttatatatatatttatatttatacttatattttggtgttatcccacaacactttagcacttgagattttatgaaattgatagcttaattaagaccttcatgtatgaaattgaccatatataattttttaaatatttttccctttcatatattaataatcttaattaattaatagctgagttgtaagatcaagcaagttatataccaattcaaattgtttgtgtcaaggataattaaatttcaagctttttattaaactcggtgttaaaaatttgtgcttttttcttttcttaggatcgatatataaaaaataagcggatcattccatatattattttttaattttttaattttttttttaatttttacggtttaagttgtgatgatagttacttaggttaccctgttaattgttctttgtattaaaaatgataaaaactcctaaaaaaatatatattacatatattgatatatataatatttagcccaataatcgtatacattttatttatatgtatatatagattgattataaaatcttggccatattataatttttttgttgttgagaatattggccatatattatacttgagagagatacagagagagagatgcacgtttcttaatttataaattgatgaacaaaagaaaaaataatattgcataaaaataagcttgatcaatattatataatgatcttgaaattgacaataatgacttgtaataaaaacacaattatcagctatatatacacatatatattaccactaaacttaaagctaaacaagttagcttaattaaagaaattacatatataatatcatacaattacaagcccaaattaaaataatagcatgaatattaatattactagaaattaactcttaattgcatgttacgtacgtacgtacacgtactgcgatatataatatgttacatatgaaataataataataatatataaaccaaatatatattcttattaattaggaatgaaatttgaggagaaagcatcaagtaagttaatccaattctcatcatcatcatgatcatgattattatattgatcttcctgatcttcatgaatcccattattataattattattattattattattattgatttgggtccaatagtactgatcatcgtcttgatcttgacctaatatctcatcacaatttctttcaattatttcttcatttcttgcaaatcgtccccttatgcgtggcctactatctgccaatgttttcctacatgcatactgaaaaataatatacatgaaaatatattaacacattttaattaatattcactaataaaaaattaacataagacgacacataacaatatgagacgagaatttttataaaattgtcgtctcatgttgaaaatagacataagacaacggatttaaaaaccgtcatgtcatgtaaagtaaaacttacatgagaattttatttgtactaaaaatttataaattgattttatttagtatgtaaaattaatttattatattttttttttctgcaaacattctctaaaacttacatgtataaaataaaattaattttaaatatttaaaataaaaaaatatataaaattttattagagtaaaaataaatatatgaaaagaattaaaaattattgaaatataaaagaatatatatgaaagaaaataaataaaaaatatagtaattttaaaaattaatttttgtattagtatgcttatataatttaatttcttggagtgtaaatgtaatactcattatattaataattatatttttcagtttttatatatatattttgtgaattgggtatatatattgaacttttaataaagggggttttctttggccgcccgacttatgtatataatttttttttttagaaaaaatcacaataattattctattttattattggtctttaaaattagtccactccctttagtaaaattttcatttctaaaaaataataaaatgaaaaaagaaaaatccataaaaaaaagaaaagcaaatagccattatgctttaattaatgaatttagacgtgaaagtacaatctatacgatagattcttatgtacctaaccacctatatatatttaccaagtataatggattggattgttcaagtccaaagataaaaagtagtaattactatatacaccactaataataataataataatttagaaattaattaattaattaattaattaccttaattttcttgttgaagttcctctggtttctcttgcttctatacctctcaattctctcttttttctcttctggactgtaacgacatgctttgttcatcccttctatgattgcattactctcactcgatattgggctctcactcgatgaatatcgataactatgttgcatcatcttaattctctgtttaattataaataatatatataattaatctcatatataaaaccacaactatattcaggtcgctcgggtttgacacgaacacgattcgagattttaggtttgacatagttcgagttcctattttgtgtcagttatttaaaataaatttgagaactccacaaacacgatgacactaaaaataacacaatatgaaattttataattttttttttattcgttttaatttaataaataatataaaaaactgttaacctgcaagtcaccagtgctgtagactctcctaacagagctggtttgcgagtcaatcaacaactcggcgactgaggaaagagctcggtgggcaccattattcttattctgaagggaatgactgctctcgctccgctgaagatgatgagctgccgccgagcccagtgagctcggcgagctgtagctgctgcagccgctgctagcagtactactgttgctgacgggctgttccagcacatcttccagctggggatggtacgccatcccttgatgatgaaattgaaacccccactcgctcggtccattatcggcggcgcgtgtgtatattgggctgctgtagttcccgtacatggcgcgtgatagcccagtttgtatattgtttgagtagcgagttagtgagtgaagtttttgaaagtgtgagcttgggtttatatgtattatgtagtaatattattgtgtgtatataaagagagagaaagagagtggaggtgggagtagtgggccaggtgaggggtttggaagatgacgtggaggatgacgtcataggttggttttgagagaaaaagcgttgaccttgttattattattaataatattatgatgataaaaaaaagagagaaaaaactaattggggtaccccaacgtcgacctctttctctctaatatttctctttctctctccgaatctgg

SEQ ID NO: 17785 - DNA, 5672 bp, Cannabis sativa
  modified_base (5266)..(5273): a, c, t, g, unknown or other
gtcatgtggggaaagactcggtgatcgtggcaagagaaagagaaacttggtattaaaatcagtgccctaacatggaagacattttcttttcttttttagctgagcctgtgagaactgagaactgagaatgagaaatggagtctttgaatcgacttgcacccccagcgcgggcggaaactaatttggacaagactaggaaaactgactgatgtttgtgactaaacttaagttttctttgtttacactgtaaatagtataatgcacctccttattatatcttcttttagtattccaaataattttgtagttaaattttttgcatggtcatgtagttatttaagtaattttgtaaaattttaagaaattcggaaaaatttaacacactaaaaataggatttaaacaatgtgttgcatgagtgactattttattttaatgtttcaacattacttactatattataaattattcaaaatttctcaaaattttgtaggatatcttaaatagctaaatatacacgaatatgaaaaaaattagattaaaaaattttttttgataccgaaacaaataaaagatacatcaatacatccctttaaagagggtgcatggtagaatcacccaataaaaaatacttctttaaatattttttttttattcttcattatttaagaccatcgctcaaaataacaaataaaaaggctgttccccaaacccatgcataactcggttagcaaaacgtttaacaaatcataacacacattactcgtcgaattcaataaattcttacaaatattatgattgaattgatgagaataaactgcggtataaaaagattgctctcttttgtttataaatacttcagttcattatatatcatttgtttattccttattcttggtcaacaaacaagttttagaagttacaatactaatgtttgtcccctgcttcatgccatcaatgaatagttatcattggacatttatttagatacattttttgaacactcatcagtttaactgttagaaccaaaatgctcaagtgtgtttgcattcggttggaagtggatgcccacatagcaatggatttccctggaaaatggtggcatcatcgaactgtgggagaggaggaattctcccttcaagctcattgtatgacaagttcaagtgtctcaaagaaatcatgtcagtaatgctctgaggaataggccctgcgagatgattacgcgacatatcaagtgtttctaacctttttaagtttccaatgttgcttggaattcttccactaatacgatttctcaacagattcaagctttgcaaaccagaaatgtttgtaatttcatctgggatttttccagttaagtcattccctgaaaggtcaatgctattgacatggccaatgaagttgctatactcaggtactcttcctctcaaaacaacataaactaagttttgaaacacttcactgctcttgctgaataccaatgctgtcaaattatccaaacatgttggaatgacctctgagaagttattttctgaaagatctaaagtatgaagattggaaagactgcataatgttgatggaataaagcctgagaatttgtttgaattgagtcgtatcatgaaaagcgaagacaaaactcttccttctatccatgatggtacctttcctatgaaattgttcatgcttagatcaattgtggtcaagccagtgcagttttgtaaagaagcaggaatttctccatggaaatcattgttgcctaacatcaatacactgagcgatcgaagtgaacttattgagcttgggattaaaccagataagttgttatttgttacatcaaatccccacaacatgtatgaattgccccaacaactgggaagctcaccagagaaatgattacttctcaaagaaagaacttgaagactatgcagatcacataaggattgagaaatttgaccactaaggtggttatgagacagatacaacctttccaaccttggcattaattcagcaatattttcaggaataggcccagagaaagaattactctcaagagatagctgacttgcattaaaagaccaatgtgggaatgccccatcaaagtgattgaaactcaaatcaatactattcaagtttggaaatttcaactggtgtggcaacttcccttctatttgattttttgataggtcaagttgggtaacttgaggagctaaactcgagaaccattgttccggtatagtatcagatattccaacattcctaagggtaacagatatgagttcagtttgaacttgaatccaaatggaaaaagtaggacctactttacagtttaagatttggagggtattaagcctgaaagggggcagccatttattaggaatttcgaaaacaagggagttgggttcatctaatgtaattctaagacttttcaagcttttgagatttgacaagtgggttttggtaaggacacctccccaagagttcattaacaggtttgcattttctagtttagagagttgcccaaaacttttagcaattgtcccattcattttgttgtaagagaggtctaaaacctctaaggatgagatgttcccaatagactcaggaatagaaccaaaaaaggcattgctagataggagaagatgttggagatttttaagctttcctagtgactcaggcaacacaccatctagagaattagaacttaaatcgagtgtttgtaatatattgttatttgagacactgtttaagagttcatgaatccccccagtaaattcatttgcagaaagatctaagacctttagcttggtaagatgtcctaaaaatcctggaatatgaccctcaagacccaaattatcagatagatcaaggacctctagagatttcaaatttgtaatctcccaaggaattgaaccctgaagaaagttccaactcaggtgaagtgtcctgagactggtaaggttgaacagccatagaggcattggagaattaaaggaattttgggacaaatcaaggactgaaagggaagtgaagttgatgaaaggaagtgaaacaggtaagccattaagttcacaaaaatacaaatttaaactcactaatgatggaagcaaattaattttttggagccatgtttctccaaccccattgagtttgacatatcccaaattaaaaagtttcaaggaagagaggccagagatccaattcaagttgtcagcccttaattcccatgatcctatattgagataagaatctgcatagaggtctagaaactgcaactttgacaaatttccaaggcttgaaggaatcaaaccagagaatgatgcaaaagaaagattaagatactccaaatttaccatctctccaaagaaattaggaatgggaatcccttgaaaatcattcatgctcaaatccaaataattcaagtacttcaagtgggttaaagaagtacttacattaccactcaaacatgaccttttgtaggcactagttgggtcatcaagtccactattgtagactaaagagaatggatttctgagattgagctttgtgacatgaccatgtccttgagtctgaatgctgctgcaaccaattccttcccatttacagcactcttcaccaacccatgaagacaatctatttgaaggatcaatgagtgaatttttgaaggcaaggagtgcctctttctctgtttcaatgcatggaacactaatgagcttatcagctgaacaaagttcaattatgtgctgatgaaatagagcaaaaaatgagagtagcagagttaagtgagccaagttaacagtagcaacaatggttttcatattgtaaatttcactttcaatgtagttagcacatattaattgaaggtgggagatatgaagagagacagtcaagttcttatagtggtattcacacagcattagatatgcatcatagtctcctttcatcaaccaacttataaatatataaatatataaatatatatatccacttatctagtggcaggagcatttactggtggtttaattaatttttaatttgtttcattccaatttataacaaggaataatgatttcaaatctttgagtctttgatatcaccatacacactactctcccataagttatgccatggcttagtggcttatagtgccatttatattcatatctgaagtggtgagcacatcaaaacgtgtgctcgcattatgttttcttttttactttcactgcctaaaataaattggcatatcatttcatataggtttatagataacttttcatattgttggaattttactaatttattaaagaaaaatttgtgtatttttggtagaattctactctattttggcatttagaaaaatattttaatttattttttttatttcataattttgtacgttgcagtcatttaagatataaatttttaaaattttttaaatagtttacaatgccaaaaataaaattcaagcattaattaccatgtgtataagaaaaaacagtcacgagtgtaacaaatatttgaaccctattttcaacacggtacatgatcattaaaaaaaagaccaaaaaattctccttaatgccaaactatgttatccgtgttttcggcaagggacacgtggaatctaggtcaacaccaaagacccaccagtaggtcccaaggaagataatttgggcaagcccaagtcacacagaaccttctaagaatgcacattggttccatgaccaaatgggctttcgccagtgacaagtccgtattcggaagcaactctagtaccgtgatgtcgaaaggtcagaaaacgtgttcctagaagatcaatccagtttctctttttattcaagcacacagaataaaaaagtaaatgctactcagatcacgacagaatatcgtatcatgctaaaagaaaaaactacctaaaatggagatcaaataattaattcatgaataattatccacaattataggacacgattttgaccaattcaatcatatccaatttgtataatcagcagatgggctggcttcacgagagcaacccaaattatgtaatttcatgtaaactttccttgtgctcatcttgaaactaccgaaaccccaaaatgtaattacctcacaaaaacacaaaacgcgcacaagattcccgaaacccatatcggccctaagggtaggcacagggtcagccctaggtataggcgggctaggcccgcacctagggcccactcattttaggagctcaaataaaaaaagtatcttttaaaaaatatatatatnnnnnnnnaatttttaaaaatactatttatctctatagtaagggcccaacatttttttatctaatgatccatttcaactcagggcccaccctgcgtagacgagctaggcgtacgtctcgagccctaaaattatgaaaaaaaaattattaatatataaataaaatattaactaagataaaaatataacaaaaattatttggtgtagtggtaaataattttactttaaattaagagatcaatggatcaatttccaacctataattttttatttttttaaaaaatatttaatgtgtagtaatgaaagattgaactttggagctcttaagagtttttaaaatttttaccattacactaaggcggcgtttggttgggaagaatgaaactataggaataggaatgagaatgag

SEQ ID NO: 17786 - DNA, 3297 bp, Cannabis sativa
  modified_base (2419)..(2431): a, c, t, g, unknown or other
aaaaaaaaaaaaaaaaaaggccacataagtcatgtaatatatgagagaagaataccagataagtctttgcccgaatgagcttgtgcttgcaactgagcagcatgggcttgaagggcttgagcggcaacaattgcctgagcagcagccattgcagcagcagaaggagccatggggacttgacttacactgctcatgctagttgttgcagctaatgccgtcattagaaggttgtgaggagggtgattcaacttgcaatcagttttggcacaccgaccattaaggtattcccgacaaacttcaccaagagatgctccaatgccaggtaaaatagccccccctaaagcaccaggaatgataccagggatcattcccagtaatcctggaaatgcccccgaaacagatgcagtataatttggcatattgggcatggtttggttaactaaatttggataattagatgatggagccagaccaagtagccccccattagatgtagtagcagtagcagtaggagtagttggagtagtacctgcttagcaaaaagtaaatgttcagattagtaaaaatggcatacatagcaatgctcttcacaaaataaataaaagaaacaaacttcttcagctaaaactagcattcataagaagagtcatcaacaaactacattatcctaagctatcaacaatgatagaggaagaaaatttaacacataccccatttggcttaactaagtaattttgacatctttagcaatatttatacatcataactattttacctcacctaacatggaatggagtgctcttagctgtaagcaaaataaaaacttatccaagcaagacctttaatatttaacagtaagcagtagattaagaccgtttagtaaaaatactgtgaaaatttttattagcaaaataactttacaaagaaaaattattagcaaaataaacatgaatgatcgcacaagcgaccaaaaattacacagtactaccataaaacggccattatgcttgcaaagccaccatagatttacactgtgactgtccaaccatcatggtcagataaagtaaatcgattccggttattttgcaaattttactatttcacattgttagttcgacaaatttcccgaactcgcaaagcgaccacagatttacactacgactgtccaaccatcagggtatcataaagcaaattgagtgtgattactatctcacattgttagttcgacaaatttctcgtaaattaagctacatcaaaaacaaactttatgtacctgcactgaagaacaccggaaatggactacccataattggtttcccattacactcaatagtaaccatataatttcctctctttggcaccacataggtaactgtataagtcccatcacccatgtccttaaccaccccttcttgctccgatccaccaactccaactccaggacaaaccttcaccttaatttgagcaccaccattaggaaccttccttccatcaacatctttagtaaccaccccaaatgacgacggagcacaagccgttccaccggcgattccagccccagccgccgtacacttagaaggatccaccggcccaatgggcttgttcgacaagtcctcagcttcttcgctctcgctatccgatgaaacccctgctgttatatctttcacacgattcttttccacgtctttgaatgtggcttcgaaagcagctttagctgtggcagctttctcagcctccctcttgatcttcgcctcctcagcttgtttcatccatatcggttttgccaaagcagtattattattattattattattattacgatccgccattgaaatttcagaaagaaaaaggaaaatcctaacctaattcctgaaaacctaacaaacacgcgaaaaccctaattcttcaaacgattagcagaaatcagccatggaaatagttcgaatccctagaatcgaagaaaaccccccgaaaagaacaatttagtgagacttttttgaacgttttcgcgggaattttctgggaacccaaacaggaaaattcggaaattggagtttttgaggtttggaaaaatggaaaggtctctctctttctcaaccaatctaacactctcttgtctgatttggtttgaagatagggcaactagtttatgatgtgaaattacaattttgccctcaaacaagggggtggcaattcgtgttcgtatgttctgtcgattaacatgaatacgacatttataataatagcatctctaatggttaaattttagaaaatgctcgcttatgtaaatttcttatttgaacgcgaaaatattatatcattaaagttaaataggtgctattatagaaaattgtattgaacatgagattgatgctatctttttttaaaaaaattaaaataaataagtagtgtgacaatnnnnnnnnnnnnnataaataatatattaaataataatttgtgagatcataattatagtatttttaaaatgtgctatagtactgggtgtttttagaattaagagtgttaaaaataatgtggaagatagataaaatcaaatattatattttttttttggatgatgtggagatttttaacacttttaaaaaatgtaccattgaagatgctgaaagcattacattagttacattaatggtgctcaaaaccttttaaaaattgcaacttatgtgagaaaaatttattccttagaaaaactaaataataaaactttaatattaataatataatccccaacttttaatcttatcaagagaaaacctataaaataacaaaaaaaaataaaaaatagtatctaatattaaataaatatataaaatattcataaaaaaatattatttaaacataattatatgatttaaaagctaaaattaaataatgtgtctagctttttattttcacacaagactattgagattgtgtgggctttaaaaagataaaaatgattagatattttatttaaaatatatgtgttatttttgaatatctcaataaatttatcagctaattagtgaaaatcttaactttttcaaataatttgtcaagattggccttgtcaaacaatttgtgagctaactagtgaaaatcttaacttttccaccagaaaactagtactcccatgggcaaagtcacgtagagctaaagtaggacggtcggttcttctaaaattcgactcggttctaaattatttgagacttatacttaaataattattcaattatattatagggcccgtttggtatgcagaactggattggattagacaggctaatttgtccaatc

SEQ ID NO: 17787 - DNA, 6028 bp, Cannabis sativa
ataaaatgatttctgatcttttattaattagtaaatttaattatattgaaatgggttttatttagggcacaaaatccaacactcgggtgcaaggtttgatgtcgtcgacgggcatttggttcacctgcgttgttcatcttttctgccgatatttggcttgtggtggtggtgtttgccgagggttgttctgattgactttgtttagtaagatttggtttgaatattcgtggtttggattgggggttttgatcatgcttccagatgcagcagggaggtggaggacttgttgtatattgtggctgtttgggtcagttccttgcgagagggcgggtttagagagttgaatagaaaacttgtgagtttttgattcatggcttacaaagtcttttttagtgtgttgttttattttttatgtttatttttattacctttggttttattttcaataatggggttgcaacactactttactttaatagtagggattgctttaattatggtgatggatcttcaccatattctgatctgggagattcttcattgaccctttgttttgttttttaattcttttgtaagattaattattgggattttgtgccctaactaaaatcctatttcaatgttatcttgaatttcattatcaataaaggaacaaaattattttattacttgtttagtataattcttggtcaacatgtttatttcatgatcatatgtttgatatataacttctattaattccttatcacattgatatatattcatgattattgtgttgtctacacagtgaaaaataattaagattatgtgattgttaacgcagatttttgttaactaattaataagcccttttcgtaataaattaagcacataacttataagaaacttgataagaataataatagtaataatgataccaggttttttacgtgattttacagttaactctgcatagtccacgagtctatcttattcaagatatttttggatacaaagttatagttttataattagtgatcttttctctgaaagattttttgtctccttttctgtataatctgttcctatttaaaggaaaataagttggcggttatttacacttgaatttgaaatacataactgttttcacgaaacgtggactttgaccacgttccattagcatacaaacttggttagtatgatgaaaatatgaagctaattctagttccgcggtatttgaatgacaaatatctaagaaaatattaccaataaatgtaaaaggtctggggaccacacaattgcatggtgctcaaggtttgatgaatggctgatgcaaaggtctgataaccacttttaaagcacggttcatatcagcaatcattgatcttcagtaatgtcttttgcacggaatatacccttcagaagtgataaaaggcccacaggcagaactgatatgaaaacgatttttttttacgttactacatgggagtcctaggctcttgatgctcagcggccaaagttccaagattctagatggcagaatccagatcggtaagcttggtcttctaattagtgcaaaaaaatcattttcccatatctttaaccttcctcatcttgcaatacccaaccatgtctccatgtttgtcatcttcaagataactaaagtaagcctttgggttagccttccaaaattcataaaacacctctgtaacagttgtttcataatactcaacatccttgacatgagccgcccattcagcagtaagttcttccttaagagcagacttctcattcaaagaagattcctctttttgctgaaaggattcttcctttttcttaagagccttagtcaactcttagatctgtgtttcgtggttttgaagaattgttcgaaatccttccctctcgtcagtgagctcccaaactctctttgactcttgctctaagtctgcttcaagcttggcggtggatggcatatcttttatttgctgctttaagtcattaatggacttgttcacaacaacgagtaacttgttcacctcaccaaactatttttcctctactcaaaatcacctttggcttcttctatgaccttcttcagatcattggtggtcgtactagttttgagagatgctgacttggctcgagaatatgcatatgccaacttcaaatcagtttgaaaacaataaaacaaattagaaaagttgaggtagcgaactgtacaaaagtttcaaagacaacaattataaacctaccctggtcgtctcttttaaaatgcattcgatcagaagttccaccgataaggcattagtaccgatgagctattcattcacctcggccattacacagtcctagtagaaactgagcatctccttggctttctctatttcaagctaaatgttggctgtgatagccgttggtctggataaattatgtgactcaacattggtaacatcacccccaatcgagcctttagaagatttggaaatctttggctggacggtaggcgggcaaaccttagaataattcttggcttggagaggagagtttgagatatctacgacaccaacttctcttgtcccggaattcggtgctactgaagtttctttagtgttgggacaagcagttttggagctcaaagaaatgttgatcggaagagtgtatccaaattttgactttttaactagatatatttggctagagctatcaccgaccttcctttttagcatgcttttcaacctggtcgacatggttgcaatgaaaaaaaaaaatacttgataaggttttatgtaaataaaaaagaaagcaaggctaaaaactaaaaagggtaccttggacttcaagaagaacaccatcccaaattagtaaggatggagcatccttattggaggagtctccttgatctagttcctcaattattggcttccctttcccagtaaccacttgggtagcaagaagggctgctacttcagaattatctttgatcaaaatagaccattttattggaccctaactttgcttcttaggatttttcttcttcttattcttctctggaacttcccgctcaggagtgggatccttagctactcgttcattatctggttcctcttggacggataaagtctgtactcaagaaagttttcagtactggccaagatagagatgttttgagcagattttgaaatttgaagaattatttgagccttaaacctcaaccccaaagtgaaagggggacaaaagtaagttggagccaactagaaggaaagatggtcggcatccatgtccttcacaatatagtagtcttggaggaagctaccaatcttttatatgtccttgtgcattgtaccactctgccattggtgctcattttaggaaaaaatagaagtagcctaacttgttctaatttgggctagactttaaatcaaagaatcaatttgtgtcatgggcagaaggttgcccccacccttgcttggcatacaacacaaatagtacggccagatacttatttccctttgggtgaacgggtttggggaaagtttatagtaattcacgatctttttaaagtacgaatgcagaggcaagattgcaccttattcagcatgaggtctggaccacacacagagaccctctctagggttattggctagctttctaagggttagcagaaaggcttccactttgccataagacctttgtcataaagatttttaagcctcttgtaggtaagactgaacaaagaagaatatgcacggagttgaggttgggtctcgtaaaagaggtggataaaatcactatctatccagtggttacctctccagtattctgcagggttcatctacaaaaaaaggaagacaaaggagtaagaatcagacaaaagcatgaatttttgaaagggtaaaacatgtctatcatgtcgacttggataatttaaaaggaaaaagaaagaaatttcattcaaacaatgaaattctcaaatagaaggttcaacgaatgacaaagaacttggacaattcccagaaaaccctcaatagataatttcaaatagtttctagcaaaacaacaagaaaggctacaaacttgaagtgccctaggcatatgttaatgttaagaatctaaagccctaagtgtacataatctcaattgttcaagagacatttaaagaatctagaattcacagagcaatcctaaaatagtaacaaatgcatttaaagaaaataaaaagaggaaggaaaacttgctcacgactttgaagcttttgaatgtgcctggacaacttgtgcaaattaagcttctaggaatgaagtttttgaagatttcagaaagaaaataattttatgctctaatgtctttgagagtaaaaatggctaaaagagtataaaataatttttgaccctttatataaatgctcagaggggtaattcagtaactaaagttcaaatttggggtttccgccaaaaggtataatcatcacatattggggaatgcatacgacaacatgtgatactcaataactatcaatgcgtcgattgaggtccgaatctcatgactagttagtaaataccctaaatactaaagagatagtcaaatgtttgctatttttcattcaatcacattggatcaagacagagtctaatgactgaacacgtgttaccgacccgaccagcttagtggctgaatacgtccacatgcgagcaaaaagttcccacacggacttgggggaaaatgttatcccatttttgcacaagtaacgtagcatccatctgagtgacacgtagagaatatttcataacttggatgggcaatatgcttcatggtgtactgatcgaagtgatttgttactcataaaaaattgatttgaagaagaagctagaatattcaaacaaggtttgttataccgtccaaccagcctccatcttacaatcagtaccaatacaccgagccaaataaatgtggctgaaataccttcaaggacattccccctatatgttcaagcattcgcatccttaattttgtgagatagatttgcggagacagggaaaatgaggaaatcccttagtttcctattttatttctctcgattttggaaaatagttgaatttccttatttatttcttgtttgggaaacaaacaagatgtaattattccctataaatagtgaagtcatttcactatttagggatccaaaatttttcattggatagagcattcaagctactaaattctctgtaaaagcttttaaggaagatcaagaacttcttgcttcttttctcacaagttagtacaagtaaaatgggaatagactattaccactatgacgagtcgaacctctataacaacttcgtgttcttattgcttaattattaatattaattatttttaatcactttaattgatttattatcgttggctaaaaagtaaggtcaacaaaggtgattctcctaattagctaaattttatttagattttttcataaaattaatgttattttcaacaataaattgttaaaatactaatctaattctttataaatttaaaatattttatttctttttgtagctttaaaatatttattttattttaattgattatgaaattctaataattttaataaatgaaaaaatatatatttttttacaagtacttaattataataaatcaaaatacataaaaaaaatttgcatgccactattctttgtgtaggtatgagcaagaaaatctatttctttttaaatgaaatatcaacttcattgaaatagcttagcattctgagtacaaaatattttggaattcaactgaaataggaaagtccaaaatgctacaatcagcatgaaactgagagtgcctagcaacaaagtttgctactcgatttgttgatcgtctaataaagtgtaaataaatattgggtaaggaagataaaattacttgacaatcgtgaataataaaaccaaatgtagaacccagtgagtgattggttcggattgcttgcaccatgaccatactatatgtttgaatctcaacgtgctcctaatgtttggttttaatctagcta

SEQ ID NO: 17788 - DNA, 3351 bp, Cannabis sativa
attatattaaattatatgggtctcgatactaaattacaccaatagcaatattgacacgtaagaaggtgcttggcaccactggtaacttttagcatttttcttttattatctatcttgcactttgatttaggctgaatttttttagagagagattccaagggaaaaggataacaaaaatatgaaatatgtttaccatgaactcttgtaaccctttctttatgaataacaattatataaaaaagtttcttttaataaaaaattcttcacaagatacttttaaactcaaaaagtccttttaaagaaaattctaccttctctcaaaaggaattttatttcttttaaaaaaaggattttttttctttttttttttttcaaacacttttaggaggtaattaaaatgtatattaaattatatgttataaaaatgaaattttttatgtaaagatatctaatgggtttcttattaacactattagtaactgaaaaaaggaaaaaaaaaacaaaaaacgttagattgaactaatgtcatatgtcaacaataataataatattatttttataaattagatacaaataatatatattattgtaaacttcacaagcttaaatgttatttagtttcaatgtgatttaagccgaaagcaaaaattgagcccactatatcatcatttagtgagacacatttttatttatcaatgtaaggtgacgtttggttggaaatgatataaatataagattaagagtgagaatatgaatgaaatggaatgaaatcaaattttaaaacagataaaaaaaattgaagaaaaaaatattaagttttttctcatttttcgttggaatgctttccttccatttcaaaatggaatagtcatcccaccaaaataataaaaaaattattttattaaaaatttagaatgatattctaatactttaaataacaaccaaaaaaaaaaaaaaaagtaattttccttccattttattacctctaatctaacgccatctaagagatatattattaagcacatgcttcttctttttagtaatttaagatcattgttagatgatctagtaagtatattatttaaatttctaaaagtggttactaatcgtatatcaaacaatcatatagctacacatgaattaactatgcatattttttatagataaacaacttgtttagctaaatcacttttttttctttattatattagtataacaaagtaattttcaacgttaatgatccgtttgtttgccaagatgtatgtttatatctaaataaatccttttatattttttttttttgaaaaatcctttcataatattttgacattcacttcaagaaggtaagtattatgctaaataaaataatatttaaatcacaaaaaattattctaaataaatttgaaaagtgattacagattaaataaaaaacattttgtaatgtagaaaatactatctaaacaaaagctaaaaaaaagcctcacttcaacagatactcaaaataagtagtgaaatcaaaatcaacaatgtcttggcatcaaaaaatctctccatgcaagtctacaccataattgcccataaatagaccaagaatggcaatcaacaaaatcacgaaactgaagaagaaaatccaaatcaattttttttcttacctttcgttttcgttttcgggtgtgttggattcttctatttcttgttccatgtgttacaaaaaagagttggcaacctcaaatctcattggaggcaaggaatgtgttccacaatccatgagattagaattagcaaaagccaactaatccatggacctatctaactctattgaggtgggcagaattagccaaaaaaaaagaggaacaaatattataaaaaagtatgaaactacaaactactatttatgcagtcactatccttttctcatggtagccatcatacttaactccacctgctgatcctcaattctgcttatcgctcgcgaaagatctctgctggcaaatgacatggtatcttctttggtgaggcgcctctgttttatcttcaaaattgcttgtgaaacctctcctatcgatggccgccttcttggtgaattgtcaaggcatttgtgagcaatactagctaagcttctcacttctgcaacactgcatttgccagccagtcgcttatccagtatttcatcaacaccgtcgggactcatagaagcctatcgaaaaagcaagtttagaaaaaaagtagcgatgcaatcttcggtcagaaaggtttgactgtaaaagttattgagcaaacaaccaaggagaaaaaactcaccaagttaatgtactccattaggttttggtgtggatgaatagccgttattagttcgaacaatataacaccaaaactgtagatgtcactcttcattgtgaactggtttgtggatatgtacactgggtctatgtaaccatatgttcctttaagtccagaattccttccatcaaaaacttcttcctttgatagtccaaagtcagcaacctagaatgaaaaaagtaattgtgttttatttattttagcgatttatctacattctgaaacaactcattgagaaaattgaacatgagaaagctgttgtgccatctcaccttagctctcattaatctgtctagcaaaatattagcagacttcaaatcacgatgtatgacgggtgggactgcctgtttgttcatagaattctccacatcaataaattaaacaaatttcttccactaaaaagaaaaacaaatataaagaaaattaacattaccccttcatgaaggtactcaattccgtgagatatatcaagagcgatttgaagcctttcatcccaattcaaaacccgttcttctccacctaggtataaataaagcaggatggttctcaaatatggacaactcaaaatcctaccaacgaaaagagttagtctaagttgttaggtaataaatttgttaaagaaaaggggaatgcatttccagcttaaattggataaagaagctcaagcttacatgttctgatagttattttttctctcttcagaaataagttactattcaatctatacatagtatctatacaagtgtgtttgtgtgtgtgcgaaacataagtttttgaatcccagctttctctcttgtggctagtcaccacaatcatttaagatttattttcaaaatatgtagagataatataccctctgagcgataaagaatgcttgctaagcttccgttactcatgaactggtacaataacatgcgttgtcctttatctacacaatatcctactagatttacaagattgcgatgatggagtcttccaagcaaagatacctgaaacagatttataaaaaaa

SEQ ID NO: 17789 - DNA, 3993 bp, Cannabis sativa
  modified_base (3923)..(3927): a, c, t, g, unknown or other
ctaagacacttatatattttgttaaaacattcacaacatttccaacagatatatcttgatcatactgtaaatcaaacataatatacataatgaaacaacacatttacaataagatatatgagttatattggaaagatacttaaacctactaaaccatgaagtttaattttataaatgaaaaaatataaaataaatcaaaagtctttagattttaaccaaaacgtgttgtggactactatattttaagctaatttttgtaatttaaaaaggagacagacaatgtttgagatgaaaattaatgttggagaaattacagaaagaaaaatcactttgtgtattttctcacctctaaaaatgcaacaagaaaataaatccatatgggagtaattataacttttgaatggtttccttcatcttaagaactaaaggtgaaaatgaaagcaattttataatatttagaatgtcatttttaaaatcacacatatgaaagaaactgctattacaaagagaatctgaggtcaaattaaaccatcccaagtgaaagatacgtacaatgaatctcagaatacagcatggtgaaagagtaagctctttcgtcaattttacattgatttgcacagaaataacatttacatccacccacttgggttgacacttacacatgaagactggtattgttattgcaataactattctagtaaatattactaccgagtaaaaagaatggatatcagttgataggagaggataacttaccattaacaaaccagtagatttagattgtacaaataaaaaagcttgccctgaaagctatggtattaaagattataaaccaaatatagatacaagtctttctccataaaaagaaaaaaagaatcaggtgtacacttgcttgtacttgcagacctacatatatcttaatcccatccaccccatttcatacaagcccagccaactaatttgttcctgttttcaactatagaagattattttcagcataataaagaatcttggctctgcagtaattatactacattaaagactgaccttcacttccaaagtctgaaagattaatggatggtatcttttcctctgcaatcagagcttttacactagaggaagtaatgtcatctgctaacaacttaagagtagcatcttttactattgaatggttcttatctgcttgatctggaacaattcctttgtcaaacatctctttgaaaatgtcaaatgccttggacatatttgagttagagagaaaagcacttagtaatgttgtgtagacaaaactatcaggtttcatttccatttcttccattttccggagataaactagagcagtatcaggcctattgcactttgaaagaccacaaattagagccataaaagtaattctgtttggatcacactcattacctttaatgtcttcccagagttttagagcatcatcaggcctcccagaagcacataacccatcaattaatgttgtgtaagttatgacactaggctctctctctagatcaaacattgttgataggcaatgcatggcctgatcaatggcgccaactttacaccatccatcaatcagcagattgtatgtaacaactgatggtacaagccctttcaacaccatttcattcacgagattctcagcttctgagattctttgagctttacaaagcccatttatcaatgtattataagcaacaacatcaggacaagacccttgggcaaaaatgtctttaaacaggtccagagcacgatttagttctttagactttattaagccatccatagcagccgaataagtaattatatcgggaacgaaaccttcttgaagcatgtcatgaagaaaattacaagcttcaaccacctttctacgagtacaaagtcgcttgactagtaaggttgaatatttcctccatggtacatgtccatgttgacgcattcttttcagcagttcaagtgcttctgcaacattttctcttctacatatgcacccatataaagaattatgagtaaattctgttggttcaagtcccaaatcctccatatctctcaggagctcataactttcttcaagtctatttgaattgcacagtttatcaatcaaattattatatattaatatatctggtttgcagccaatctggatcatatctttgattaggcttatagtcatatcaaacttaccagtctttagcaaaccctcaataacagttccaaaacaagaagtaatagggcgaatattcatctcaaggtgctttttcactatgaaaccactatcagttttatcccccatgattgtccggagcagattatgagctttatcaaccaaacccacattgataagacatttcaacacagaattgtaaagcaaaatggcagctccttcatccatatcttcttttccttctgcaagtaattgaagcatgtcctcttcactagaacaacatgatatgagcttggcaactattcgaacatcagggcggattcccctctccttcatttctgaatacaaacacaaagctttctcgagttctttgttctcacagagtcctccaatcaacacatcataaagggcaacatcagcaccaaaacctgacttttgcattttactgaacaactgaagagctttatccactctagattctttcacaaacccattaaccaaaacataaaatgtcttctcattcaacataagattgtgatcctccattctttcaatgaactcaaacgacttatccacctcaccccacttgctataagacaatataagaatagaaaacacatgggcatcaacccaattcctctcaagcatttgatggaaaatattcaaagcattttcaaacttacctgcattgctataagctcctaatataggagtcaacgtgaacttattgatctcccacccagcatttaacatttcctgaaacctcatttctagcaaatcaatcgaactagactgagatattacttccaacaaacaattatagctataaccattaggaacacaaagccccctcttcttaacatgatcaaacaatatattagcttcatcaaccaatcccaaactacccagaagtcttaaaaagaaacccaaacccccgggagtgatcgagcaattggagttaacgaaatctaaagccaaggctttgagtgcggcattttgtcgagcacgtgataggatggaggccatggcagtataagtataaccattgtgcctaaacccatgttgatttgagacccaagtgaagaacaagtgagctactttccagctcttgaggttatttagcacggtttcaacgagatcggtggtgagaaccggagcgaggcgcttcaggtctgggttttctggggaaaagggagattttgtgaagatggaaatgagaccatgggcaatgtctgcgtgttgggagttgttgaaaggaatatgggtggagaatggagaaggagagatgatcttggtgaaggaattggaaatagaaaggagttggtaatgatatgggtttatcaatttgaagagagttgtatgagtttttgaaattctagtcactgtcatttcataccaaaactaaccaaccttcttctcatccaatcttataatactgtttgttttctttaaatggacttggtactcaaactagtgaaccttattgaattgtgtacatgtaaaattaattgtaccagcaactttaatacgtagttgtataatcctttcaaaaaaaaaaatatggagttgtataatgtggtggtctgtataatatttatttctaaaatttttattagcagacgtaatatcatactgtagcttatttgtagaggaggtctttaaactatatatattttggcaagttagttttcaaattttattttttaataaattagtgcatgtttcgcatcataactaaaaaattgttttnnnnntttaaaaacagaaaattatttttaaaaacaatttgacttatttggccttgttttttaaaaacagtt

SEQ ID NO: 17790 - DNA, 4216 bp, Cannabis sativa
ctgtgaaagatgcagaatcaattgacatagaagctgctgagagagaaatgccacaatattcttgtgattcgtttgaactattcactctgaatcttaaggaatgcagcaatgacgacttttgtgtgtcatcaaagtcttccgatgtaaatgctacagagacaaaggattatggtttcaagataagaaggggcaggagattgaaagatttccagagagatatacttcctggcatggcatcactatctaggcatgaaatttgcgaagacattaacattcttgagggagttttgagatcaagagagtacaggaagaaccaagcaaagatgggagatggacacggctggtgcacaccagcaagaagcaggcgatcacggagaagactctcttgaggcctcattttagttaggaatgacaatttagacatgaacatagatccattctgggtatgcaatccttttatgataatattttagctttttttttcccctttcctttcctttcttttttttttaggagcattgctatagagtatatatggatatggtgcttaataccacaaaaactaataaagttgtgggattacatgagaatttaatattatagggtcattccaaattagcatgtgatatccccttagtattttcctaatcttctaacttatataatgtcacacttactataagagatttttctctgtcacttgtttggatggtagaactgtattctcatcttcataaattgggatttggtgatcactttggcttacatgctaaacccttgtatttctttttccaaactcgtacacctcaattaaagtttcagtaaaatctggggaatctaaagtccacaaagatcagcattaaggcccggttcttatacaagatttaggttctcccactctttctgaactgccatcataaatagaaattgtctatgaatattgaagcaacagagctatgacttaactactctaactagtatgtagattgtagagaaactagctggagctacttctctgagcttcagatcatttagtcaatactggtagccactgttttgaaccttttttctataaatattttattttgtctccttctgattttcaggaagaaagagtacaaaaacttgtgtactacactttgcacaacttttaaagtaaaaaagatttaaggcaaagaggcacaaggtatcagcaaggtggtccatggtggttgtgtattttgatgaagcttagctacttgtaccacatgcccctatatagtctcatctctgatctatgctctcatatcagactgtttttggtccagctttttaaatctctatctctttcttgcttgcttctgcttccaactataaagacatcacaatcaaatgcagagaaaaatgcaaccaaatctttaggaactctcaagccatcctatacttattgatgactacaaattggttgcttatctaaaaggataaaaagagtcccagatgctagaaccaataatggggttggagtattgcgacaacttgagcttttttataattatattttataatttatttatattacaaaagaaaaatgaggaagaaatccttttgcctaccattaacagcttcagtgaaacttttttttttcccttctgtgatcctttggaataaatatctgggtcccaaatttctgtcaaattgaggagtacatatcagtctatgtcatcctacatagcaatcaataacattatatatgtttatcatcataaaggatatttgtactattagtattactatatagtataagagagctttggtttggttcttctaaagatatattaaccaattgaaataataaaaggagtaaatgcaaagacactaaaagacaactttgagaagaagcatgctactgctgctgcaaatggtccaaaatccctttgtttgagaattgagatttaagactgctatgctatggtagtactgttgttgtgtagtgggttgggttggttgaagctttaaacagtcctcttctgtacttgtacttcaataataacgtaccccacaacaaacccactaaactaatcttgacataaaagcctagagatttagttgatacggtcttttgatttacattagcattattatagtactaagaaatatatctgttaagtataataaaaagaaaaggataaaaagttattaatgtagtaaatatgataactaatactaataataatataaaatattcaagtaacattataaaattgagattacattgtcgttattatcattagaatatatatttcttcttaaattattacaataccaaatcatatttttttatccaaaacttaaggatatgattttgtagttgtaataattcgacaattcaataataatttagggaacacaattttacaattattgagagagcacaactctacagtaatgatagtttagagagtgaaatagttacatatcaatttctcaacacgtcaagttggtttttttatacggtgaaattgtggtatagtttaggaggaaaaaaatctatttattctcattactattatttaagtataattttgttatggtaggaaatataatatatatgaacaagagtttaatgtataaataatcataataaaaaacaatggtgtcacttatttaattttgaatttcattggttcttatttaatgtatatgatttgcataccaacccattaaaagttgccacctttcttaatatgtgcgctattgttgatcagtaatgttattatatattatatctaagagtttttccaatcaaacagagtttgtttacactgatctgttaattttcttgataaaactaatagataaatagtttagtaatgaaatgaaatgagaaaagcctacaaatattgaaactcttgcatgcaattacggtcacctcacctatgtttttaactttctagtgatcttgtacacaattttcaactctctctctctctctctcttcatattttaagattatttggataggcatgggatagtgggttgtgaaacttaaaaccaccatggactatctggggtaggcaagaaagatatctagaatccacatgagttatctatcaaacaactatgaaatcttcacaaagtggattttgaatactttttgcccaccaaaaccaatgaaccaacaccaaaatgatgccatatatgtagcattgaactattaataacttcatacttcatctgatcaaagatgttttacctcttatgttattcttatcttaatataattggttatcgttggtttagccaccattgaggttctttgctatgtttaagctataatcaataactgaaatgcttgaacacaattttggcaattatagatctatgtatcaaaattgatcaaatgatggaaaaagctaattcaactgtttgtgtttcaatgagttttgataatcctagaagatgggatttgaaacttcatgaaactgctcagagtagttttaagagagcctatcacctcttaaattgtatctcagataaaaagagagaaacaagtgttcaagaaatgactctcctagctcaagatgccattgatgaattcaaaaggctgcttactctcctagacaatggatcggtgctatcatcatcatcatcatcatcatcatcagataaaaagaggattagaaagggtcctctgcctaaaaccaatgatgtaaatcatgttgaactgatggatagtccgaattcttcttcgtacaaaactttggcatacagctcaaccaaacccttcataggtaggcagtttcatcctcctcagagtactagtcaggcctctagttccattcatagaagcagtctcagcctgagtactttgattcttcctagtaattcaatcatggggatgagccaattctctcaacaacagcctagctgcagctctttgatcagtatgaatggaagtagcattattaaaacaaatgtggttcaacagcattcatcctcaaattttttggcttctgaggtcagcacttcttctatactttcttccaagtggatgtgtggggagaaaagtgaagatactacaagtatgaagtgtgtagcctcaactggtggatgtcactgctcaaagaggaggtgatttgatctattatctatatcgatcggtgaactgtgttttctgttctgtaattttcaaaccaaaataatgtgtcaaatcttactgaattgattctgatagtat

SEQ ID NO: 17791 - DNA, 3382 bp, Cannabis sativa
atttggccttgtgggattcttaaatgtcaccgttgcctgttggtctcttaaaggtcgttcgttatacctacactttccaggcccaaacgcgaggagggtgaattagatttagtcccacattgtatatgtgtggaaataaattgtcatatattagatgaatgggctacttctcccattgctaattggttttgagatggaactccattcaccttatcccaaattctaacatagattgccaaatgcttgatgcctgaaactgaggtgcaaaactttcttagattattctcctttcggttgtgcgtgacacgtgtgcaagtgataactattagatccaaagttccgataccgatgcatttcatctgaaacagttgccatattatgaaatataagaataaatggttataatctagtagcatatattaatcatatgctcttaccaaaatttccatctagcctggaccaagcctatgtctggattctcaagcagatatggaatggtcctccacaggaaatcctcttcaggctggaaatatgcatcgaagattgccacaaactcagtcttcacgtattgcttctctaagccttctttaagggcgcctgccttgtaaccattcctattgttcctagttttgcaattaatattttcccctttctccatccatttatggcattccatctccaccaactcctgtaggtaagtaaattagagtgcaataacaggtttgatgatgggaattttgcaggggtttcgaacatatacccttagcacttcgtttgttgaatcatcaagaacctgaattatgaggcgatctgctggccatgaaattccacatgctgcctccatggacaacctgtttacctgaatagagacaatatatgatataaatatatctttcttattaagtttatttaaattatttagacatgtgctataataacttagacctgagatggtaaataattatgaaagtacaacaatttaattctgacagatgcaaacgaggaatgttgcctagctgacctaacctcaagcttctatgtggctataaaaatggagtggaaattcaaattggaaggtctgcaagagacttacctagacttttcatctttaatttgcctgtttatcagacttgggtgctttttttccttcttctttttctgataagatatatttatgggacttgaacctcagacaactcacaattttctaccagattttaccttaatcatatcatatgattgtcttatctaagcatgacaagttgttgattatgagaatcaatctaagttatgcaggataagcctaagcatatgaatgcatattgcactctgtatacacagaatatagtattacactatttgaagcttgggatgctactgctctttcatgatgataacatttatttatttgtatgtagatactatttactgtgtgaagaaataatataaggaaacaaggatattgaatggacgattttctttattttagaattaattggaacttggttactttaaatagaagcaaggaattgcatctaataactatgccaaatgaatgacaatattaagatttgatgacatcctttggaggcaagaaatttctttcctttgtccaaattgcaaatgaagatcaattaattacatattttcgatagttaaaatggcataacaaactgaactacatagtccaggatatgtacaattatttatagatatcttttggtattagattgtggtgcagatttcttgatagaagtttgagaaaagttatcttagacaaaatatgagattggtttacagtgtaagtttaaatatgagtatcaacactttgtttcattttcatatgcttaaacattctacttacatatttgctaaattgaactatatctctttctcattgaacctaggtatttgaatcaaaaccagcgggtagcttttgtcaagctccacagcttcttttatgctctctaacttgtatttggtgtatctattcatccccaacagttttacgaacaagattaccattgccatgtaaactcgctcgatgaaaagcataatagacataactgagcacaatgtcattgctaggtttagtagtggtgctatcatggaaaccctcaaagaatcccagttatagcttagacttgtagtaacatcatctgtcactttcacctcaggcttttggaaaacaagatttctcatgataatgagtttttctagcaagaaaaagacagagcctgaaagggattgtatcttgaatttgtgggacaagggcagcaatttaatgccaggggatgcaacaggcaggtataaagaatctcacagtaaaatgtgtacaataagtagaatgtgatgattgttgaagataagaggaagacatgaattggcttaggttgaagaatatagtacaatgaatgtaatattatgtactgttagaaaggaggtcttaacttatatggaagacaccaggtaatcatgccagtgacttactgcaaggtatttgatagcttgaaacctgggtagttccaacaatgcaaatacaagctttggaaattattttactatggatcgtgattgcctattttaaattatttactgagcttgctgtcttgtgaattttatgttggataggtgcaaaaatcaagttggcatatctagtttcttatctagtgcccaggtacttttctgtatcctttttaatttcttgtttcttaatgaagtataatactaaatgtcttctataactctggaatccttgctaacttttgtgaacttagtaaccgtagaaagtctattaggaaactagaagaaaatgtagaacactaactaattacaattaattttaatgaattttttacgaacaaaatgacaatcaatctcaatgtgcttagttcgctcgtagaatacgggatttgaaacaatatgaagagcaacttgattatcacaccacaattttgctagaattgtagtctcaatcccaaattcagtcaatagataaatccacactatctctcacacaaaatgtaccataatttaattttttgattttgcactggatctagacacaacattgtgcttcttacttttcgaagagatcagattgcccctaacaaagacacaataacatgaagtggatcttttatctaccttggaacttgcccaattgtaaacaatatctcgtcttggggctcctttcaagtaatacaaaatttgttttaatgctgcccaataatgaattgttggagatgcataaactgactaacaacaataactaagaatgcaatgtcaggacaagtcacagttagataatttaatttttcaaccaatctgtgatattttttaggatcttcaaatggttccccatcacttgtaagattcacaa

SEQ ID NO: 17792 - DNA, 5016 bp, Cannabis sativa
tattattgtttcaaatgcagggagcccctgttaaggtgaggaggcccagtgattacaacccttcacttgctgcaactcttggccctagccagcccaatccaaatttgaatcttgctgctgttgggcttacaccaggttctgctggtgggcttgagggtcctgatcgcatttttgtgggcgggttgccctattactttacagaagcacaaatcaaggagttgctggagtcctttggcccgctgcggggttttgatttggtgaaagatagagaaacaggaaattctaaaggttatgccttttgtgtttaccaagatctttccgttacagacatagcatgtgctgctctgaatggaataaaaatgggtgataagacgctcactgttagacgagccaaccaaggtgctagccagcccaaacccgaacaagagagcgtgttgttacatgcacagcagcagattgctttgcaggtatgtttagatccttgtctgcttttgcaattgttttgtgaagttgcctaacgatgaattagtccgaagacaaatatataattcatgttatgatgaaatatgcatcaaatatgtctatatgccatctgcaataaatatttaaaaacaaaaaggccctcactaaaaatgaaaatagtctttacatgtgtgtggatgacagggtccacactcctatgtggtcacctattgtatatactcatatatgtgttcatatgccatctgcaatacaatatctctttgaatgaaaaatgctctatatgtgtgtgtgtgtggatgacatgtgggtccacacacgtatatattccttctgctagagtgaattctttctacaagttgcctatcatttcgtctattttattttggaaaaatttcaacacaaaactctgtttttgtagtgtttgtttcagtaattgcatttgatgaatttgactgtaatacgtaatttttttttttatctttttccattatattctttgaatcgattaatatttggctaagcttctgtgtatcttcctgttcgaaaatggatctcttaatgttaattcttttgcagagatttatgttgttgcaacaacctggtgctgggcctggtggtgcagcagcctccaaggtcatatgccttactcaagtagttactgcggatgagctaagagacgatgaagaatatgaagacattatggaagacatgagacaggagggcgaaaaattcggtaatcttcttaatttttccatttcacactttttttcttaaatcattataacttttagtagcttgccaagttgctggcatcgtattaatttttttctgtgtcgaatctttctgttttacagcctttttgttgtcccacattctgctataaagaatcaggcctaacatacaaacagaagcctcgatgactttctttctaatttcaccttggattcttttatctttttataaaacttactgattttaaattttttgttctttttggttgtgcaggtccgttgacaagagtagtgatcccacgacctaggccggacggtgaaccatcccctggagtaggcaaggtatcttagaatcataatttcattactttgcttccattttcaaacatgcttatgaactgaacttatccctattatttcggttaatggagtttgctgttttttttttctttccaggtatttcttgaatataccgaaatggaaggggcttcaaaggcccgtgcgggattaaatggaagaaaatttggcgggaatcaagtagtggcggtgttctatccagaaaacaagtttgctgagggggattacgatgcctaggttttttttttctttctttttttatcattgtttagatagattgaacttaagacagttttattgttattatcaatagattggtgtctgtcttttgtagcttaatattgacacttaatgaattggtgtcttttgtagctttaatattacttaatgaattggtgtctgttttctctgtctagttacttgcaagtaaatggtgaccatttagactgacaaaaacacagatagtttatttctctcgtgtaattttcttattgaatgcagcaaaatattgctgaagaatttcaattcataattttacttggtgcccttgtacatgttgataaaagcattcatttatttgaatggttcttttttttttctacttaatcaaacttcactaaaaagcaaaagccaagaggcaacagtagcaaccaatacagataaaggctataggcaaattggaagtagtctaggccaccaaaaccatagtattagctaaagagatggctaattgaggtaatgagtgagctgtagaattactagttctattttacaatgggaaagcttaaaactgcttaaagattgtctcaggtgatgggcatcttcaatgagtttgccaaattcagaaaattcgaagctccactcattaatacacttggataccatttattttaaagctttatatatcaccattgatattataagaacgagtttcaagtgaattctgtacaatgaaatggcacttttcaaaaacatattttccaatttcagttctgttatataaaaattaaacttgcttgtacatgtcccccaatcgagcactaaatacttctgaaatggatgttaaatgtggataggctggaaactatttgagagtaagcattttgccactagactattcaattgatggtaaattcctagttagtttaaaaactattgtgatgttatacttatgttatatgtaaatcatttcataattctagaataatagttagttttttcaaaagaaaaaaaaatcaaacatgtaaaaataaaattaaaaattaaacctactcacgcttgagaaacaattttatataatttagtgataagagtttagatttttattttgttttatcattaactgttttaccattgatgcaaaaatagaatgacatatttgtgttttatcttactaatataaaaatatcatatttgtgtgatagtccttaattattttacttttgatgtaaaaatagaattacatatttgtgttctaaacttttaatataataaaaattcataaccaaaatcttctctaccgaaaaaaatagtttcttcttcaggttttagactgaatagtctaaatcagtcttaacatatttgagttattgtaaataattaatttgaaattttttattaagaggtcaatgttcaaaaagaaaaaataattaatttggaatagttaaagagaaaaaacacaataaacgacagaaaatgactaaaacgacatcgaaattatgctaacctaaaaccacctctaaaaccctacagcaacacttgccttttagtctcagaccagatcattttcatttgcagaaaccctagaaaatgtcgtcctcaacctccattcgccatcttcgccatttctcatccactgccaaatctgcaatctccatctccaaagcaaagttgaagctccgaagcgagtatgatccagacaaagctctccaaatctactcctctgtttccgatcactacgcctctccaaccatatctcgctacgctcaggacctcaccattcgccgcctcgcaaagtcccgacgtttcaccgatatcgaagctctcatcgagtcacataaaaaggatcccaaaatcaagcaagaaccttacttgtctactctcattaggtcgtacggaagagctggaatgttcgagcaggcgatgaagaccttcgaacaaatggacgaattgggcactcccaggtctgtgatttctttcaattctcttttaacggcttgtaatcattcgaaactgtttgataaagttcctgaattgttcaacgatcttcctaagaaatacggcgttttgcctgataaagtgtcttatgggatattggtccggtcgtattgtgaggctgggacacctgagaaggctttagagatcgttgcagatatggaaaagaatgatcttgaggttactgctgtaacttatacgaccataatggatgctctgtataagaagggccaggctgatgaggctgataagttgtggaataccatgcttgaaaatggttgtgaagttgatgttacagcttacaatgttagaataatgcatagccatggcggtgaaccggagactgttaaggctatgattgaagaaatgaggaatgctgggcttaaacctgacgctattagctacaattacttgatgactagttactgcaagagtgggatgttggatgaagctaagaaagtctttgatgggcttgagggaaatgggtgtaatccgaatgcggcaacatttagatctttgatatactatttgtgtaggaatggggattttgataaagggtacaagattttcaagaagagtgtgcaggttcataagattccggattttaacacattgaagcatttggttgaggggttagtgaagaagaagaagattaaggaagctaaaggaatgattcggactattaaaaagaaattccctcctaatgtattggtttcttgggggaaagttgaagagagccttggtttggttactgcttcttctgagtctcatgcagccactgatgatgaggatgaagaggctgcagcatgagatgatgatgataataatctgtttgaattgataagtattggcagtgcaggatatagagttttaatctttgaattgactatggtatcatgaaagtgtaaaagctttagtttttctttatctgtgatgggaattcagagttagctttttttccaatgcttattctgccattttgtttagagcttcatcattttactgctagtgaaaaattacattctttttttaacaccattcatacattctgttgtattcgagtcacgtcaatgcaattggtgtggcctttattaccaataagcactttttggtgattgaattcgtaagaaagatgcaccctgtaatgcagtttatgacccttaaatattgttcttttgttttttgcaaccaagtttgctagaagtaataattttcatccttacattgctga

SEQ ID NO: 17793 - DNA, 4636 bp, Cannabis sativa
  modified_base (3332)..(3340): a, c, t, g, unknown or other
tttgttggggacctttcttatgcaaacgactacccttttcatgatggtactagatgggacacttggggaaggtttgtagagagaaatgctgcttatcaaccttggatttggactgtagggaatcatgaagttgaatttgctccacaacttgtatggatcataattttgacttttgacttgtgctaaataaatgtaaaacttatgaggtttgctttaactacgtgtatgtggagcaatgatttgatcaaatgagtttccttgcagggtgagagtgaacctttcaaaccttatactagccgttttcatgtaccgtacagagcttcacaaagtacatctcctctttggtattctatcaaacgagcttcagcacacatcatagtgttgtcttcttattcagcatttggtaacgtcactcttcttccacctcctgtttgtgtgtgtgtgtgagtgtgtttcttgctatatataggatcactacaattttagctgtctatgatgtttgaagtgacaaatagctctgaaaacgaggaagatattggaggagtgatgacttcattagtcagaagaaaccactcacaaaacacagaaagattccttgtatttatttatagtttcaagaaaaccgggacttgttatgtttgttttgaccctttttctctatatttgcgtgtatgtgtgtgtgtagttaaatcaactcctcagtataaatggctaatgaaagagctaccaaaagtggaccgaacagagacaccgtggcttattgttctggttcattgcccaatatacaatagttatgtggatcatttcatggagggtgaacccatgagagtggttttcgaaccatggttcgtcaagtacaaagttgatgtagttttctcaggccatgttcatgcctatgaaagatctgtacggcccctttttactttctacacaattaaattctttaaatatagtgttaattaattaaaccaaacccatattaaatgtgttttgacatctttaaatcccaggaacgcatatcaaatgtggcatatagaattgtgaatgggatttgcacacccaaaagtgaccaatcagcaccagtttacataacaattggagatggaggaaatcttaaaggattggtgacagagtatgtctactattattactttattatctctcaattgccatatcttttcagtatttattactagccagttacacacaccgaataaagtttctgatctatcattttcagagttttattttattttttattattaatttcatttgggggtgggggtgtggtgtgtgtggactgcaggatgacagagccacagccaagctactctgcttatcgggaagctagctttggtcatgggatatttgagataaagaacagaagtcatgccttttatagttggcatcgaaatcaagatggctatgcggttgaagctgattccacatggctccacaacagatactggaacccttcacctgaacaatcatccatagccattttataatactcaaaaactccagaaacaacttcttctcactctaccatcaaccatgtccacggacactaattatttaattagcaaatcttacaaagtttgctattgggacgaattatcttatttgtaatagttagtaacaaaccttggatcaatatagtttgtgccagttaactacatagtggaataataacatcataattatgtcttattttttaccatgaacttggaccaaatatggtaaatgtacagaagcagtggtggaaatatagaacgcataacgacaaatgaattgaggctataactcaactcaaaataagatattttttaacagtgttgaagaagaggaaaaggagaataagatcagatagaggcggcctgctgaaaacctgtacaagaatccaaaacagcactcctagctactacgccagaccacccagactgtcaattatatctactctctactgataattcagaagagaagaatccatcagtcatgacgcattgtgttgaaaaccaactgaatacatatatataatgagaaaatagagagagctattctacatagaggggcagcaaatataaacaataataataaaatgagcacataccatttaccaactaacaaacaaacctataagtttcataaaatgagcacgcttgccagctagatttttatacataacaacagtactcccaaaccccaacaacacaacaaaaaattaaaaacagaaacagaaattaaaaattaataactgcatacaaataagcgcatgtaatgaatatcccagaaacccatattattactactactactactactactacctacatatctagtttactttatacctatatttataatcgatttaagtatatatatatatatatcttattaatttacacataattgattgtataaatatctaataatttaagcctatagcatcctttcttttcatcttcttataatttacatgcaccaaggagagcgtagagtttcccagccagttccatcaacaatgttggcactgaaaatgctcggattttccatgattggaaagtcgagagacatctcagcctcagcccatatctcattatcatcgaactcaggcaacgtagtgtccacactcccccacagccctgctgcttttactctctccactacttgatcatcatgctccaccttcgaattgtgatgctcatcatcacacggtgggggagggataacgccgtccacagccacaggagcaatatttacagaagtatttgatttgttatgatcaattttcattttctcattcacaacaacagcctggggtggttgttggtccaggttggctgttaactccttctgattatcagatatcggagaacgaatatgatcaattttgttgtgagatgaggatgatgatgatgaggaggaggaggaggaggtggaggaggttgaggatgaggagggtggtggtggaggaggaggagaagtgcagggtagtagtagtttggggagattgagtttagcttcggagccgtagagtttacgggcagcggcgtcgtaagccatggcggcttcattggacgtgtcgaaagtccctaaccagagacgggcaccgcggtttggctctcggatctcggcaacccatttcccccaagtcctctgtcgaacgcccttgaaagtacaagtggcgttctcgggtccacccttgcctcgcatgcacccttttcttgaacttgcctgagctggcctcttcacctgtcttctctccacaaatccaatgcttgacttcaacattgttgagttgaaaaatagatataaatagagagagagagagnnnnnnnnngagagagagagagagatttgaattcaaatgagtgtatagtagcaagttatatagatataaatatatataatgaagatgatgatgatgatgtatataataagtgaagagaagagaagagaaggagataatatttgatttaagcatacaagtcataggagagttgggttaaagggaggcgtagtatatataaatgacaaataagcaaggaaggaagggataggaaagagagtaatgagagatgcgaagctgacctgaaacgtggctgctggtggggttgagctgatacttggcatgatgaaccgtacaaatcgtgtccatgggcaaccttactgttcaattctcttacacacacttggcgaacccccttgtttgcatcagtaggctcaggtggcaaactcaggaagagcaaacccaaaccctggtctttatatatatgaatataataatatatatatatatgtttggtaaaataatgataatagtgtaaaaagataaaagataatattgtactggatttgagggaagtaattgtagtaggagagaagttggggcattttagtcttggaagcggtgacgattaatgaaacggttagagataagcccatgcggtaattccaaaacaagcacatgacaaatagcaacgtaaaattaatacgtggggcttctaacgtcccatgaagtggtgagggctttggagtcagtgacagaccactccattcactacttcactctctaaacttggtattcccaaaaagattggctctagatggatgcactattctcaatcttaccttttctttctagactagtggcgcatcattactaaatatttttcaattttatttttctctacattctttacactatgtttcgtgctatatatagtaataaagattataaaagttaaaagagagagagagagagagagagatgtatattacagaaaaaaagtattagaagagttcatatccatccatccatccatcttactttttcttttgttgttaaaattattattgtattatttctatattttactaatgaaaaattaaagaagttaatgtaagtgaaaattagttaattaagattggctttatgttatgtgttttccaaattccaattgccttcctttgctgtaaacaatttatagtaatacagatgatcttcagagtttggtactattatatattaggccttttctttcacaaatatttctcttattgtaatccgactccaaatgttattgctgactttttagcccgttaaataagtgaaatttaaaaaataaaaaaaaaa

SEQ ID NO: 17794 - DNA, 4286 bp, Cannabis sativa
tcaaattggtgactttaggatcccaataagtaaaatatgtatactatttacagtagtacaatatatttgatacttggctattaacttagtattattacttttcttatatattatttataatgaatgcttgaactagccccaatggttgtgtcgttttcgcttatcaaccaaaagcaacttcttatgtcttccaacagctaaataaaatgtgaaattgatgcttgtatctcttctaaagttctccctttagtttctggcactagctttgcaatgaaaattacagttatgccgccaatggccgcgaagatgaaaaatattcctgtgaaaggtggcagattagttggtaagatattgtacaaaagaaaagaaactaaacaactatagtagtttagtagttgaacctgaggagctccactccatcatggaattgaagttgtatgtaactatccaagaacatgaccaacatgccaaagtcacaaggcttccagctgaacccttgacatttataggaaatatctgaaatggaaaaactcattgagtttactatcaaatttttctcataaagaaaagaaaaaagagaaataagtactttacctctgacattataacccaaggtagtcctgccaatcccattacaaatgatacagtaaaaccctgagcagaagaacaattctaatttggtcataaaacatttcaaaaaaataaaaataaagtattactctgactgtttcatgtgtatgtattgcaactgaatgtaccattatagcaacgtacaccaatgtaggagggagatgctgcaactgttggactccctacacatataataaaactggatcacataatatttaattaaggcatataagtatgtaggtttggtttgtggatattgaccagaaataagaatgacaagccaagaagaaagctgctaaaacatgttcctgctgctgaaatctgcatacatttgtaaatttgactatcaacacattgaatatcataaaggtagtatatatagtaaaagtttaaaagaaaatttagtgttattttcaccattagaagtggtcttctacccaatttatctgtcagtagcacactcaatgcaacagcaggtatctacaattcaaaaatatttatattaagaatatatgtaaacacacacacacacacacataccaccagtcagatgaaagaattgtaaagtaacgtacttgtataatggccactgatacagttccaactctgcttgaaaatcctgcataagatagagatttaacttatgtgatgttttgtgtgttttatgcttaaattatttcagaaatattgaaagcattttatttacctgcatctctaaaaatagagctagagtagaaaagaattgctgtgttccccccaaattgtgtcagtaccattaacccaactccggcctaaacaaatatgtacagaaaatacttcataaaaaggcaccaacatatctcttttctttcatatttatttgggttaaggcagcttacaataagtgcatgtgcatatcgccattggaacaagtccagaattctttctgagtgctgctgaaaggcttctgtataatcctgccacaacaagaggcagcatgttccttagtttgcttctgtatcaataaattgtttatgcttggtaatcgacacaaatgagtatgtgtgcaaaactgctctcctaagaataataagttgaaggatttactataatatcagctacttcctcagagacatcagcatttctccccctcagactctgcagagcagtttcaagctctttgtgtttaccaattttcgcctacaaatcattcttcaaccgagtcatttaaagattcatatctgaacttcccttttccattgcacatgcatggtttctatgggaattcagagtacttaaaaataagtcaaaatgcaggagagatggaggaaaagaaaatgcttcttccattttatttgctgtgttattgaactcaccagatatctaggtgattcaggaataaagaacaatcctaaaatatgtaagagagatggaatggcacctgaaaataaatcaatttatataaaacttaattcttattatcttttcttctgaagcttagaagaagagctaaaacatagtttaccaattagagccagggtgcgccagctaacagtatttccaatgaagtacattaatgaaatcccgcaacacagcaacaactattcacttgaacaaaaatcaggtttatttcacatacacacaaataaagggaagaataatgagttgggttcttgctctcatgttcaccagatctaattggtacctgatatgcagaagtaaatcttccacgaatactcttgggagatatttcagcaatgtatacgggtacctgtctatcatacaagagtcaataactgtatatgtgaatgtgatttaaagattggtcaaaagattatcaaaattcatggaaattaccgcgtaacaaataagcccgtctgcaaatccaagtaacagtcttccaaagtccagccacctaacattctacaagcaagaaaattaaccaaaacaggagaaaaagaaagaacaaacctgattaaggaactcaagcccgagtaccaccaaaccaacaatgtttactacaatggtcaatctaaaattggctgcttgtcaacagtaagtttgtaatttagaactaataaggttcaattgcattatttaatcttgtttcccatttaagtgccaacatgcataaaatctaacatcttcgcactctgttagaatttagggataagttgaatagggttctatctcaaaatcgggaggagtagctcattaaaaaaagagccgaacatttgaaagaatcccacaagaccaaatattgggaaaaggggagagggatcacaaccgatcacaaccatgttagaatttggggataaaataaatgggattccatctcaaaagcaatggacaatgaaaagagtagctcattcatcgtatatatcacaatttatttctacatattagtaggactaactctaatacattcaaacaaatgaactgcaatcattacttgggagattaaagtgatacctttccaaatgctatagccagccaacctgtagtgcttagtgcttcagataaccacattgtctgacacaagaattacaaacagtacaaaatagataatcaaattctagacaagaccaactaaaattgaaaggatcgtaggtaggtactacaaaaacttacagctctacgacctgtaagatcagccagcttcccattcaatactccacctatcattcctccaattgtcaccatcgaaccgaaaactgagaactgcatattaggaaagaagagggttgtcaaccaatcatcaaatcagttcaagttttttgaagaaaatgaattactacatacatccaagctaggaagctaggaagctagcaagactatggtggccagtctccttaatctttatatatttatatggccatcttctaaaattaaaaaaataataaagttgtatactcatattgaagttctttggacctctatatagtaatcatgactcgatctcttacatctttaacagagatgtccaagtcttccatgattccggattgagcaggtgaagagtatccaacctggaaaaggaacagttacttttgacttgtgagtgaacatgaaaattgttacttcatagaatacaagatcaatatacccaattgaacaaagcttaaacaatgaagaacacattcaaatatccaaattacattttagatgttgatcatgattattgagtgttgttacttacaatgcaaccagcacagagagcgccacatagagcaaccaaagtgctaaaaacaacgacgggtgttgctgatgagctttcatcctcataattgggtttcgacccatcatcctcatcaagcaaaggccttctctctcctcctcctccctccatggtttgcttctttctctaggtagacgactttcttatggattttttaatttatttttttttttctaagaaaacaaatatgataatgtttgatttttttttttttttaaataaacatttttattttaaaaagtgataatgtcaatgattgtgtttggtgcttttaatatactccatagtatggctgtatttctataatattttatacaaaaaaagatatattaatttactatttatggtatcacgttcttgcttgttcctcgctcgtttcaaaacatgctttctttcggtgttattatattacaaattgattgatcgccatgtgtaccct

SEQ ID NO: 17795 - DNA, 2096 bp, Cannabis sativa
aagcgaggaaaaagatgaagatgatgagaggaatccgtaccttgttaaaagtggagaagcgccattggagcagggataggaaggttctagggcaacaacgataaagaaagcgaaagcccaaaaggtaagagagaacaatggcctctctgtccacactcttctacgcgggttaaaaaatccaaaggccttcttgcgtagttgtaatctcacgactcgtccgagtttcctgatccaactcggccgagtgcaaatctcacccgcttttttaatacgaaaattacccaatcaaaaaaatattttatttttaatcatatgtgcgcatccacacggaataacctgtgtcttccatgctctcctccaataaatttgtatgctatagtacacctttcaacctttgttttagtattcattattatttttttagctaatttttttcttagattgtgtatgttttaatttttttgaccccataaaaaatttaaaaactatctaaatagtatatagtgttaaaaaaaaatagtttaaaccattgtcgtgtataagaaaaatactcatgagtctaataaaataatttaaacttattttcagtactgtaaattacttataattttttaaaaatttacatataattttaaataactaaacagtatatgttcataaaaaaaaatatattaaaaaaaaaaatttaatgccaaaacagataaataatatatcgaaaacaatccttttaagaattgtactttagaattaccctattatatatttatatatctatgacaaattaattttaaaggattgaattgctcgaaatctataacattgggttgtttggtatgatgagtgattttttaatatttttgctcaaactaatattatcattctcatatttggtaagtgattttcctattttgaatatgagaaaattataaatatgaaaataaggttatttcataaagaaaaataaatctcttaagaaaaataaatttaaaatattcatagtttcaatcttaatacaatgtataaatatattaatagttttatatatttttttcacagcttatcatatttctataattaactaaataatataattcaattaataacaacctaactaaatattatcatgtataatcaaatagaattataaatttctaaacaagtatataatccgctttaatatttcaattaagcatattactttaaacttcataccaaacaccttctaaattcggtaaaaatatcataataatttttcctaaaacattaaaattttaaatatattatgacaattaattataaatttatttgtattttctataattttataataaatgcacatcaccaaatgtatactctcaaaacattgtattattcaattgaaaagaaatgatatacatgcttttttcttaaaatattttcactattaataatttactaagagtattgtttttctaaaaaaaattaaataaattattttattaaaaacagcttaaaactgacaatatcatacatacgcaaataaataattattattagggtcaaaagcaaatttatcctctatcacaaataagctaatacaaactcttcacaacttctttatgatataagtcacatttttcgtatgtggttgaatgtttcacaattttacaagaaaaagagaagtataataaataaatccactagctaagaaaaataaaaaataaataaaatgtgaaaaaatagaaaatgagtgttaagtatagattcgaaaaacttttatttgaaagaataaataaaaaataaatatattaaatcattaaatataacataagttttaaatgaaggcttttgaaaagagatgacacagtagaaagtatgtaacccgcttactatctcattcaactacagtttttcttatattttataaaataacaaaacacaacaataaacctaataaaagtcttgtaaataataatagactaggacctcaaccctaaaaagtcacaaaaaaaatgtacttattaaaataaaagtagttaaaaatgtataactttcttaacttttaaaatacttattaatacaattttactaaagtctccaaattatcataatttgct

SEQ ID NO: 17796 - DNA, 7688 bp, Cannabis sativa
aaaaaatttaacacgctagctaaaaataagattcaaattatttgttgcatgtgtgactcttttatacacgtgtaaaatatattatttgaatattattttttatattataaattttttggaattttttaaaaattttacaaaatatcttaaacaactatagcgtatacgactataaaaaaattgaagtataaaatcaaaacagatacgtattcatcggtgtacccatgtatattagaagcacttataaatttatatttatatatagatataaatttattaatatcaactgcctaacctccaacgaatcccttccaagttccaaatgcaaaataataattatattatattattattttggatttccatatacatataccaacacagatagaagaacttaataatatgatttgatataagttgtttaattaaaggtgattgcaaccttaagccaactccgattactatcatgagtttagtgatgaaaatggtatagtgtagttttatactagctaattattaatttgatgtttattaattatgacttgattgctaatttgaatgacttgttataaatgaatataatcaattatataatatgtatttttcgaatttaaggtattttttttcgtgctaacaatagtcattattattattataattattattgttaataataataattaataaaatctgggtcatgatttgaaaacgattttgcaaaacacacgaattgtgtcccacacacaaaacaacgtgcgtgacactttttttttaatttttacagtgaccttgtttggtttacatgacatgaatatacttatatatacacatatatgtgtttattgtggttgaccaaaaaaatcaatcccttaaacatgatatgaacatgacaaataaaaatattctctaattcacttttagataaataaaaatatattaggtggtggattagctatgcaataaaaaatttaattcataatatgccaagttccatattgtttttagttggtttctctttggcctatagttttgataattttttgttaattaaattctgatactctagacaattaattgaatttcctaattaataattggttaaattttttaaatggattagttttttattttgtaatgaattatcaaaattaagtgaaattgtaaaaataacttaaaaaagaaaataacattttaagtaataacgaaaagttttgaatttataaataaaataaatctaacaattacctaatttcgtcaaatagattccattttcaatttatttaaaataagatttgaaagtaattcatactacatgtttctatccacacagggccggccttaggcataggcgggctagacccgtgcctagggcccaaaataataaaaaaatggggtaagttaaaaaatactacttttattaatcaattaattaaatttacctctatttttaaatttagttgaaacatacctctttttatatgtattttacccaaaataccctgacataagagagtcacatcgagagtatcttgaagtgacaaggacaaaattagtacaatatttaaaaaaaagaggtaaaaatgatagactttaaaaaagatgataaaaataaaagagaacaatataaaaagggtatagaatataattttctctaaaaaaattattaaacttttattaaagtaaaattaaatgtattgtaaacaataaatagttataatttagttgattaaggtgtatgatatattatataatgacataggtttgaatctcataacattctttttcaatttttttatatatacttctgatggtcccaaaatttaattggtttacaaacataacattttaagtatttacgccccaatttatcatcattaataagactgtcataatgttgataatgctctattataaaatattatatatagctttttctaaaaaaagaaaaaaaaaaaaacaaaaaaagtgtatcgggtcgacccacccgggtacaaatatgccgacgaaattagtgaacagtggttcatccacgtggattgacatgttggtcaccttacttttggtatgcatatatacgtgttcttattaattatgataattaaagataagtctaatcataactaataatgtcgcttagcaatatgtagtatctataaagtataaatatgatatgaaattgacaacttgagaaatatatataaacacactacattataacttgagaaatagcaaagcaataataaaccttggaaaatagttacactacaaaaccttattaggttatccgtttcaaccacttcttatctcctcctcatcatcatcctaagctctaataatatttagttactctcttaataacttgtcctctacacatcaagattactcctttcttcattttcaaaagagtgtcaatttattcctctttcacattttgacactcaattaaactcataaagactctcctactacttactcccacatttggttttgagtccaaaaacaaaaaaatcaaaatattccccaacttagaaaaaataccttttcccaagctacatgtatccataataaaccattcacatttagaaagaaaaaaaaaagcccaattattctaatttcaatataactaggaagactacacaaactatttcagctcaccaaatcaaaactactcaatactaaagcaaataattcaccccaagaaattattattaccacacacccatataataaatctcatgtctacacaacttttttcacatatcaactatttctttcccatgcaaacttctcatcccaaaaccatgaataatatcacaaccaacaccaacgctctcaccgccgcccccgccaccaccacgggcgagaactttgtctttttccgccaccttcaactcttggagatttttgcagcaattttcgtgttcatagccatacattcactgagacaaaagagaaaacaagggttaccagtgtggccagttcttggcatgttaccgtctttggcctcagctttacaatccaacaacatgtacgagtggatctctaacgttctcaaaacacaaaacggtacgtttcatttcaaaggaccatggtttagcaacctcaactgtgttgtaacatctgatccaagaaacttggagtatcttctcaaaacaaagtttgttaatttcccaaaaggaccttattttcgtgacacagttcgtgatctcctaggtgatggaattttcagtgctgataatgaaacttggcaaagacagagaaaaacagcaagtattgagtttcattcagctaagtttagaaatctaacgactgagtctcttcgtgagttagttcaccaaagacttttaacggtgttagatgactccgtccaaaagttaacggcgttagatcttcaagaggttttgttaaggttaacgtttgataacgtttgtatgatagcttttggagtcgatcccggttgcttgcaaaaggggttaccggaaatacccttcgctaaagccttcgaggacgccactgaagccaccattttcaggtatgtgattaataattaaaatttaagtaattaataatcatgtttagccaatgaatttaattacatattttttttcaagaaaaataaatatttttgtacaccctatgtattttcaattattttataatataatttcatttttttttatttgacgtgacattctttaaattgttgaagaaatttagttcataaaaaaatgttaaaattaacaataaataataaataaaagtatgtaataaaaatatataatattttacatggaaccttgaattttcttataattaatatattggggaattatacttaatatattatttttaaattttttattatttttatgatttatgttgcttccgtagttgttttggtatttttttacgtgagtttttatatgaatttcgattacgatttaaattattttactttgtgtagttctataaaaatgagaaaaaaaaatcaaagtttacaaatgaaaaaactccaaatatatatatttgatatcaagttcagaaaatattcatatatatttgaaattaattatacattaagaaaattgatttctttggaatgtgttaattataataattaatttgatgattataggtttgtgacccccacctgtttgtggaaattaatgaggtatttgaacattggaacggagaagaaactgaaggaatcattggaaggagtggatgagttcgcggaggatgtgattcagacaaggaagaaagagctttcttcgcgttgcgatgagaagaagatgaagtctgatttgttgactgtgtttatggggttgaaagatgagaagggtgagcccttttcccacaagtttttgagagatatttgtgttaattttattcttgctggaagagatacttcttcagtggctttgagttggtttttctggcttcttgatcgaaatccgatagttgagcagaaaattcttgaagagatttctaaaattgtgaaggaaagagaagtggttgatgatgatgatgagatggttatggtgtttaaagcagaggagattaagaaaatggattatttgcaggctgctatttctgaggctcttagattgtatccttcggttcctgtggatcataaggaggtaattaactaacttcaaatctacatattattattacaacatcctattgattcttcacatttaatttaaattatatgaaactcgctacttaatactaaatataaaatatagtttttttaaaatttaactgttagagtatatatatatatatattaggtacttatgatgttggcaatttgatataaaactttactgatagtattaggcattacgggtgttatttagggattctctatttcttaagggtcttaagaaagaaatgttgtgttcattccattatgattagctatgaaatgtgtgttttgtataacttttttttaaggattattaaatttgtaggtagttgaagatgaaaaattcccagatgggacagagttgaaaaagggaaccaaagtggtgtatgcaatatacgccatgggaagagcagaagccatatggggtaaggactgtcttgaatacaaacccgagagatggctaggccgagacgggcggtacatgagtgaatcagcttacaaattcacagcattcaatggcggaccaagactgtgcttaggcaaagactttgcctactaccaaatgaaattcgtggccgcgtcaatcatctaccgttaccatgtcaaggttgtggagaatcaccctgttgtgcccaaattggccttgactatgtacatgaaacatggtttgaaagttcatctctctaggcgtgaccaaaaaattactacttcaaaggttaattaattaagtactaatacatcatatcatgtaataataatacagcacttagtgccctttttcttagagttttatatatataaaatatatatattataggaaagtgtggagtgatatgaccactagatgaagttggatttcaaataagggagtggttaagtggggatactggattgtttatatttagttttagtcatatgttgtttgagtttgtgatttgaaaaaataatcttttatctgatttgcaatgattatttgtttatatgtcattataagtaaagtttaaggtttctttcttatcagttacagacaattatactaaaacagtagtctgagaatgatggcattgaaaagaaaattatccaaaaaagcaaatcttgtctgtttggtaggttgttgttggtttgacaagtaactgacatgttttctcaatgaagaaaaaacaattttcaaaaactagtcactgagtcattgtaatttgtacgtgtgtagttggtgtaagttggtaaacgacaatcaaagggtatcttgttttgggcaattttaaaatatagaagttataatcaagttggtaaacaacaatccaaaggggtatctcatttttggacattagaagttacagtcatcccatcttcacttttcatctaaacactatttgtagaattacataatacatcacaatttcaagatgagacataataaacaacattagagctagagaagagattagacattacatggggaattgtagttatacactctctctctctccttccttcaagcttttccatcccattcttcatagaactctttaagatactcttccataaatttgtgcctcttctcggccctgctccgtccagcctaaaccatttatttcgagattttcaggggttttaaaaaaagcataaatattaaaataaattggtagtctagtttcaacattttcaaccattgtaccttggttttcatcatatccttaagcttaagaagcttctcatgaaagtggtttatagtggtctgctcatcttttttcatatactgttctttggataagtctgatcgcggcttgatgttaggatcatgtagaactctgttcctgctgccaccgaaagtaaagcatcgagcaattcctgaaatcgggagagaagttatctctgtgtaccagaatttgttccactttacaaagcagttagcattaaaacttgaaaagactttaaattcaaagaccaccaactgaagaaagattgaaacttgctaacatcattgagcaattgtgaacaactttccataattaagtacctcaattctgaatcaaatagttctaaaggcaaggaaaattatcgaattgacatattaccaatagcaccaattgcatcgaggcgatcagcatcttgtacaatcccaaactctatagacagttcaccaactccatgtcctgcaacctcctctttgaagcctgcaatttaaacagaaattattagttaacaacatcatttcttacgtatatgatgaaatagagaagcatagaaatgtttcaagaactctatttactcagctattgaatttaacagaaactagaatctacaccagtcatgtatatcaaacaagagaacaaataaaagctataaattcatcaaaaaaaaataaggcatgatgaccatttataaaatgacagcattagaaaagcctacccatgcccttaataatccccaagatcttatttttcttctcctcctccattccttctgcctccaaaaatttctcaacaattttctcctcagatggatctctagaaacagtcatttgaaagaacaagtcaagtaaaacactaaaataacaaagtgaacaatcaagagataaaaggtaaaaacttgaaaaccataatccatagacaaatttgtgttaggagatgacctgaccaaatattggtggtgcagatatccaacaaaaacagtgagacataatccaattatccataagatctttaaagatataaccatttagattgagcaagaaagtaagagcaaacacaaacctcacgtatttgtaatcacctgcaaaaatcaagtaagaacagaaaatgttagtaaaattccattaccatgaagaataaaatgcttcattttaaacatgttaaaagtgtaaactttaaggtaatggttggtattggaaactcacaatttgttttgccatgtaataatacagcacagaacagaactaaccaaattaatgtaatttaagatagataattccattgctaaatggtcatgataaaaaaattaaacaataaccagcaatgttgcttatatatat

SEQ ID NO: 17797 - DNA, 5415 bp, Cannabis sativa
  modified_base (3540)..(3547): a, c, t, g, unknown or other
gcaaaaatgacttttcccagcgcgtaaatgcgctggtaaaagttagattttagctactggaaatgtgcgctggtaaaactttgacctttttaccagcgtattttgcgaaatgcgttggtaaaagttacttttaccagcatagtagcgaactgtgttggtaaaagtgacatttcttgtagtgcatgttgaagctttggtttcatgcagactgggttagaaaagttcttgattgtatctcctcagtggaatactctattcccttgaatggggaggttattggttctattactcctcatcgtggtcttagataaggagatcccatgtccccttatttgttcttgctttatgcagagggtttgtctggtttggtgactcgtgattgtgacaatagtttattgtttgggtttccttgtgggagaggtggtccaatgatctcccatctcttatttgctgatgatagtctcttcttcttcaaggcttcagaagtggattgtttgagattcaaacaactattgcggtggtatggtgaagcttcagggcaacttgtcaactttgcaaaatcaatagtgtgcttcagttccaatgttttgagccttgagagggaaagtttagtggctttattgggagttgttggagtagattatctaaaatgtttcccatggtaggtagagaaattctaatcaaggcagtcattcaatctattcctacctacattatgaacttgtttaaactttctaaatgttttatcaagaatgttcattggatgtgtgctcgtttttagtgggctgaatgatgtgaataagaaaatgcactggtgtacttgggataaattgtgaatccataaagaagatggtgacatgggtttttgagatttgcatttgtttaaccaagatcttcttgcaaagcaagaagtaaggatctacaatgttcctacttctttggctgcttgggtcctaaaaggtttgtattttaggaactgaaacttttgtgatatagttcgatccaaacacggctcttttgtgtggaaaacattttatggggtaaggagcttttttgactttggagcagtttggaaggttaacaatggacataatataaatacttattcttacccttgggtcccctctgcgtctccttccttgattttggttcctcattttcatgatgagggtagcaaggtttcactgttacgtgaggctactgggtgtaggattcgagtttggtttgtgacctctttcttcctaatgaagtagagaagctatcttatctattccttggccttcctcaaatatggatgacaaacttatatgcaactttgaaaagtctggatggtactctgttaagagcgggtactagttggctcttcaaagtaaaggtttggtcgtgcttctccctctaggggtttctcaggctggtggaagaaaatttagaccctgaatattcctccaaagttgagaatgtttacctggcaagtgtcctctagttggatccctatgaagattaatttggcttctcatagtctcttatctgatggtctttgtgctctttgcgagatccatgaagagactactcatcataccttgtggggtgtccaactttattatcttgcaggaaactttgtgattttaatttgggtaaccctctttccactcatacgaattttcttagttttattcacaatgtcattgatcatttgcctaagggtaaaattgaattagttatggttattttgtggcgtacatggttcaaaaaataaaataaaatggtgcataataacattaaattgcctcctaatgtggtggtgcattgagctcaagaatttctttggaacttccaacatagccagactccacctgggcctcctctctctcagggacagatgaactctttaccttctgatgggattggttccaaatggtctcctcctttggctggttctatcaaggttaatagggatgctactattgataaaaatagtacttgtagtggccttggtatggtagtgtgtgatcacttgggtattgttctaacttctgctatatggcggctggacggttttcttgatcctgaagtggtggaggctttggctcttcggaatgccatggtttaatgtcattgctttgggtatgacaatataatctttgaagtggatttcttgaatgttatacaaaaagtggtgaacaaaatttctctcattttctctttgggtcatttcttggatgaaattagtaatagatgtttgttttatgcattgtcctagagattttaatgttattgcccacaccatagttaaagtcattattacagtgttctctatcactgtttggtgactgaattattctagttgtattcaaaacttattagtagctgatgctactcagtaatatatcttgcccccacttttgttgagattcatttctctaggtgttagttattgagaattttttcctaaaaaaaagtctggtggcaagaacatttcttctcaatatgtatgtaaatatatacaagatatttgagtatattatataactataaaattgatgctcttggcagcttttttagagtaattaagaaagaagtaaggtatacattctgcaaacttgggtaatttctagaagtatgaaaatttccagctttgtatttgctctcttattcttttgatattatgctttaggtttaaccctttgttttttttaatattttttttttaagaaacttagaaaaaataaaaggtttaacccatattttgaattgcaaagttaaaggatatttcttcgagacacatggataatgctcatcaattgatcattcctcctcttaaaaggaaatgaaaaggaatacaagagcacattcaaaaaggataaatgaaataaatcaagaattcattttattctttattctctcttttttatttatttatttattttaagaaagtccgtaagaagttttgttggcttttgataggagaataattggttgaatctatacgatagggttagggtgggataaaagagagattaagttgatgttagcgttttcccattttttttgttaatcataatcaaattttattcttttctttactttatgtttatgattgttataattctttattaattgtttcagcactgtgaatgaattaaaaatgcaatgaaaaaaggtttttcatttttattatttgatcatgcaaaaatctaatggtcgatgtcgtggacattttcaatttgaattgcttgaattggattgtatgtatatgtaacatcaaacatggtttggcttaattgatacattaataaagtatggaagtattattacttaatcaatactcatattaataatgttcagaatctttaataagttggtagaatactggagttgagctgaccaataccgaattttatatattttgataattttgtgaaagacatggcatggccttaaagcaattaatggacaaaaaatatacatattatttggatctttcttttatgttcttttattatgttttctcggaaactttttccttttttttttcttttnnnnnnnnctttttctttttcttcttcttttcctttggcaaagttttatatttcaaatcaaagtaggagaaatcaagaattgtttctctttacttttaccttttcttttcgtttgaaataaaagagaaataaaaagtgaacaaaagtaaatttcataaagcaaagaaagagattttcattcaccccatatactgattttaattttttaattttttattgtaagactaattttttttgtaaaaaaatacaatgtaagtcttatactgtgtaatgtattaagtttttcggttattccacggttgtttttttggttgtttcactattgttttaattaattttgttttttgttgttttacacttgttttaatagaaagattgtattttttataaaaaattcgtgtaccagtaaaattgtaaacttttacctaaaattcaatatttttgtaaaaattccaaacatatatacacccttacactataagaactagatttcattaaaaataatatatatatatagggggtgtaatacccataaaaaggatactggagtctttttatttttacttttttttaaaaaaaaaatgaacttatcattcaaataataattagaaagtacaaaaatgataaaaaaaaaaatatccatcaaattaaatttttaattaaccatgaatgtatacacaactaatccttgagatatcataaaataggaatacttcaggaaaattggtaaataaacttgtgaaatcatataatgatcgtagtacaatagtgtaaacatagagaaagcaaaactcaatgccaaattacaatcaatcttaaagtgtaaatgtagaccaaacagcaaacaactactccagactccatccataaaatctacttgaataatagaaaaaacccctacaaaaatattatagcaaaaacaaaaaattcaataaactaaaatatatactataaattaataaatttaaattgatttgataaagaggaataaaaaaacttatctcatcaatagaatctttgaatctccattacaatttttacgatagacaataaatctttaatattatcacaatatcaaacttattcataattaacaaaatttaactttaacaatatatataattacttttaatcatacaaatatatataatatatgaataattatgattaatttaataaaaaatatttatgttaaaatatattataaatcaaaagaatcaataaaatattataagacaacataattaatataaacaaaatcatttcaagttttattattatttatttttcgaatacgtgtcgaagttataaccacaattttatatatcggctggcgtgaaatatttctgaataggtattaattatttatggttattaaaaaatttcactctaaatgtcaattttaaaaatattgaaccatgaaatttgatccaatggagaataataaaagaattttaaatttttatacttaattttgctacttaataaaaaatatatcaacaaatatctcattttacactataaaaaatatgtttatctatgtcaaaaaaatatgttataaataacaaaaagaaagtaattaaaaagcctttttgagagaaatattgaccctacgtctctctaggtctgctagggttgtctcgacccgagtcctaagtcgtggcagatatgtaatgggaaatttgataatgcatgcttaaattaggtggtggatctttttgtattccaccctaaataacatagaatttttatactcccaaaaaaaaaagatatacccaaaaataccctccccatttcaaacactctccctctaacttttcctctttctctctttctctctctctctctctctctctccctctttctctctctctct

SEQ ID NO: 17798 - DNA, 3802 bp, Cannabis sativa
acaaaaggcctttggctattccaacacatatgttaaacctcgttgaccaatccagtttcaaaccactcttaccttcacattcaaatgataactacttagtttaccaaaaagttttgtaggtacaaatctatcaaagtaaatgataacttaatttaccaaagagtgcatgcccaagattattattttccatgtactcgtatactagtaataattgatttccttctatacaacagccataaagcttgactaaatttggatgttgcaaaccagatatcatgcctatctcagtaatgaattcacgattgccttgtcttgactttgaagacagttgcttcactgcaataactgtaccatctgataaatgaccctacatagtaacacacaatttaaatttatgtgaattaaatctcaattaattaagctcaacataaactatctaatattggggaatgtataatgtatcacaccttataaacacttccaaaaccaccttttccaagtatgttatcagaatgaaaatcatcagtggcagctcttaattgtctcaaagtaaatgaacctgttattaactccatgccggaaagctctgtaaacatgtggaataatcagttggtgttttaatttgtctttcgaataggataatcaagcaaaagtgaaacttcacttacttgatgtttcctttgcatgtttgttgttttggtatcttttccaagtgatgataccaattattagcaggattaggcaaaaaacagaaatggaaatgccaaccactataggtattctatttggtgagttaggttctacaaaaagtacaataaacaaataatggaaactatataaccataaaaagaacaaagaaaaacttgttttaaactcaaaatattgcattctttattttcataattatcaccttcacaatgggatttggaacctggaaattgtagaaaacaaatccatgttcaataaagggcattcctataaaaaccatagaataaatctgactatgaattcacaatatatttatgattgataaataacttacttggacacactgaaatagcggatacgagaataccataatatccccttttaggaacacaagtggttccttttccagcccaatagaagcgaatttccatgatattatcagtcacattgacattaaaatactcttggacaacaactttactaccacttcttgtagcttcctcatgtatattaaaatccactaacattttctttccctaaaaaaacaaagagaaacaatcaagaaagcaaagtcagtactattgttttacaatcagaatagtaatctatatattcaaattacatctacccatttaagaaaattaggtaccgaacaaatatatatttgttacataagtatttttcttagggagtaaaaataacttacttgaatatatatatcaaatatgcgacggccaacaacattgtcaaactcaagctctgcaaaatgtagttttacagtgtacattccattttgcagacatccaaagtaagtgagggacaagggtgattttcgagctgtaatatataaatccccactatccttaaacagattgttgtcatcgtgtacaacatgattatttatcttatcattgtcatccatagcatctcctatgctgctaaatccccaagtttttgttatacttttactcactgctgaattgtagccatcaaactcatcaccttcatatgtgagacttccattgacattcttcacagtcacttgtggtccaccacaatttatatgcagggaagattgatctgtcatgtttagttaaaacacttttatatattataataatttttttaaaagaaataagtgtattataattagagattataactaactaggtatattggtatatatgtaggaacattttaacacaccaataacaataaaaactctatcatagtaacaagaatatcagttaggacttattctattagtttagtgcatagtgtttagttagttctttctgttttatacttccgttatttcagttgtttgttggctgtcataacaacctttggttgttgttctgctattaggttttactgcctataaaggcctgattgtattttctcattatcttattcagacaattcaaagaaaacaacatatggcttttctcatttccgcaacatggtatcagagcaaggaggttatgcttccttccgatcttgattgcccttgtcgttccttctcgttgtgttcttcttctccttctccggcgacgattagtgtctgcattgaagaattcatctcttcatcgacacaggttttctctcaacatttctctttctgtaattactctgatttcctttacttcgtcttccttttcttgctgttatggcgacaaatgaacaagaagcagggtcagccgaaggagattcatcccaagtcaacaatggaggaaatcaaaatcaaaccacaaacactcgtttcaatgttcagatgacaagatcaagaagccagattgaggatccctcagatccgtattacctacaccccggagacaatcctggcaacgttttggtgtctcaattgttgactgggcaggacaactatattgcttggtgtagagctatggagcttgcgatttctgtcaagaacaaattggggttcttgaatggctctatccctaaacctcctatcactgaccatattctttacaatgcttggatccgtaataacaacattgttatttcctggattattaattctgtttcaaaggaaatctcatctagcatactacacgatgagtctgctgctgcaatctggaacgatttaaaggtgcgattccagcagaaaaatggagctcatatatacaacctaaggaaagacttgatgaatctcagacaagaaaatcaaactgtgagtatatactttactaagctgaaaacagtttgggaacagctatctaatttcagaccaaattgtacttgtaatgggtgttcttgtggatgagtcaagaatttacaagaacatcacaatatggagtacattatgtcctttctcatgggtctttccgatctttatgctcaagtgcgtggcaatatccttgtcatggatcctcttcctgaaattaatagtctttcttctagtaacacaagaagagaaccaaagaagaggacaaggcagtaccacagatcgaaactcgaatatggcctttgcctttcaaggagaaaaggcttcaagcaagggtgacactcaaggaccacctaaaactcagcaacctaaacgtggcaggcccttttgtactcattgtaacatgcatggtcacaccatcgaaaaatgttacaagatacatggatatccccccgggtacaacaaaggaggaaaatcaaaggatgctgcagcaaaccaattccaaacatccaatgaaacaggttcgggtcccagtgaaagcaacaccttgctgccccaactcacagcaaaccaatatcagcaattgctgaaccttcttggtgctcaaactgttaacggacctgctacagacccgagtacttctaatgggaactcaggtattatcttaacaaattatgctatgttatcgaaagagaaatcttggatcatagactcgggtgcaactaggcacatttgttctgacttaaatctattccaaagtgttcattttattgcagaaactaagttaattctgcctaataataacagccttctagtatatcgaagtggtaatatcaaaatgaacaatcatcttatccttcatgatgtcctatatgttccttgttttcattataacattatttctgt

SEQ ID NO: 17799 - DNA, 5046 bp, Cannabis sativa
tttcatatgataacaactaaattattttttagttgaataataaatattgttaaataataaaagatcagttttgctatttggtagtatagccagtgtccaaggccacattagattacagattttgctatttaacttatcttaggagtatgtcatatcaaaaagcattcccaatagatgctctataaatttaaagtgaaaacaaaatttatcaagaaaaaaaatagcacataacatgtgttctattttatataaatttttacagcagtggatagtaagcaggactattcattactcttaaagtttttgttttttgttttaaatacattattcttaaagttaatattttattagttctttaaaatttaaattatttttttgtgtaggtatttgtataagttaatattatatatttaaaataaacataaaaaaaaaatagaaaattttttactgtaaaatagataatttatcattttaataatttattttaaatgatagggaaaagaagttattgggtgctcttagcgatacccaaaacaaatatttccataactaataactattaattttacgatggatttatagtacttatataataagacaccatactatgctttgagataatgactaaaattaaagtttgtagaaacttagctaataaacctgagcactaaaaatatcaatgttatattactaattcatttacctcttctcggagtcttgcattctcaaggcgaagctgctgttcgtcaaaacccatctctcccatcacagctggactaccacaattagggcaactagcattacgaagcgccgcctgaagctggaaattctcattctttaatgtctcattttcagctctaagtatctgattatcgttacggtcttgttgtgcctaattaagataataaaaacgtgtaatatcaaattaattacaattagggtattaaaacaaagatacagaccaacaatcataattaattaagttaaacgtccaaaaagataaacgtagctagttaagacctttccgcaaatacctggaagaaaaaagagaaaaaaagaaaaacaaaatcaaacaatactctattttccaccttccgtaaccctaaatgacaaagcatttattttgttcaaacttttggaagcacaagattaggtagcggtttattgcgcatccctagctcatttatgaaatatacagactccacattaactatttctatttctatttctttataaataaaaagttggtgacggggggtgataataaaccaccagaaaaaaaagaaaagaaaagaaagactagataaatattgattaaaatataaggtagatatcttcctgtcttttccaaccctaatataattaaagagccgtttagggaaaaggaaaaactttaatacgatcaagcaattaaaaccccgtttaataggggatcgtgctagaaaaatgagcaatattttgccattatcttagggttatttctttttttttcttttttggttttgcatgtagatggatattagagtgaagtacaaaaatgttaataccttcatctgggtacgcctgttttggaaccaaaacttgacctgccttggcttcaagcccaaatcttgactcaatttcatccgttgcttatcatctggatgtggacattccttgaataatctgcaaaaatgtgtaataaacttatttttattttgaaattttgcaaataaaatttgtccccttaaaaaaaaaaagcaaaacaataaactagagtgtttaattttatgattaagaagtactatacttacgcttccatttcttggatctgacgagcagtgtggcggtgatagcgtttctttttgccttgctgctgaagcagtagttgatcactgctattttcttgttcattccctgacttctcctccatctgctcgctacccgaaccgctctccaacatttcatcctttcccctatgtaacagcgagtgttcttccttctgtgaacaaaactttcttatatgtcaacgttgtttggcaaccatgaaaacaaaatggctagcggctggaaaataaacgaaaaggaaaagatccctatgttattaaaagtcatcaaaacttacaggaaggatggtggagaagggttgataaggcatggtagagatgaagttgaagttagggttttggatcggagatgagaataaagtttctgaggaaactacgttcccccccatggaggacattacttgacaatctccatacatgattttctctctctatatatatataccttttcgtcttcttcacttagagagctcgaatcgttttaaagctgcatttatatcaattttgttagtaccaaaagttaaacaattacctagttccgaatatgaaacatgcagaggaaaatcgcccattgcgacggtgacacaattttcagtcggaaaagaataattaaacaacaaaatttaaaaaatcctttttttcgtttctgctttttaatcgaaattttccctattgcttttatttatattaaaaaaaaaaacaaatatgagtttacatatgaggatatatgcacctaaaagtaatatcttacttatcactcaagtcaaaatgaagtagtaaacattgaaaataaatcaagcgaggcaccattaaagaagaatattatgaagacaatattcaagaccaacgagagaaaaaacaaattaatattaataattaattataataacaataaaggagatggaaaacctcaaatatgtatagctgagtagtataatactactagctgcgtagaaaccaaaataaatgaatgtttgaaaatatttaaagcagaggaagaaaagtgaattaatgccaatatatatttaaacacaaggactgtgagacggtgagagtaaataacatggccatgcacacacctttcttctgtcggcgtctttgatggaaaatgaagaacatgaaaaagaaaaatccaaaatccaaaatctctctctcctttcctttctctgtcttccttacaattttataaataaatatatatagtataatgtatatcaataccactcactcatgactcaacgccataataaatcgcaaatttattgattttaccgtggttggtaaataaatgcgagggtttccctttttttcttttttcatttttgaacagaaagaaacagatcaacgcatctctcctcgtcagctgttattttacacatgtcgtaaaatgagtggaggacttgagtgtccttctcgggcagtgtttaccaaaagtcaaagtcataatttttatttctatttttctttatgaataaagtcaataatatttcttatcttatcactgttttacaagagtgctgacgcgtgatgtacaccctcctttctaattgatacgtggtcacactcgcgtattagctggcctttccttttatattttttcttttgaaatggccttttgcctctgctatttttttattttattttatttttttcttttcgtttttttaccgagcctttaagaggtaagccgcttggggactggaattgactttgacaatgatggaattttttttttcttgaagacaatcagggaaagtttttttttttttttttttttttgataaaaacaatgacggaatgttagaaagagaaatttagaaattacactgatttagagagtaaataaatcacaatcgtcaattcgggtatcgaatcatctattcaaggaaaacataaggtaagtattttgtgctgaggaaaaatgtgatttttattgttttccaaatttcctatacttctttcattagcacaaaaagagaaataattaaataaaaatcaaaaaaatcgtgctataccatttttttcttcacaagaatcaagattgtgaataataattttctcaaaacattagataattgattatagacataacagaaactaatataggttttcttttttttgatagaaaaatatgatcttaactctaattttttatcatattgttgaccttaaaaagtaatcaacttacagcaaggttgtatagatctgatgcttgccacatgtgacacaaacataatgaaaaagtataaaacacacatttgttatagatgttcggcccccttgtgatagcgggtaattgacctactccctttttggttgtattgatacttaaagataatactatttaaattgtcataggtgggatccgatatagctctctataaacatacaaaacgtgaatcagtaggcaaatatctaatgacggagccatattgccttagaggcgtgtgagagagatgaagagaggaggccctattggacgtgtagcagagagagagagaaagagagactagagtttctgacttatagtgatttgaaggcttagtgacttaggttttttaagttagagttaagcccaagcctgaaatcctaatttacaataaaacccttagatatttacatattaaattgattaaatacaaaagactaaactaccccttgaaagtagatatttatcatcagtttgttgggctgttaaagggcccaattcgtaagtagcttgtcgtccacattttgggctgtacatagagtccagccatgttaatcctagccgcccatagacctacaagggaggtctggccgaccatggcctgcaggttgagatctggctggcgaaggcctacaggttgaggtctagcctgccatgcttctactaggttctggtaggtcatgtgtctacaaggatcctgtaggccactatagctctactaggaggaggccagccttttgatgtgaaggccagccttttgcaagttgaggacagctttgtacactgtttccttgtagaggtcaggttgccttgccgaacggaagctcccttagtctaaaagttactttttggccagccagcttgtgcctagatcttggtcggcctatatgctcaccctggccggcctacaagcttctcttggctagatagggatgttggtacatccctttgatggctcgctttactcctttcggttgctgcataacggtttcaccatatcttgcatggaga

SEQ ID NO: 17800 - DNA, 3336 bp, Cannabis sativa
atgcgctagatttattatgcttcataccaaatttgatgatcttaagatgactgaaaataaaacattgtctaagtttgtgcttgtcaaaaaaattgttagagttgttccaaacaggtttgatactaagctcttggcaatggaagatttgcacacctttgaactaaataaaaaaaaaaaaaaaatttagcaaaaagatagactcaagtctataattgatagaggtaaatgtatcgcttttaatgttgctgaaaaaaaagttcttataataattgtgatgatgaaatgtctttgttaactaggtattttcaaataattataaaaaagatggaaaataaaaaagttcacttaattgtcaaaggaaattgcatcgtttaagccttcggtaactaacaataaaaaaagaattcagtaggagtgtgaaggctttgggcacatccaatcagaatgtgaaaacaccttgcaaaaaaataagaaaaattttaatatcacttagagtgatgaataaaatttagaaaatgttgcactaatctatgtttatcctgatttgtgttgcgattaacaggtgtaagaaagaatggtatgcttgaatagtactatagaaaaagaaaaatctaattcagatgaatataaaattattgaggagtccctcgctcagatataaaaaaattacttaatattattttattttctttgctttgtgccttatcattaatagaattattcattttcttcaaaataataatcaatttttcaatataaaaaattttcttcaccagcattttccttacttctttccttctccatgagaattgaacttcacataaccttgagaacgtgttttctttctctctcaagaaaaatattaatatttgctgcagcttgataatttttaatgaagaatattagcagcataattatctaaatttatgaaactattgttcttaaatacttaactactagtttttgaagcataaaattaagtgaaaaacaaggttgcagcaaaaactgaaaattaagtatttatagagtcaaaattaaaatttgatatttaagtacaattcataaaccatttatgccactaatatctcttattttaatactatgaaatgggaactcatgtggcttcgatacaaattattcagagttgctgtaatatgcaaatgcagtggctatggctatggctatgactacaaagaagttgaaataaagaagtttaaaggatgaaaggccaaaaaaaagaaacaagcatcagcggtttttatatagctttgctatcacacaataataatcataaacattgtcattttggattcagttcctgctatctacaagattacaaggtatgagccatgaatcaaaagccttcatcaaatcatttttttaaaaaaaaaggaaagaagaaaaaaaaaaagacaatctctcctcacattatccacaacaggacataacacatgcttccacttttaccttttcgatcgcgctcactttgatgttgcagcaaacttttcttgaacagcaacaggaaaaagaatgtaaattccgataataatatttgaaacctccatcaacgaaaagaaagaaagaattgcttcacactgaatcgaccccctcaacttgttgtcgtgccaggtatctttcccttcgctctttctgtaaagcaaaaccagaaaaaccaaattgagcagaaattagactatgcatggttaaatctacaaaagcacaacattgaagaaagatgaaatatattcaatgcattacccattcatctatgacaagtccttccccaacaattctggggccagtgtcttctggaggctttttacgtgcttcaagtgcagcctcagcatccgctaattgtctcttaagcttctctagagccttaacagaaaaacaaaattggaagctcttttcaatctcgatgaaaataatacgatacaaccattatattattactaaagaaaaacaactcagcaacatttcccactcaccgggcttggtcgttcagggtcgaggaatataactcgcaaaatttgctcaacagccacttggtccttttgttcatcaaactgcataaaattttcataggatagatttggtaaacaactttatagtaaattgatctctcttttggttttgccaaaaagaaaagaaacataaatatcacagatagaagacaaacaaaaattactttaaaaacccattacaagagtctccacagcaattaacactaatccagaagccagttttcttagaagcagaacttaaccaccacactatcttgcataatgtatgaaggtatgcaagtgaaatacaagactcagtgggcaaaaccaacaaaagatcgtaaaaagatttcgaatggaaaaacatttataaatagtgattaatctggatatatggtgtttcaaataatagtatcttcagaaaattaaaaaataacaggatatttgaactcaacagaatcggtccctatcatagacattagtcgtaaagcaggatagaatacatataaaaggaaataccagttctggaacgtagtccatttcccctttcacttttagactcatgattttgaacttgactctgctcttctggtctactggtttttcatggttctccggaggttccacaaacttgaatactgttagccatgttaaataatatcactatcaaatatttcatgtttcagcatatcgataataaaaaaagagaggttgcatgatagaaactcaaagcagagagcataagaagtagaatgagcacaagaaaatacgataaaaaagaagtagaaggaaagccaagaaaagtgaatttaccggttgcaataagactttcaccgggagcaagtatacccccaggaggtcgcatataacagctcttcggcgctgttgtttggaactgaaaaaagtagccatgttattagttcgatcacaacaacatcaagacccaatgaaatctattcgaaaaaaaggggggagataatttcaaatctaacgacataaaaaagttttaagacattacagttatctctttctagaataaaataatgtcctacttaactaaggccttttatgctagccaaaattaaaaagaagttagaattaatttccccaacttctgattaaaatacaaatatacacagattgataagaacattaatgtacatttccaacaaaaaaaaagtttttactgtttgaactatttacgtacatttccaacattaagaaaagaacaaccatttcttgtccactgtcaggccttaaaattagtctcactagcatagctcattagaattatgtggctgtgttcagtgtttctaaatttgtgtcttctaat

SEQ ID NO: 17801 - DNA, 5973 bp, Cannabis sativa
aatatgtggacagtattcaatcacatagcactttcatgaatgtgaatgatttgttgttatatatcctgctgtgtcaaagtgaaaatatgtgaggtgagatgtagttaaagagagcaaaacttttggcctttttttttttaaagcaagataaatatagataccatctcggtcagtcttcccaccatatgatgatattcaatggtgtggtttagttgctgaattcacaaatttctagtttagttttgaataggagtgtttctatctctatattgctatttggtggtgtcttgcaaatggttagtaatattgcataataatttttaaattaaaacatgtgaaatctgatatgtaattgcactacaagtatttcacttttggaatgtatgtggttgttgaaataagcaagaaaaatttaaggaaaatgctatgtatcatgaaaatttaataacagctctatctccagaagaatatttcctatcaggaattaataaattttgaaacgaattacactcgaaacaatgaattttagatgatacagttaagataaacaattgtaaaacataattgtttaccctctttaattatgcatttcatcttggagcagaaagaagagatgcttgtggtgccacagtaatgtgatcatttgcatcagaggcaaatgccatggcgtgagaaaacttgtagctgatatcagggtcaacttccataagtccttctaagagctttactactgtagacattgaaggccttttcgtgtgatcgttctgcaaacaccaggctccaatccttatcatttttatcacttcttctctattatttagcatgtcatcatctaagttttccacaacttcaataagattatcctcttcagccttcttttgcaacatttcaagcaaatgaaaacttgactctgatcgcgaactatccacatttctccttctgctaacaatttcaagaacaacaattccaaagctgtatacatctgctttgacagtgactattgatttttgcagctctggagcaaggtaccctggagttcctctcattgggataaggacttggctctcatctctttcaatcagctttgataacccgaaatcagagacttttgcatggaaattttcgtccaagagaatgttatgtggttttatatcaagatgtataattttctgtcgacattcttcatgaaaataagctagaccttttgctatgtcaagtatgatattctttcttgtttgccaatctagatattgtgactgacttgggttgaaaatccaattgtttagtgacccattactcatatattcatagactagaagtctgcaagatttttctgcacaaaatccaaccaaccttacaagattaaagtggtgaaggtttccaattgtctcaacttcagctaaaaactccctcatcccttgactcattttatctaagcgcttcactgcaatttttgtgccatttgctgctaaaatccctttgaaaacagatccaaagcctccaacaccaagtgtttccttaaaattctctgttgcattcagtaattcttcgtatgaaaaccgcaagggcattccaagagcttgttttagattgtcctccccatcatcttccttttggttctttggtaacatcacaataacaacaataactagaagaatggtggcaatacctcctgcagtagatgctgttatgattgtaatcttttttcgatgtcttactatccaagatgatgaaggagcctccagttccccattggtatttagtaccttgacaaatgcaagtacgttgcttttatctgtgctgttgtgttcagtagaatagatctctgatggcatataacaacttccatctgaattatcattgccattcctgaagacaactgcaatgcacgaacaattttgcagacaagctgttttgcaatcgtcgattgttcttgtgggcacaactccaaaatctgcattgcttatgttagtgtaagcaatgtctcttacctctgtaagaaggtagcgagccgatgaattctcgcattcttgagtgaccatgtcaacattattcatgctcgaaccctttggattatataaataagtctttaaacgtccaccttgatctagtttcacaaacacaatagagtccagaaaattggatgccttagatgttcccacattcacaacaaactccgtttgtttagttttttgatactgtagtacagagtgatttcttgaattgtcatccagtgccaactgataatacattagagattgaccatcactagtactgaaaaaggcagagaaataagcagctgttgttaatgtggcaaagaaggggctcttactccattcggtcgaaaagaaattcggtgcaagtttttgatccttgttgagtttctgccccatcaacaatgtgtctttggggtgatcaaaagactgccaaagcactgctcctcgattaccaaacagaaccaaattcccagcttcagttaggttcattcccaccacaggcttaccagatgtattagctgaccataccataccaccagctgaatctcttagtactaagccatcatctcttatcagttgaagtgatgcattttctgtcacaaaagattttctatcggttgaccaaactacagcatgatgtccaactccaacagcaatgactgaaagcaggtagaaatcactagtttcatcagagtaaaatccgcagtaaaagccgatactacggctataatcttgtattaaaaggataactctcatcttcttccctccatcgatgatcactgagttgttgttgtaccatgttgatggaagtcctgaatcaaaatagtatgtgtagctggttctgggaaatgaagaatttccagtttgtgcaaccgaatacctgacaaagaaaaccacaccaaacagaatccagagattataaaataagcaagacatgcttgcttcgaaaaattttatgctttcttttcttgagactcctagaggacagtaaaatccttatcacaaaatgattagagattgatagaggatcaggagttgaaactttacgacaaatgatgccctctatgtctatgacagctagcttgttcacattaatggtgcggtaatcacggtctcaatctcaaatcaaacaagatgctgctgatgtaataacattgtacagacaaataaaaaaccagacaattatgtaatggaaaaaaactaggcaactgtgttttgctaagcaattagcattaatccaatatatgaaataaattaatgtagatggtgacggtccaaaaacaaacaatcctaaaccaggaaaaggaaaaagaagatcagaaaaaggtaaaggaaaaaatgaatactgtaaccaaagacttggaattttcaaagtcaacccaatagtttgtccatttctagtaaacccacatcacacgacatatgaagtcaaccagcctttatctctcattttaaatttgtatatatataatcatgtcccatattatattgcttccatatatatatatatatatatatattataatagatagtacgtacttatatatatacgtaccaagttatatgcattgatcattatattttagactatagatatactggtaccgtacgacaggagaggagaccaagttgtggtggccacagcttcactaacaggtggatcgcagatcactgatttgttgtcgttcaacttgcgtggttttattgtttcagtagcatttatagcattaatctataaatttatttatacatacactacaacatttatatatctcactcgatgagtgagatactaaggagcaataaagctttttaaaattattttctcacctttataagtcatttattggtgtcattggcttaaaaagagtaaagtgtaacgttgacgttgtatgttcaagaaaagtttcctcaaagcaattcttaatagaattttaaaaaatatatactagaaattggtaaacgaattaactggaacaaaaacagatggtcaagcaggcaaccaactatagctaatcaaaagaaaacgacacactaaaaactattgccaaaactttagtccaggttgggggaaacataggaacaattttacagataaatttggtgattttagtacatttttaagtaaaagattcttacaacaaatcaattcatttcacaaagattggtgtgagacattcatttataggaaaaaataagctaagaacctcaaaatcttggttattagcttacagtgctttgctgaagaactcttttctgcaaaatggattgactaacaccaaccttcttccttattctaaaaaacagaacagttccctcttcattcaagaatgagtgatctcaagtttctctttagctacagataaattagttcccttttcaatcaagaatgagtgatctcagagtacagaaactgaaaaaaaaatttcaatatgataatcatattgattttttttaaacaaaactcccattgactgtagtctgcaagaatgtggcaaatctctcttcaccagtaatctccacaagaacaactcccttttttgaagtgatgaaatctactagtgtcacgtacaataatttctctgttttttatctgagatatgtacttaatggctacatgacaatcttcacatacacgcaaattcttcatcacccttattggtgtaccttcactagtattcattaaggcaaaaacaatcgccaatttctcactgtgatgtgccaagttgttctctttctcctcaatatccatgtcatgcaaaacagatccagtatcaggtgtgtaaccacgcaacttcatctcagcagttagttcaatcagatacaagtcaatttccattgactttggatgagatctatcacccatacagaactgatgaacttgattcttaatctccagccagcttatacctggttccttcttaatgttattatccttcatggtcttcctcacctcagtaacatccttccaccttttcgcagaagcatggatgttagagagtatcacataagaagctgaatcatgagggtcaaccttgagaacttctctagcaacccgaatcgccatgtctgcattcttgtgtatcttacacgctgatagcaaagttttccatatgatagcatctgctttaacaggcattgaccttatcacagcctctgcttcctctaaacagcccgagcgtccaagaagatcaactatacaagtatagtgctcaagtctaggcttcaatccatacttttttaccatcatgtcaaagagctccatcccttttttcttcattccacaatgactacaagcataaagcaagcttaagaaagcaacatcatttaactcaactccttcatcctccatcttttcaaaaactttgattgcttcttcacctcgaccatgaaacccataagcagcaatcatagagctccacaacacagaatccacatctttgctttccgcaaaagctttcacagagtcttccagacatccacatctcgagtacatgctaactaatgtgctaataacagcaactaccgaacataccccagctttgattgcctcagcatgaatctgctgaccttgtcctagtgttgccaattctgagcatgaactgattgcactaacaaaagtgattttgtctggcctaaaccctgcgagtttcatgatattatagttatccaacacgtcctcgggatacccattttgcgcttttcctgctataagtgtattccaggcaaccacatttcgagttggcatagagtcaatcactttctctccttccttcaagctaccggactttatatacatgtgagccaaagagctcccaacaaccaaatcaaactcaaacccacatttgaatatgtaagcgtgaacctgcctccctccatatagagatcccaaaccagcacatcccctaagaatgctaccaagggtgaactcatcaggtgaaaatccaagcttatgcatttctgaaaaaaggcaaag

SEQ ID NO: 17802 - DNA, 2878 bp, Cannabis sativa
  modified_base (712)..(713): a, c, t, g, unknown or other
caaaaatcttaattaaccaaaaattatatatagtaacatatgtagtagtttttgtgtcccacccaaattttatatgccttacaataattcatcatcgaagtttagcaaggtgcatcaaggcctatcaggttaattgatgtctaatcgcgaggtgtgtgctaaatgtaaaaaaaaaaaattaataataaaataaaataaaattggtgaggtctatcgaggtccaacacatcatcttatgatgaatcttcggtaataattcttgagccctaaaaatgatcttaactcactcaccttggttggtggaggcgtggtgaggctcatcgaggtgaacatataaattagggttgttcaacaaaatttaaaaacggtctaattcgaataaatcgcttaattcaataaactgtcaaaatcaaactgaataaactgataaaaaatacaactcaaatgactttacaaaaaattcaaactaccaaatgaatatattaggcgggttgaatattattatacaaataaattgaataaactgatttacatattttatactaaaattatatctataataaataaattatgtttaatagttaaactattttacatttaaagtttgtaatttatagtgtttgatttgaaatttaaaatttataatagataattttgattgtatttgaatattgaagttgaaatttaaaatttacatatgagtatatttttnntattctattttttgaaaaatattatttaatactttaatatttattcaatttatatttattttttaacattaatttaaactataaccctttttaatcttgaaaagcgtatactatatatttatttatttttcaaatcaattatttgaacacaaaaaattaacaataataaaaaaaaaataaaaaataaaaaattagttaattaaacgggctaacccgactaaaccaacaaatatcattgggcggattgcatttttttattttttattgaacgggttacaattagatattttcaacccagtatttatgttgggttggtaaaaataaactataacctgaccaaaaagactgatgtacacccctaatacatatatctacacaagagcctgttgataaggctaagtattgcaagcttatggataagttggttataaacatggtaagttaacttcgagcatgtatattaagttccaataaatttagtagtttgcaagttatatttttcttttcgagtttgaatgttaaagttgagtattaagaacaatcggatcaaaaatctaatattataacaatcgaatcttgtgagtagtgatagtgtggtgtaaattgaagcaaggcttgctattgtttgtttgtttttagtttagtttagtttatattgattttttactcgaaggcgagtaaaggtcaagtttgttaagactgaattagtcctatttttaattaggatcttaaagtatttttaattactattagttgtattttgtgcaattttacgcttttagttactaatattttcaggtttagcattaaagaagaatagaacgaattcgagagaaaaaaatgtgcatgtaggataaattaaatgaagttttgttgatatagcaccaaaaaaataatccaaaagatctagtgcgattgaagcctttaatgttgaagaattggaaagtgaggagtagcgcctcaacactggattgcagcgccagggtgctaaaacgcataaatttggcagcaaggtcttggaaagttacattcatttctgccagaaattgtgcttcaagtgttgcaacgctaccttgtagcatcgcggcccgctatggaaaatttaaaaaagggatttcgtgcctagaagacacgtcacaacactactttgtagagtcacagtcagacttttttaaactgcgagaaagttagggttttattttttttagctatataaaggcctggaggagtaaaaaaattgaaacagaaaggggctctggaggcttttatcaacttttattcaacgagttattttttcttctactcttttcttatgttcttaatcaattgttatgagatgtttacaatgactatgagtagctagacttttaattagggttattgatggagatttcttgacactttattttaatttaatataattctattcttccccaattctcttgtgcatttatttcattcgttcttaatttcttttaatttggctatttttagcctaagtttcgtttcacattaataagtattttctcagttatggtagcctttctggagcggttctacgcttgattttccttgttttaggttcccggtgcattgtagttcaaattcagtcaattggcgaaaacacaagacaatttggttaaaaatctgttgaagctgccgaaaatgtatcagtagtcacgaccatgacaagccctagtcgcgacccttttctctggtcgcgactatggtcgcgacttaggtggattggcagaatacgtgtttttccatttttgcctatggtcgcaaccagccattaaggtagtcgcgaccaggtacgaaacacgggatttgcgacctaattccgatatttttccaattagaggcacaaccctaattcctgtataaggactcgactcaaatgatgaaaggcatcagaaatcggcgccgtaaagtgaatgaagaggagaggaagctatcttgacgaaccagagcaaaatcaccatctagtttctttcttcaactctttaatttctttatgtctatttctgttctagatttaatcctggatgatgattttattttcatgaactaaattcccaattgggaaagatgatgaatgttgtttaaagttttgcctagttaatgtcaattgccattcctttaatcttgatttgtgaaattat

SEQ ID NO: 17803 - DNA, 6270 bp, Cannabis sativa
agtaagtttgacattagacatggacgagagaagccaagagtataagagttgatcttgaacttcccattctatgaatctcggactgacaacaccacgagcttcatcttcatcacgaaggaaacttcattgaggtagaatcgtatcagagatatagtcttgaagacgatgtccacggattgtagataggatctgaggttgccataacagaaaattgctatcattaagtttgatagaaactttgtgagaaaacacaactggaataaatgcaggagctaaagcagaagattgagtagccatagaggactaccaacaagaacaacaacagcaaagatgaacaataaagatgaaacgcggaagtgaaaaaaaaaaaaaaaaaggctatgataccatgttaagaagaatgagagaggatggaagtgtgaattgtatattcattactgaaattatgagcatcaaataaatacaatgtatattaagctgttaggagaagactaacagaattagttacagagttaactgtacaacagaacagaaataactaattaatcctaactcacaactgtacaacaaggcctaactaacattatacatcaaatattatggtcaatggaaatgaattgagtttataagcacaagcagctaatacattatgtcatacatgaagaagtgctagagatgaaggtcaactcttgcattttaattaaagtaccatttgatcaataatttatacataaacatatccataatttatttgatcaacaatatatatttatattatattgtaaaattatttaatatccctagataagatataaagtcaatgaatattgtatattgaagagaaatcgatctagtactagctagctctggtttcaggtcatctatggcagccgctaagaagtgagattaagagaggagaatggatttgaagtaaataagtttaatttgtttggaaaactaactttattaatttgtttttgtagtgctcaagatgttgttaccatcgatgtatatacagccaaaggtcttctcagcataggccatcattatttagacgtcaggttagttagcactatctctctgtttttagtcttctactattctgccttttcaatttcaaacaattttaatttatttcgtctgattcaacaaaaatgtgtttgtatttatattaataaagaactacaaaattacccgtacatgttacattttctcttctttaatcaaatatttctctaccaaaaaatctgagtttcaaacaaacagaaattttacttttttttaaaaaaaaaaaaagaaaaaaagaaacaaagagaaatttaaaatctgagttcatagagattagagaagagaatttaaatatatatatatatacacacatatatacatgcctctatttgttatgaaattaagtatcttattacattatatgcagaaccgttgaggaatttaataagagtcatgttgaaggcgccttgaacgttccttacatgctcatcacccaagaaggtaaactttgacatcaaattcctttaccaactatatacatgaattccttttttttagaaaaaaaaaacgatgtgcatgaattgaacatcaaaattaatcaagaattggtgttgaaaatttaagattaatttctttggacctttaagaaggaaagaagtatatacaggaataattattaattgacatgcaagatacttatccatatgagatctgactatctatgttttatttatgggaatgattgatcaccaggtaaagtaaaaaatccagaatttctgagccaagcttcagcagtttgcaaaaaggatgaccatttagttgtggtaattttattactgtttatgattgaacacaagattttactgtttgttgactattactttttttttaatcattattattaatcttggttataaaaatgtgtaaactttataaagcataattgcactcatgtgtagcatataaatgatgggagaacaaagtggactagaaagtagaaactactatttatttcatatctgacacaaatatacttgcatgtactcattcaagggttgcaatagtgggggcagatcacttcgggcatgcgtagagttgcttaatgatgtaagtttatttaaatgaactaggatttaacttcttaaagtggagaaaatgttgagatgttggagaaatcaattcaaatggcagggttatgagaacgtgaacaacatggaagggggttactccaaatgggtggacagtggacttgcaggtgacaaaccaggacaagacttaaaaacagcatgcaaattccgccccgagtaatgatatgtgcacacaaaaatcacacgcacaagtgatatgtaattatgtgacaagtcattttaaccgcttatttttatataagatgagtcctacttatgaaaagtgatttaataagcccctactcaccaatggtttatttgcctgaaattatttcagggaactaggagtaattaggcaaaagtttcttatgatgttccatttttttttatttcaactttgtaataattatcagtattcagtaccctctgtttttctactgaatctgaaggtcattcattgtaatatgcatttcctggaattctatattatttggatttcaaatataaatatatggattaagcatagatcttacccttcctgtattgattattcagctcctctcctcaccccatctttgtatccttgtaatcacctattcttttaagttactaaaacgatataagaacatagagatactcaagatatatagtaagagagaaaggtttcatttgccagtcaattcaaagtatctatgcttcaggattttatctattcctttacatcaaaatgtactcgaatcagatcatgactaagaaaacttgcataaccctgtttatacaaatagccattccaggacacaaaatccaaatggatatgcatcaacttaccctgctctacttctacagtcatattaaacgcctacttcgtaaagaactgactcaagggtagatcaggcattcaaccacagaatcctcagacctgagaagaagtgcagtccctggaccagtgccctggcttaccacatttaaagcatgtgccagaagcagcagaagcagaagcagatcttcctccaaactcagcaggggtgtttgatggagaaacagaacaatctcttgcccaatgcccatccttcccacatttaaaacaggaagatccagtttttgcagtgaagcttgtgttgtttgtgtcactcgagttataactaagcttagaggcagtgactgcacgaccagctgatgcagtttggtcattgcaccacttaaagaaaccacaagagcttccctgttatgaaaaccagtaaaccaaaaaacgattcatcatctatagaagaaacaaacactgaaatattacaaagttagaatgtcattgtcaggttaggagtataaactgctaatgtacataccaagcgtaaatgtgcattagcatccctttctgtgtccattttaatgagatctaaggctctactttgtttttaagttccaaaaaccttgctcacatcacaccaagctttacacattgagacatcatacatattgatgctaacacaacactttcaattacaaatgtatgattattttttattttatttttctaatggcataccttcttctctaaaacatgttactaaaccgttgttgaaaagaaaggtgtaagggaagggtctagaaagaaaggaacaagagtaagaaacagaatttgattccttttctcaaatatatttatctattagaagttaggaaatgtcattaatctaagcacctaatccgttcactactatttacacaaccttataaatctggaaatagtcaatataactcaataactacactatgcttctctcggaccagcacttgcagtccaatgtcactttcttctctgactgtaaggtccttgttaaggccatcttgagtcgaagcctcgaaggtgtcccgattggtctgtgtctaatgtagttttctccatcttcaaatgttgtcttgcttttgttaatgttgagttcatttggattcctagaagttataacaagtctgcccaccatgttgcttcttgggctgcagactttaactttactggtttggttcctttaagggaggtaaaaccctttgtttccaccattgttttcttttgaatagatgttttcttcatagcaaaagaaaaagaaaaaaactacactatgcttctacaaatattgtagggtttagaccgggaccctaaataactttacttcgcatctacaaaagtcatttattagattgaacaaaataaaaggcaacgaaatataagaaattgtgtgatcattttcaattggacaagaaggaaacaatgagtgtaaataaacacatgaaaagcaaaagaaaacaatgttttctctttctaattatgcatttaaattagtaaacgtgacctttaaattgggttcttctttgcctacctccagaagaaatctaaactaactaatatctattgcaaacaatggaagataaattgaaactaaattggccattttttatacacaaataacaataatatatacatatatgtacctggtttgcaggacagcgatagaattgctgaccaacattgttgccagtttttgcagtcaaaattaagcataaaccagctccacaaggacattgaatgcccgggtaattagaatcactagtataactcccacccgccatagaattagctccagatgcattatcacaccattcaaagaaaccacaacctccattctcctgcaccaaaaattagcatgaaaataaaatccaaaaaataggaaaagattaaactaacaatcaatcactacctgtcgaacaggacatttgtaaaactttcggccccgattcttctcagtatttgcggtaagaaccatacaaattcccattccacaggcgcagcttttttccggaatcgaagggtcggatcctccataattactatactgacccgctccgccaccaccgcctcctccaggtgcagcatcacaatcgcgagcccagtgcccagatttgccgcatttgaagcaagaatcagcgccagagacagcgccgttgggggctactctcccacggagaggatcggggaccgtagtctggtggaggaggctctgattgcctttgagagcggccatatataaaccatcgtcgtgagaaggtggttttggggaaatgacattggttgcagtgggagtgatcctttggcgcttggaggcgagagcagtggcctcagcggccgcaacctgagacaggaaatcgtcgtcgtcgtcgtcttcatcgaattcaatgaaggacttgcgtctttccattttcaattctctaactccatactctcctcatttcattttgttactttcaatttaggccccccttttccattcctctttcccgcctaataataatagactactctaatctaatccaacattttttttataaaatttttgcatgcaccttcaattttgaattttgaaagacttttgtgggaagcatgatttcactcacgttaaagttgcaatttaataaatatcaaagttcaggaagcataatttaatacttcactaatttagtatataagaatttttgtctgattttagtaaataaaaatttaacatgtatgaaagttctggaggcatgatttaactcatgttaaagttcgagcaacatgatttgatagatatcaaagtctaggaagcattatttagtacatggacaatcactgaattagtaaaattgaatgaaattgaacaaaaattcttgaatccaataatctcaatagtttatgaggaatttttaacagtcagaaaaaatttaaggggtatagtttgatacatatcaaaatttatggagcaaaaatattattagctattttttgaggcttagttttaacgaagaaaggtaacaatattacaaaaatacgtacacaaataaaaaaataattcagcccaaataaaaaaaattacacaagtaccacttacacacaccttcaactacccagcaaccttcgtctgatgaaacattcggtcaaccacccagcaaccttcgtctgatgcaaccttcggtcaaccacccagcaaccttcctctgattgaaaccttcatctgatgcaacattcgttcaaccacccagcaaccttcatctgatgcaaccatcggtcaaccacccagcaaccttcatttgattgaaaccttcgtct

SEQ ID NO: 17804 - DNA, 2129 bp, Cannabis sativa
cttccatccgatcgcatctgaagagacaaggattcaaacaactttcactcaaacaattcaagctgctaaccatagcttttgtttgaaacacataaacagggaattggagactcatttcaccttatgtacaacaacatggaaaaggttcaagtagcttgagagtagacacgaacacgagcaatccatccattgtaacaaaaacacgaaaataggtgccaattcactgtaaaccaatttcatctgaagatatttaccgccttttccccttggaatcgaagctgccctgcaaaaacatttgatgtacaaagaacaatgaaaagcctgattttgtgccatgtaaaagaaacattgtggatcaaacaacattgcaacagtatactgctttttttttggtagatcatttgcaatataaatttcaaatcatggttgacttaaatctataaattgcccaatatttgtatagtttgactagcaaaaaaaagtatgaagtacaaaataagttaaattattacactgataataagcttttgtcaatgtaagcacactggtcaacaaacaacagtatcagattaaaccaaagtacacaaattaaagaaagaaagaaaaaagcacttttatacacattccactccatttaaaattttaaacccaaatagtttgctttaatttttttttccctttttctaactcatattcctgaacttcatgaacattagagattggacatttggttctttttttttttaaaaggaaatacttgtaagataaaaacaaattcccaaaaatgaaactcatctgactgagtgattctctggggtttcataaaataggattcttttctgcttcatttaaagcaaggaaaccccacaacaataatacatttccaatataatcttatttagaaaagcagcttaaatttatctctacaaatgaaaaaaaggtgaagcaatattttaatttaaaaaaaaaaaaaaaaaaaatagtaagagagagagagaagagaaactcacagcatattagcatgatgaatatcagcctcaagaatcttaagggagtcttggtaagatggcctagcagcaagttgctgataacaccccaacatgtttgtcactcttttctctcctaaaaattgaagctttatttatttagtagaagaaaatgtgagcaaaaacagagaatgaaaaatcaaagagaggagaaacccagacttactggtcttataaacacaaacccaatttattaaaatctttggtctttgataggaaaaggtcttttttggagtgaaaatgaagctaggagcgttgggttagggaagatgaaaacctgaagagagagagtgagagagagagagagttttaggctatggggtctactttttttcttttgttttgtttgaaaaattcatggatgatttatttggaagagattaattttgttgggtttttatgttatttttttgaatttgattacccactaaactgagtttgatccttttgactttttgactatatgatagtttgaccagagtgaccagcttttcattgctttgggttgagttgagtggttatgagtaggtatattgtgcttccaataaaatcaacctacttagtcagagaagaatgattggaaatagatgcagcaggcactatgcaagccaggcaggaccactttcacattaacacaatcacaatccccattaattgattatgggctgggctgggctgggctaaactacattatattgggcttagagttacataatcaagaaaaaatatgataactttaaatagttgcaatactttgttatacataaatttagaaagatgaaatgtcaaaaataatggtgatattgatgatacatatgtgaaccctaccattaattcctttcccacccagaacagtcccatgtggctttggaggctgttttaataaggatgaaagtgcatttttctgcctttggcacccccttctcataaaaaaaaaaagaaaagaaaagtgcattttttcaagtatatttgttaatatgagggtaggcaatattcaaactaatctaattacaccaaactaattcaatctaataacaaaaaatttgatatataattatagattagattaaattttaatgactg

SEQ ID NO: 17805 - DNA, 2358 bp, Cannabis sativa
ctgatgtatcaatgatcatgcttgcactgacatgcaatgctgcaataacaaaacttggtcccgcaaaagtttcttgcgcacaattttttagtacaattccagatataactggtagattgatggacatgctggttgatttcatgcctatatccgaggcttatcattctgtaaagggaattggcctggtcagagagtttcttgttcactttggtcctcgtgctgtagcatgtaggattaaaaatgaccgggattcagaggaggttgttttctgggtggatcttgttcagacacaattgcagcgggctattgatagggagaaaatttggtcaagactaactacatctgaaagcattgaggttagtcatttaaacttgtaaatgcttaactttaaaggtggtgcattttatttggaatttcaaacttagtattataacagtctggaatccatcatccttgatactattaatctgcactgcaatgaatcccgattcactaataaaactactataaatatgtatacatggtgaccagaatttctagtgtaggcattaacaaaagctttgaccagttgttatacccttcctcttctatgcaagtagttcataacagattcgtaatttgaaatcctggttatggtgggattagtagcaaagaatttggatgttgtaaattgtgttttgacactacaattaatttgagcacagtgatctagggagtatatgtatgtattgtatgtatgatgggttcagtatggcggaggcctaattttttttcgatgcagttgcatgtttcaataagattgatgccttattcaaatcaatactattttaatgcaggttttagaaagagatctagctatatttggattctttattgccttgggcagaagtacacaatcctatttatctgcaaatggttttgatgttataactggtccacttgaaggattcgtaaggtgcagataatgcaatttacttttccactttgttttttttttttttttaaaatttttaatgttttaatgatttatttgtacttttttttaatgcagatttctcattggaggaagtgttttgtactatcctcagctgtcatcaataagttcctatcagttgtatgtagaggtcagcatttatcactctctgccaaatgtgcttcatggtataaattatagtatctaaaggtgttttccaattacataggtagtctgtgaagagttggactggcttccattttatccaggcattgttggtacttctaaagagtcccatggccacaaaagtaaatgggaaggtcctccaaacactgatgcgatactgcaagtattagatgtatgctctcattggatgcaaagttttatcaagtatagcaaatggctggagaacccttctaatgttaaggcagcaaagttcttgtccaaagggtaatcaaattgatgttttggtcgtcattaaacaataagagctgtatggctgtatctaatttaatcatttttacaagatattttctttctttaatgtctaggcataacaagttgatggagtgcgtggaagaactggagatgtcaaagtaagctactgaaaaatgttaatctcctccatcccccttcctccttcctctttccatgtttctcagattcaacactgtcagatacagaaatgcacagatcatgcaattttttttgtacattagaaattttgtttggtaattttggaggacggaatagaggagttaacttttatccatctttcggtcttaccatgatattttttttagtttttatcatatcaattcatcttgaaaagttaacttttaacatataatgcagggataaaagtaaggaaagcaaggtaaaaagttatgatgggagggttggaggtgtagagtattcgtcaattgagaaagacttggattcatttgacaaggttgatttgttattcgtcaattgggtttattcaaatttcagtatattttgtgattttttgatccaaatttcatcgtgtgattttttattttttaaaaatacttaactggactaaaagggttcatattacttattgatgtattttagttggatgtatttagtgttaccatttcattcttcatctagttattgtttgtactaatggtattcaaatgctagtggtgtagttaaacttgaaaactctgataccctagcatggcgaattatgggtatcatggcgaattattattacctaggtccatgactcgggtgactcaacatcttttgtaatccacacccaagagcgatagctcaaatggttaggcatgtggtatactcccacaaggtctgaggtttgagtcccacaagctcaattgctatagtttcctagtccc

SEQ ID NO: 17806 - DNA, 4281 bp, Cannabis sativa
tactttgtatacaaccggattcaatgtttcaacttaaaaaaaatagactaattagtttattattttataggcacacattgtgtttgaaacaaaaatgaattgttgttccaatatacacgaaaaatagactaataatagatttcttggcgtatatcattatgtttgattgtagttgactctgtattgaaaagaaaaataaaatgttgttccaacaaatgataactagtatatatttattaacatatataatggtagactatatgaaattaaatgaattgttgttctaatatacaaaaagaaaaatgaaatttgttttaatatgccaaaataaattaatagatttattagcataactaatagtatattctctatattaatcactttctataatctatgtttcttttgtatgtcagttttgtaaactaatatcatgaatatattcaatattcagtttaaaaataaaaagaaattataaataccattaataattgtaaacatattagttttaaaaaatcttaattgtgaacatctaacttgatatgaagacaacaaaaattattgaaatttcaagacatgccattatcaaccaaccaactactttaaaagtatgcttagtatcttaaaaactaatatcaagtgacaatagaaaattatgtttgtaaattattaaggttatattaacaaaattatattattttgaaatgtttattaattattatgtttgtttcgtatactaatcatttgtatatttatacattttaaaatacatctagttcacaatattatatcaatatcacatatatgaaatgtaactaattgtaactaattagtaataattagtaactattagtaacttatagtaacttatttatgaaatgttatgaaatgttactgttttttttttttttttatttaatgtgtataaaattattttgtatgtatatttgaattgtgtgtaaactagttgttttgtatctcatttggtgtgtagttttttcttaagtttacaaaacttatttttattacatgtccaactaagttgcttgtcgtttgaggatatgacctccattaatgaacacagtaatttttgggtcaatttttctgaaattttgatagctatattcctttatctagctatgattttgtctctaatttgtatataatgttgatggtttgataaatgatttcaatgttgaattcttgagcgatcttccacattattgtgaaattatgaagtttgttttttattaatggagtttttttttttgttagaatggttttcgtttgtgatttttattttgagttgttactttatttagtaacagttatgtctctaatttgtatatactatcagtagtttgagaaataattcttggtactggattcatgttcatcttgtgctatttgtgaatgaagttttttttttttgttaatggcggtttttttttgtgagaatagatttgattttcataatcccaggtaagtaaatatttttatttggtttgaattacacatactgatttaagaatccaatcccataattaatggaagaaaatgacacatttatggaatgaaatagccggtttccttttttgattggtcggtaggtgatattttttataataaggtatagttgctgaggtgtcacattatcagaattatatataattactcaacgttatttatgttattaatatgtgttttacgtatataaataaaaattttccttatttttttagcccaaagtatgtgtagaaacaaagaataacaggtaaacgctcaaaaaagataaactaggataaaaaactaaaaatacatcaatgataatgtcaagctatatctaatatagattttaatgtggttcatcatttggataatagaaatggaggacaacctatatctaatatagaactggaagattctaataagtgactttcccttgctttagaggatcttttgaatagtattggctctcactttacctacactaataattaaggttgtcaagctcatatctactctagtgtagaccatattttcaaatatgatgcttggctagatgattttcccaactgttcttctatattttagtaaaaaacaaaatcgaaccattgctcttgcttggttaagtcttctgttctaaataaagttagagttaagctttttaaattttattatttttggactaagcataagagttttaagaaaactttgatggatatttgggtaaagcaaatagtcagcataggtctgaaatctctttacctaaaattgataagacttaaacatgctttgaagagtttttaaaggcatacaattagagatattgggatttagctcctcaaagctaaggaagattgtcaagaggctaagtagaatgctcaagctcaccctaaagatgatgttttttgggaggcaaaaactatggttgtttttttattacaatacccaaactaagatgtatcatagctttgttcatctgatgagtaaaataacttggttaaaaaagggtgatgataatacctcttattttcatgcttggctcaaaaaaagaagaaaggagaatacaatcaatagttttgttaatgagcaagggaatgtaatggatgattattctaaggtagtctctaattttttaggacacttcaaaagtttaatggagagcaaaaattttgtcacaactaggattaatgataagagccttggatcggatggtttcgactcaatttttcttcaaagagatttggcttgaaattggtgaggaagcttataagatgccctaaacttttttgaaattgctaagattcgtgtggaactcaatgaaaccactatatcccttgttcccaaaagtcacattccaactaaaactactaattgtagaccaatagtctgttgtagtactctttgtaagttcatctctaagatgctttgcccattacttgctttagtgcttccttctcttgttcatcaaaattgaggattatttattaagactcgatatattgctcataatattatgatcttctaggatcgtatcaagaactatggaaggaaaaactcttctccaagatatgctattagaatatatcttagaaaggccaatgacacagtagattggatctatttagaagacctattaagagctctttattttccctctaaatttattagttggattataacatgtttgtgggacacctcttattctcttttgatgaatggtatattagaggggattcatttcaaaaaaagattagaggggatattcaacggaaagaagggactttaacaaggtgatcacatttcacctctcctttttgtccttattacggagtaccttactctgtctctccatcttgctgctaaggataagttgtttcggtatcaccccatgtgtatactttaaatctggcctacttatgttttggggtgatataattttgtttttcaaggagaccaagcatgttgttggtgttttaaattggtatcttaataattttagctctgctacaggtctgagagccgatactaataaatcccaaatatttttttgggtggcctcttgactttgacaattggaagaactggtgtagcaccaagcgaagtggggtgataggttctcttgttaatgtactttatagtttatggtttaataggaacgcttgtatttttggtgttttttctcattcttgcttgcatatagctaaatagatcaaaagcatgtagtgttagatttgtgaatagattattaactgtatagtggtgtgagtttgggtacttttgtggctacattgtttgttgtttaatgtaatcttattttgtttttaataaagatttcttagagttcaagaaaaaaaataattcataaaaaatatatatagaaaaaaaattatggataaaaaaactacaaaaggcaaaaataagtctttattattttatttatttatttatttattttggtggacatcaattcttttaattgatgttatagatatatagtagatactagatatatatgggttgggaccctagtttcttgggtctgtttatttccctctagtcctatatgtgtgtattttaaatacgttaagattctaattactaccagtctttaacaatatgattatgttttgaaatattgattataatacaagctcttagaataaataataatgatgataataataaaacctatgttataaatattattaattatgtggatgtccaaattttttagttattaccattaattgtaatcaacattcatctttttcttagttt

SEQ ID NO: 17807 - DNA, 5704 bp, Cannabis sativa
  modified_base (4829)..(4831): a, c, t, g, unknown or other
gatccatttgaaggtggaaggatctacaattcgtgtttaagaaacgattcgtagctaaaaggactatgatatggaagtcaattatctgactaacgttgagcaataaggaagataaagcctcaagaactacatccaaaggatgatgggagcaacaactagaacaaagattaataatgatatgaagctagtggccctaacatctagaatatctatcggatctctgttatagggtgagctacaaagaaaaaagtaagctaccttatctaatttcttatctagggcccaatgcttgataaattggaagaagcatatatacaagcttatggagtccctctggtaccatcagcaatcgtaagtaatttaacttaccctacaattctcaatctggctataaccccacccgagccaatttacaactcctacagtctatgggcccactacctcaaggtatgtgcctacacaaactaatttttccagcttcggggttgcacaatctggatgcagttccacccatagatagacaagccaacaaacaaaggttctagaatcaagtgtgagtcaacctaggggaaagaggagtggaaaaggccaaagccagagcgaggctctgaaaaaacggaaaaagtcagcatgaatcaaggtactccgagtacaccagtttggtagatactcgagaaaatatgtattacgaaacttgtaatatggtccactacaagaagacactactaatgtacaataccgctaattattatgattcattaactttataaaactttacattctttatttaccataatactatcatttaaataataaaaaactaaaataataataatttttatgtattctcaataaaatattaaattaccatcaatgtatttttttttttactttacatcttatgcattggagtgcgattataaataatttaatatagcacaaacttattttttgtatcaaattatcttgcattggatatggtataagttgtgccaaattaggcacatgctaaatactgggccaaatttggtacaagatagtgttgtgccaaatttagcacacaataaatgctatatttttaaggattatttacactagatgctgaaatttctaacttttttactgtagggtggaatttttttaaaaaaaaattgtgtttttttttttcaaaagtactatgtaagttttatattgtgtactgtgttaagttttcacagttgttttttagttgttccactattatttttagttgttctgttttgtgttttcctgttatattttataaaattatagtatttttgaaaaaaaaaatcgtgtagcagtatttttataaaaattaattcaaatttcagtaatttttgtaagttttcctattttaatttatacgtttgtcaataatcgttaatggcgtactttaattcatatattttatttataatattattattaataattttttaaatatataatttattggtagttattaattaataatattttcctttttagataaacttacctctttaaacattatatgtattggaatataattataaatattatgctatacataatatttgttaatttttttttatcaaatttaatataatatttacatcttgcattaaaaatagttttaaagtagtaagaaatgttatctcaccttctatatgttttgagtgttttcttgcgttaaaataattaaatgaatataaaactacaataattaaaggaaataaatatttgtacggtaagaaattgttgtatggatgtatttggtcaaaagtgggggatggagtaaattattgaatcaagttgagttttgctatttttaatttagtggggttaagttcaactattatacttacaatgaagaaaaacagttaactaatgtcagcaatgactgcatgatcacatgccctcccaataaaattaactatacctcacaatcacatacataagggcaaggcaatttccaatgggcatggtgtgtaagagagagaagaaatatgaataaatggtggtccaatttgtaaaaaaaaaaaaaaaaaagacaaaaaaatattcttgttgattacaaatttaaaagtgtttttcttttgacatacccttcccattataaacacaaacgactctttctctctcccttgtataatgtgaaaatggtacctatgatattttagtacaatttaatattattgagcattgttattcaactcaacattagtgaagtctagtactatctagagaagactttttatgattagttagcatttttttttaattattttcttaattatatgagattcaatatttaattgcaccgatagtaatatatataaaaaaaaatattagatattactaatattttttacttttagtattactctttaatattagatcttacttattttactttatagttatagaaaactgttaactttttgtaaaggcactaatattataattcgtttttttactatgtggatgtagacgtagtgatattttaaacattttagctaaaattacacctctaactattctaagatgtaaaattgagttatattttggtacaaaaaataatttttgatacatttgtattaatttttagtattgtactttaatatataaattataaaacttaatgcaaaatttattatttaattgatatttttattaaaaatataaaaaaaaaataattttatcattattattatgttaaacaaaaaaatatatattatctataaattaatatgataattaaatatactattaaaataataaaaataacatataaataaataaaaagtaaaggtaatgcaaattttgcatcataatagttatgctaaatttaattactttttggtacatcattgaagtatatttttattaaagggactatattttaattttacataacttaattgaatagtacgtggagatactctagcaatactttggtataattcagttgaggacctaacatctgccaccctatgtaccttgaaaataacaataattgagcattaataatactaacatcaaacaccaatgaacttaaataaacactttattgctagctagtgcattttcactataattaaacaaaagtttttctttctaattataggaagaaaaagaatattagtgcatctatatctatttttctattttactcttttttatttccaatcaaacaaataattttgcttcttttcttctctacccaacatagttttaagcatattgatggcctagttagctaggtgcgttttacttttatatattaagaataaaatatataaaaaagtgattaagctacattaagtttcggaatattccttttattgtgggtttcaaattctatttataagctatttattattatttgtattggtttcttattagtcaaataaacaacggttgaaactaaaaactctacttacaaataagaccgaccataatattgctttaaatcaaagtggaaaaattatttttaaaataaaattaagacactaaaaaccataaataggttcaagttgcaagttgatataattatatcgaaccaaaggaaccccaaatcagcatttgacagggaaaaaaaggcaaggcaagtagcatgtgagagactgaaaaaacagtgtctttttggtacgctttttgtgtactttctggcgtggtatttattaaattattattattattattttcattatttatttgtttttagataattataataatataatacgtggcgaagaggtctcgcattttgttagcactaccctactcgtactattttcacttaaaagcactctctcgctcttgccattttggaatattccttagaatgttctttctaattcttacatatttatttattattcatgtaaaataataacaaaaaagaaagaaatgaaaagaatttaattgttttaatttgtttcgtcaatcaaaatattatttcatgcaaatattattggctttttcatgtagtgtcaatgaaacttggaaagtattgggtgtggtagggcacttgggtgttagggtgggccccagttggttttggatttgaggcaaagattcgttcgttgttgctatttggtagggtggagctgagtcagatatggattatgcaaatttcgataagtcagagactacttgcggtgagggcgcaccctaagagtatctccaacttataacacttacactaaatttagtatcaaaatttttttccaactttaaatataacactaaaattacactaaaaaatatttttttattattttattaattttttaataaaataaaatattatttttaatattatattaatttactaaaatcactacaattattatatttaattaataatttaaataaaactactaattaatttatagacaatactactgtacaatctgtgaaactcgataaattcgtaatactttctatttgatgtgtctagcgtgtttaatttgaatttttcaatgtatgtttaagttgtaaaatttttattatgtactattaatgctgttttaagtttataatgttatattatgtaatattgaatatatatatatgtatactattaattaataagaatgtgatatttagtgtgtttaattttaattttaatgtgtattttaatttgtaatgtttctattgtataatattttttaaaaaaaaatacaaaaatttaatagaccccaatagaaattatatatataaaaatatatatatatatatatatatggaacgtatttacattttaatttacacacaataaattaaattcttaatcttataaatataaatatatatataannnataataataaaaaaaaaagcattagatatcattactacagtgccacgacatatatgcattttcattaagaggagcgctagttttcaagtttgtgtttgggaagaaaatgttaaaacactcacaatagaagacgtaaaatggctaatagctaaaaaaattagccaaaaggtaaaacgtagtaaaaaataatgccacacgacaaatataatttgatatatgcagtctcgttagaaacactctgagcatcaaagatgagttttgtaatctccttagagctgctccaagagcacttacatcagcttctctactctatcctgtataactcaccaaaagctcactttttctattttataaagatcaatgtccaaagactcctcatgagatggaggaccttaatgtatgcaatgtttgtacaagggctgacatatgctatgatgtagagattgttagtcgttaccaatcgaatctagatttggaacactagatagttctaaagagcattctcaagtatatttaaagaacgagatatcttatgcttgtatatttcagatgagaggatgagagttaaatcctactaaatatattgatttttatttttatttagacaaataaagtcgaaagtggacatatgggttagtattcattcttggtggtagagttgtagtctggagaaatattaagcaaactaatattgtagattcaaccatggaagctcaatatataacaaattgtgaagcagctaagaaagcagtttagttgaagaaattatacactgacctggaagtagttccaaaagtagaaaaactattggtgctctactgtgacaatattagagcgatggccaactctaaggaaccaagaagccacaagaga

SEQ ID NO: 17808 - DNA, 7557 bp, Cannabis sativa
tttaaaattaatatttataattaattttgtttattacccattaaaaagtattctatatatattaagacttgaaggaaataattatatattaacttaatttagcctaatactaaataaaattttatgaaatttttaaatgatctagcatcgtacgtaagattagaggtgagagtttatatagttcacaaaacataatattattgattcgttgagaatatcattaattagtaagttaatcttatatatgtaccatatatatatatcacaacaattctcaaccaaccaagcaaaatgtgccataatctaaataataaccaaaatcattaccatacaaaattctccaattaatttccacaagtaaatatagtcaaacgcaatagaccaaccaattaattcactccattaactaattaacccccaaaaaacatataaatatataattagggtactagaccattccaatattattacaaaccctctcaaaagaaaaatggtgaaaccccatttattatcactctccttgctcttcatcattctatgcacaatcaaatactcacaacaaacttttgataataacaatttcttaatgagcttcccacaacctaatcaaatattagattaccttaacaatacaacatatgctgtttcggcatatggggcttcgcacaagcacctatgcttccactgccttagtgcatcgtcgagatttttggccgcacataacatagctcgggccaaaaaaggagagccaccgctcttttgggatgctaagcttgccaggcatgcacgacgttgggcctcacaaaggaaagtcgactgtgccctaaagcattccttccaggatggcgagttcacgctaggagagaacatattttggggtggtggctctgattggacaccggccaacgccgttgaagcatggatggaagaggaaaaggactactcgtacgagagtaatagttgcgccaatggcaaaatgtgtggccactatacacaaattgtgtggcaaagtactaaaagagtgggttgtgctagggttatttgtgacaataaagatacatttatgatttgtaattatgatcctccgggtaactatataggtgagaaaccgtattgattatctacttcttaattaattttaccatttgtgttaattacaatatacatgtattaacaatcgtgtaggataaggaaagtaaatagtttttataagtcatattagagagttgagttgatccaagagtggggcaagttaggccgttgtccaaagccaatcattccggtcctcttttcttttatttaatataaaaaatattatattttacgttttatcttcttaaagaatgcccatttataagaaatattttttttcttaataaaatccatttataagaccccccaattagcgaccctcactatatgatcaattatgaatttgtttggttaagtcatataagagtcgtgttgcattaaatacgactataaattttaatacaatgtgaatcgttttatttaatgcataacaaataattttgtattagcttatattataatatttataaatggttaagagttggaaaccccggtcctagactcgaccctagtcccaaaccccaaacttggaccccagacctcgtccctgaacacggccccgaatcccagacccagcctagccccagactcaggattcgaacccagaccagaaccccgaacccaaccccaaatccaaacctagaccattggccctcaaactcggaccccaacccgtaaaacaatgaagagaatgacatatatgatgagtggctccactatctacaatccataaaaaaaagtagaaaaagtttatcattaccaaagacgttggagacaacaggatgatttttactgatggatggagcgccttgaatttactcaatgagaagggaaatctgagttgtagctgagaaaagccagcgacgagagcatctagactggcagaaacttgatttgcccgagcagtagatggattcttcttttcgtcaccatatcctggtggaaaaccatggatgaaatagcacttctcaactaggtgacctagtttaagacagttggaacatgttgggcgagactttttgctccgagaaggatgatttagttttttttttggcaggggcagcaataacaatatcggtgttaccaagacaacgttggcactcttgttgaacaaccatggagaaaaccttggatagtggcagaagaggatcaaagataatgatctgagcccgaattccctaataagattccttaagacctattaagaactgaaggatctagtctctggtgtagtaatcttaaacattttgcatagcagcgcaagtgcagccacaagtgcaaggagtgtttggtttatactcattgagttcatcccagagggcttgtaactgagtgaaataagtagtgaccgaattatcgccttgtttaatattgttaacaaagatcttaagttagagaatacgaacgccattactctgattgaatcgatcatggaggtttgtccacattgcacgggcaatgattttgaacatgatgcttgcactaatttcacgatacacggattgaagaatccatgacatcacgatcttattgcatcgaccccaaccagatagagatggatcattcaatggtggatggggtaaagtgccatcaatgaatggagttttatttttggcagcgatgttaattgaagtcccccgcttccaagactgaaaattatctcgactagtcaagagaaatgatgaaattatatttggttgatctccaatgcccaagtaataacgatcatcttgagatgtcgatcgaaaaagacatgaccttaatttgcaagaaaggcagagttatcattaaaagccatatgacattgatgtccaagaaagggattattaccaatagtaaatggagaagaattttggacatgtggaaatgtgaaaggtggggtcagatatgtggtcgtgctggaaagaatggaggtcagtgaaggaaccgtctgagtcaagatcggagttgaagaagagaaaggcagaagcattgtggataccaatatcgacgctagagtagagcaagagatgaactgtgctgtggagtgttgtccaatccgcccagaactagggatatcggcaacggaattagagccgagcacaccagtggtggaaggagcgaacaaaaaatgatttgcaccgatagtgtttgagatggagttcgcaaatgacgaactaaacagagcaatgtcgtcgaaagtagcagcgatagaagaaggagcttcaccatgggtgacagtcggtgatggtagcggaagagatggagactcaatgacggaggcaacaacaacgactgagtttctggttctaggagccatgggagaagaggagttggttttatggtgaaggttgaaggaggcgactagggtttgtggttggtggtgggagaagataacactgataccatattagagaggggaactcttattttgaaatgaacgacagaaaaatgcctttagtgttattaggtcattaggttattacaaagcaagaagggttatatatatacacaaggtataggctcaatacagaagtagactgaaagagaatgggccaaaatattaattctaatatttttttaaaaaatatgagaaagtaatacaaaatttttacatatataaatataaatatatacattcattaaataaaaaaaaatactataatatatacataaactccaaaatcatattcttccatataatatttgatttgacttaatttttattataataattacttgcaagatatacatgtcaaatgtgatatagtgccattcataaaatttgtggaaaattatagttaattaagctgtatttacccaataaaattattgtgaaatcttatttaaatataattgaaaaatatatacatatatatattaactcaaattagccctatactaattcatctcttaaaatgggtgacagtctgtgagataaaacattttggacaaaattatcctaatcagttgagaaaattattgagtaaatcaaactatatatgatatctattaccacaaccaagcaacaaaaaacagacaacatccactttctaatcaaaatcaaaatcaaaatcagccaacttggtacacacataattaattcatttattcattaattcccacaaatgcgttgttgcatgggccatgcaacgaccaaaacaacctattataacgatttaaagcattagaaaacatttcaattgtttaaaaatccaatatggcaaaaccccaatatttcatgtcaataaaactcctcttcattctctacacaatcaaacaatcgcaccaatttgattccaatggtgaaaattcccttatcaacgtcgaaaaccctactaaaatattcgattatgtctctgattcgatatacgatgtttcgcacaagaaactatgcctaaactgcatagctgactcgtcccttttcttggtcgcgcacaacttggcacgggccaagaaagggcaattaccgctattttgggatgccaggatcgcaagaaacgcgaggcgctgggcgtcccaaagaaaagcagactgtgcattgcaacattcccagtcgaaagggcttggggagaacatattttggggaggcgggccggggtggagcccgactgacgcagttaatttgtgggccggggaggagaaggactattcttacaaggataattcgtgcgtggacggccgaatgtgcggccactacacgcagatcgtgtggcggagcactaggagggttggttgctctagggttatttgtgacagtggtgacactttcatagtttgtaattatgatccgcctggtaattatattggtgagaaaccgtactgatggatcaatatcttattatatcatctaaataatatatatttatataatataatgttagattgtacgacattgacctgaatttatttatatatatatatgtaacaattataaagtgttacacaacatgcatgcatgtatatgggccggcttaattataatatgattaattaataattagaaatatatatatatatatgacaaattttgtattttttttgtttaattaatgatcggaattgatcgatgtgaggtttgatatatataaaggaagattttataaatatattatcaatttcgatacttttttactaatttatggtgcagactaatattcatttatgtgtatggtgtttttttatacatgtgaaatctatatattattttgaattttgtttttaataaaaaaaatgcatgcctactatataatgtatataacgtcatataaaaatattaggctataatttatcttaatattgaaaataggcgttttaaaataatgaaatatatctaatatagttgcttcctaataatttaaatatatatagggatgtataagatgacataatcttataatcttaaaggtataaatattattttgaatgtgttttgtaaagatgattgattcttttgttttgttaaatgatatttcggattttgaatttttttaaaaataatacaaaataataccttaaatttgtcaaagataactcactaataattagttgacctatttaaggaagttaatgttaaaatttggaagtgtttggttaaggtgcataaagttttacctcaaaatcagttaacaatgaagaatagctcataaatcttatatatggtattctcttttcacatattatttatgtgtgactgattctaatacaccatctttacgtttgagcttagaaagtgtgagtataataagcaatttttaagaaactacagggttgaacgtgacatttgaaagaatcccacaaggctaaattagaaaatttgtgtatatacacatcgagaaatttgtgaatttttaaaataggttaaaatcccaacattagaaactggcacatataattggccaaaatgtcccaaacggatgtcaaaagagatactacaagaaatgtcattttgccagtacatttttgtgctgacaaaagtttggtattgcgctagtaaaatgaaatttaattctgatatgttggcaaaggggattggtaaatcaacgttggtattagaacttttggcagcacaaaatgaaaagcgcgcgctagcaaaaatgacttttcatgcactgttaaaagttagattttaaccactgcaaatgtgcgctggtaaaagtgacatttcttatagtgagacaatggaagctttttaattggtttgatatgatgttagaatttggaagtgtttgcttaaggcacatgaggttccatcttaaaactaattgataataagaggtgttatcttattttttgcagcttgacgtggccatgagaatggatgacacgtgtcccacatctttgccacatggacggaggaaaatattcttagcagctcattaacagttaatttaaatatctgtcacactcggatgtcccaacaagataattaaaagatgtcaggccaagatgcaactttatctgtaccaagcagggtatataagttgtcaattccagagattagtctcgtcgcttctaatacacaaagaccatccctataattgtgggatttagttcgagaataacggcaatatgctttatcttcctattctttacattataattatgaaattgatgtagtttcctatctcatttattatagattaagggaaaccattcttcatgtaataagcttctataaatagtagcactatcacactagtgaaggggacagagaattaatccaaagaaacattcgagagagaacagagatctaagagagagattactcaaagatccattgtaagagctttcaagaggaagaacactttattccttctctcttatcaatacaaatacaaggggagtgggctattaccatactcgcggggctgaacctctttaaatctggtgttcattttactttactgtttttgttttcttttatttatcttatttgatcactttattttgactcactgttattggctagaagggaggtcaacaagaggagtatagcttatagatcttatacatgatattctttttctcagggtcgaccctgagtaataatgggcctaatttttttttgagtgtgtgttatggctaaagtaaaatatgagtattattaggtctcttttcacaaaattttacaaaaatactattttttttcaatgcaaaaaagtatacattataaaaaaatttgagccttgggtttgggtacgccctaggcacggacttagctcaccttggcccaggttcaaacatgcttttttcacttattagtaatgtgagactacttttaataataataacctaattagttacatattttttacatttattcattttagaaattaattttaaaagaaaattgtttgatatatcagtgtattattatgttattttaaaaaatacaaagttgatattattatttaaaaatctaataatcattaatttttgtagaatacaatccaaaatataaaatttagtttaaaattaatagat

SEQ ID NO: 17809 - DNA, 3199 bp, Cannabis sativa
  modified_base (163)..(168): a, c, t, g, unknown or other
tcggattataattaaattttattttgacagaaaatcaattcagtgtcctatttgtactattttagaaaatacaggatctatcttgtcatttaataacaaaacagatggtccaattaataacttttgcaaaacacaggatccaaaatagtaataataataatannnnnnataataataataataataagtctatcatgtgctgtgctataacagcttaatgatcttaaagagaacaactttgccatgtgctaagccatatgagcttaataatcttaagtaaaatatatatattcattttattataataatcttgtcttaattaccaagtttctgaaaatttgatcaaccttaattaaataaatacaaatcttaattacatacctatctaaaaagttgacctcaagccataaaagatccctagattgtgaaatgcttgtgaaaatggagagttttttaaaatttttaaccataacatttcaaaaattgttatgaaagaaattaaagatggagtgtagctctactcaaaagattattatttttttaccaattaagtcttcttacatggtttatctttgttattattttcttattgtttatagaatagtttgaatagaaattttgaacaagcgtggattttaggaagaagagtttcctaattaagtcttattttagaaggaagtgagtatatatttttaggagaagattttttttaaaattcatttcaggaagaagtgagcacacgggttgaaaggatttcaccaacctgatgtgtttcacagatcagattagtaaagtggattacaaaaggttgtgagaaatatttagaggaatccaactttgtataagtcaatggcatttgtaattttttatattttattaattgatttcattctctgaatgtggtcccataaattatatcaaatataattctcttagtgtaaatttatactttctgtattattatttatttctattaatcgtatggtgctacaaagataaattatgtgtgcacatataaattatacaaaaatatttggcacacacttatatgttgtaaaaaaaaattaacaaattgtcgttatttaagatggatcatacttgttaaaagtaacttggtacatagatttgtgcacatactagtagttttcaagaaactaatatggtggttattttgatttctctccaatgaagagacatacttctgcagtactcaaatcaactaataaaagtaggaatttctcaattcgagttgatctttgaggctcttgggttgaattcaaatcacttgtacgatatggattcactacaagaaatgtaacttttaccagcgcagtagcaacttttaccagcgcatttcacaaactgtactggcaaagaggttaaagttttaccagcgtacatgtgcagtggctaaaatttaacttttaccagcgcatttacgtgctggaaaaaatcatctttgccaacgcttttcattttatgctggcaaaagttctaataccaacattgatttgccaatccccttttgccaacgcatcacaagtaaattctattttaccagcgcaatactggcaaaagtgatatttcttgtagtaattgtacagagagattagtgttattatgtcattactatccaccgtgccctcaaccagaactaactatgagagtaaccaagcatgctgatatggacttcctcactatgttgcttcaagatgacataggtggtattcaagttctaaatgaaaatagttggattgatgtttcctctcaacttggaactctaatggtcaacattggagatcttcttcaggtaattttatatcaacgttgctaaaaagtactaatgatgcttaatattacataaatatattatattattgttggtgtatttaagtatcaaaattcataatgtgatcaatgcttgatcatgcacctcatacacaaaaaaaaaaacaagagattgatccagaacaatgctaacagttttcaatgcaattcgaatagaattaaaaccagagaatcaacaatgaataaaccagtaattgaaaaaccagaaaatgaacaaagatttaatgagcaattatagacaagaatgtagggagaaagaatcaaacacaatcagaattacgaggttcgaacaagtgatgatgaatcacttgcctactcctcggccagaacagccccaaaggcttggatctttattgagctagaagagagaattacaatgttgatcatgaaagtgttcttgacacattcactcaagaaacataacttcatttacaatcaacttcactcaaaaaactctctttcttgcacactaaactagctctcaaaactctgaaaaatttctcccaagattgctgcttagttgttgtagcagtaggctatttatagcctaaatgttataactcaatcctaactgtcataactgacagttaggtaaaaccattggggggttgaatggatgagccaatgatgtctaccaatcagaacaattcatataatttaacttaataattattatgaaatatagccaatgacaaaacgtcacttttaagttgtgctaggcaatgctcttaagtactacttattaaaacaagaaaagcataaaaagttagaaatttcctccaatctatatgtactaggtctaacattctactctcctaattactctctaattaatatttgcattcatctaaacttccatccctttattgaattccatcttagactaatataccaagaaaaaatataagagcactacaaaaaaatttattttagtcacaacaaaacttgtgactaaaaatagaaaaattatgactaattacaaagtattattcctatatgttgtgactaaaaatgagaaatgttattagaaaaataattaaagtatcaaacgagtgaatcaagcaggaacagagccaagtgcaaagggagtcttggcccctttttttaaaaaaaatctaataaaattaaaaatagttgtatattattatactaaatatttgaaaaaaaaaaaaaaaaaattggcccccttaattggcccccttaattgatgatggagctacttcggtaccaacccttcacagttagacggaaaatttctgccccactaagatcgggtacccctgagagtccattccagaaaacaggattttggtagaaaagttcaataatatgaactataaatacttggaat

SEQ ID NO: 17810 - DNA, 2836 bp, Cannabis sativa
  modified_base (2353)..(2366): a, c, t, g, unknown or other
aaatccctccccaaaaaaaccatccttggacagaaattcaaagcaaactctcaacttagataaccatatgcatacattgggatgtgaagggtacagggtacctaaagaaaagaaagttctatagctgcaaatattacagaaatcatactcatatcagtttatatctttattaaagaaaaatggtacagaaatgcaaatgccctccatgttaacatggtagattggtcaactatgtcaaatagatcccagttaattctggcagaaagcttagtgatttagttaagttcatactcaaaagatacattttggcaatcaatttaagtaagatttagttacctgctgaacagtgatctgacattcttctgatacatggggaagcaaacgagacagcaattcttgatgccttaatccagtgaagattctctgtccaaatatagaccttctgcttttgatttttcgacactctgaccatctacggtatcttttagacccgtaaaatcttccatagtagtatgacaacatttcccccatttgcttactctcaatgaatctcttcaccacaacaaggttcttcccaaatatatacaaaccaagaagaaaaccagcctcctctatcctactccatatgtcacccaagcagccaggtactagaaactggccttgtccttcatcttcaggctgcaatacttcaacctttgcacagtttttcgaaaagaagtcttctgattcacctaatttaagtgaagtgacatctaatagctcaagtttaagtttagatgtaatatctacacattcagattgtaaaagctcattcttgttgttcacatcaacaccctttaaagcttcctgttcttcaagatctttgttctcattagttttctcacttatccacactactggtataggcattccagtgagaacattttgagggcctctaaaacttatttctgcctcagcaaagctatttgaaagccttaaatactcatgtactgtaattagagagggaagttcaacttggtattcacttccaactctaggaagtatctctggttctccaaagatatcaaatacatcagaaacttctgtagaagttgagtttccaccagatacacatacaccctttttggaatccataacattcatttcaacataatccatctgccaagaaaaaaacacatttgcttttcataattttctcgaatataaattatgaaatttgaacttcacagatgttaatattaaaattatactgcccactagtaagtataatatatgaaataatacactaagcaaaacagaaaaataactgtgctttgttgatcaaagttattagaaacttgaagcttttcagactcaatgattaattattctcaaatataatcaaatccaaaagctaataatcataacaatcttgttcttcctcattgtgtagtttatttaagaatggtgtgtgtcaaaaagtttttgaaacgtgagcccattttgctgagaccaaaaataaaaattctcaatgaactcagaaaataaaatagtagagttgaagtcaatcactactcaattttgtatagtccaactacacctttttcattttcttttcttttctttttttataaaaaaatactattaagatatttacataaatttgatttttttttctttaaaaaataaacttgattgatataatacataatatgtttaatgtgtatataagagtagccaaaattagggaagaaaaatattatccaaaaactcaaatatctatacattttttgcattgaaactgattttccttcccctggatattatgcaattttcctttgttcatacactaaaatcacaaaaatagcgagtttattatataaagctagtgtgaaagagcacaaatatttatttatttatttaaaaataataatagagaaaaaaaaaaaatcaatacccagaacagagaactcgatcccagatttagtttcgaaacccaaactagaatagaatgaaagattattattagctcgaaaaaccaaaacctttaaaacaaaaatatgaaaaccctcttaagtacatttaatttgtatctcattaatcaaacaaagtatgaatttttaccataaaccaatacattgtattatagctttgaaacactaaaacaaaataaaataccaccaaaagaaaacaaaaaccaccgtttacagtgataattccaatatgatccttaaaaattaacttatttagtgttcatggaaccgttaaagcacacaagcaagaaaagtacaaagaatcgtacaataatcagagaaaacagcaaccccagaaaagaaaaagaagaagatatttataagaataataataataatannnnnnnnnnnnnnaataataataataatactgtacctcttcagatgaaaaacaaacaagaaaactagccaaaacccacgtgaaagatggaacctgagaaaatgggtcttcagagtttgacactgattaacaagtttttatagattaaaaccaagacaaaacgtgaagaaatatataatacacgcaccaaaaaaaaaaaaatttacagagagaaaacagttatataaatatattaatatatataataaggttttaatattaaaaagagaaaaaacaaaaataagaacaaaatacataaaaacgttaatgattcatattacagccgtacctgggtttttacggagcctgagttttcatggctacgaaggctgaattggaggactgagagagcagaaaaagaatagataaattaaaataaatgaaagtgaaagagcaaagtcgttctgttgttgttctttgtttttgtttagagagagaaaataaa

SEQ ID NO: 17811 - DNA, 4601 bp, Cannabis sativa
cgatgaagctcttcttagtgcggcaaggagggaagaaatggttggtatcactacataaatccttatttccagtaaaagattcatatgaatatttacgaagaagctcattacttatttgcccttgtaaagagttgtgtgaaacatcaaatttcaataaagtgctcatgttatcgagttgataaggtaaaattcctgatatacagttatctgatagatctagaaacctcaaatttgaaagacctacaatatctgcatctatggaaccactaattctgtttgagcttaagtcaagacgagatatgcttgctaaagcacttaaagatggagaaattggacctctgagctgattaaaacttagattcaaatcatttaaattcgtcaaaaatttaaattctaaagggatggaaccagttaattggtttgaggaaagagatagaaatgacaaatgggttaattcaaacaaaacatcagggatagaaccattgagtttgttatgtgaaacatccagagtatctaactgcaatcgaagtagaggggtggggagtggtccgctgagaatgttaccggacaaattaaggtatagtaaattctccagttgttctatactgataggaatggagctaatttgatttccgtccaaatataaataagaaagtttgatcaaatgaccaatagaccaagggattgcagttgcaccatataacttgtttgaggaaagagatagggaggttaaattagttaaattacccaaagctttagggatatcaccactgagttggttaaatgaaatatcaagatgggttaatttggttaattgaaaaagattggaggggagtgaaccactgaggctgttataagatagatcaagttgtagtagattctttaagtttcctatactggtaggaatggagccactaatttgattttctcgcaatactaactcagtaaggttggtcagcataccaatagatgaagggattgcaccatttaacttgttattgcccaagtttaacccaaccaaattcttcaagttgccaagtttttgaggaatggaaccgttgagttgattatgcatgagataaagtttctctaacttggaaaggttggttagtgaaagaggtaactgacctgtaagagcattgttggaaaggtcaaggtaggtgagctttgtaagagcacctatttccggtgggataacgcccttgagtcttgcacacgaaagatccagatgaactaagtgttgaaagcaagacgccttgaagttctggagcattccttttctctctgaatattcatcatcatcaaacatgtagtgacgaatttcagtaatgtggccagcatggtcacaagtgatacctcgctggttgcaataatagtgcatgcttttgttaaacaactgtttgtccttacaccaactggtttgaaacagagaatccagttgtggttctttgagattagcagtgacactgtttggcgctggcgctggtgctagtgctggtgcctgtgatggtgatgatgattcatattgagaagcttttactaataagaaaatggtgttatccaacttgggtggaatgatgaagaagaaaatggttgcccatactagtgatagtgatgatgaactagcaaagatattggaaatgtggaatgtcatgttgctaagatttgttattagctttctggcttttggcaaatatgctcaactagcctgatatttaaggattgtgaaaatcaatagcaaatgccaaaagatgacaaggcaggggcaggggcagggtctcactcttactcttcaatgactccaactacctaattcttaagtttttccttttaagcttttttgagggtaacgtgagttcagggtcaggttagactgcttaattttcagtattcaaagatacatttgttgatttggccacttttcatagagtttggaccaatccttaccattattacttacttgacccaatggaaaccttttgcgttgactgactttaaatccatatcaccaatttccctgctgtgaagttcatggaaggatcttaaaatcagcatcactctttttttcttatttacacttcatttgagataaaatatggcatttggataaattggagacacagtgtcattgtctatcatatgaaacatatataaagccgcctaattacaaatgcgtttatatatatatggttggttactatgttgatgtgtttaatatatttatatatacatatatacttgtgtagtgagactacaaatttctcacattagattcaacatactgatacaaagatatggacaatcaaaatatgaaatcctcaaactgtgtaggcttgctgaattgtgtttatgtcaagacctttgagtctcactactgactccacatgtccttttaatgtatgcagctctctcaatctgcacaaatcatcaaactgcataagttatattcaaaccagaaaacatgtaccagtggttgaaactagccaaagacatggaattttacctggcaatctcagctcgtcgttttgcatcttctgccatctgattgagttcagtagttgatcgatctgcaaacatcataccttcaggagggtgtagcccatgaagggtcctctgcgcatgtgcccatttaagctcgcgttcttctttgccaaaatctttttttcttgtaaaggcaatctacaaaaatgttggagtccttaaaaaaggcagtaaatggagaaagtagagagttcagtgtcaattcattcatacataccctttgttcaattacaagatcccaagctcttccactcaaagcatatctgatgaagaacttgattaaatcaagtgggaaatagaagatgatgttgtaaagccaaacaacgccagcccatccccatccaatccccgaaattgcagcaaaactccagtttgcatagacagcaatcaatgtggcaatcttacatatcaaatacaaaacataattaatgaatgtgtttggaaactgagaatagaaataaaaacagttgcagcctgctcaccagttgagcaacagcaaaagcagcaacaagtaagagaccagggcgctcaaggaaagaccaactctgagatcgtgtcacaaatatgagagcttgactgatggtgctcacttgcaggtatatggcagaggctagctttctgaagtccttttcattattttgttgtaggctagaaaccccaaatatatgcttaaaaaacaaaaggtatgagttatagtaatgaaagcttggcaaagaaaattcgaaacaaatgaaggtacaatggacagattactcacaggaaagaagtctgtcttgtatgctgcccaaaagaaaatgactgtcatcatagccaagtaaccaccgagtatgattccagtagtaaagatctcggctagcttccaactatccggaagaggagaaggtttcaccctatcctttgatattgtcatgatggtacctgataatgccatattatttcatgtcatgttattggtttaaaactagaagtaagttgtggtttggatggacaagaaggtacgaaccgtcgttaaggatagcaataatcagaaccatgaaaggtgggaaatcaaacttccatatgagggcaagtagcatgaaaccaagctgttgcatattaaataaaatgaacaagagggtcaaaaccagatgactttcaacagattttcaatcatgcaaagaagagaaaaccagaatagcttaccacaatacgaattgtaatggaaacagcataaatctgcaacaagaatgagaacattaacatgaatagacaatacaaaattataaccattttgaataaggaaaaggtaaaagaaactcactgtgtaatttttcattctctggaatatagagcgactagtaagtacagcgcttatgattacactcaaaccaggttgtgtcaagacaatatctgaagcactacgagctgcatcagttgcatcggcgacagctatgccaatatcagcctttttaagagcaggagcatcgttgactccatcgccagtcattccacatatatgttttctggcttgcaaacgtctaacaatttcgtatttgtgctctacatcaaccaacatgccccaaagatcagttataagaccagtactaggtgatcaaatggatgacatacagctaagtaatcaagtattatagtaccaggaaaaactcctgcaaatccatcagctttttcgatcagatcatcaactggcaaagcagcaattgactcatccttctcttgtcctaataaggcagaggatggatacatgtttgtacccattcctaaacggcgtccagtctcctttgctattgctagttgatcacctaatagagataaaaaataatgaaaaaacaagtgaaaagtttgcaaagaaaacataactcattcataaattcatagccaaagagctgtgatattggtaaaggaacacacctgtgatcattttaacattgaccccgagatataatgcctttcgaattgtttctgcactatcatgtctaggaggatcaaatagaggcatgaggccagcaaatttccatggtcctcctgggctttcctttcttccatctgaaacttcctgtaga

SEQ ID NO: 17812 - DNA, 3273 bp, Cannabis sativa
tattttgacgaaaaatcaattcaaagttctatttgtataattttaaaaaatataaggtctattttgtcatttaacaaaacaaaatgtccaattaataacttttataaaacgcaaggtccaaaataatatttatccaaactcacccctaaaaccatgttagagtcatgtacactttccatgtaattcttcttcttcttttttttttttttggaaatgactttccatgtaattcgtttctcttaaataattctttgtttatctgggtctattttagctcggtttatttggaaaagttaggattaaattggcacactctaaagcacaatcaatcaatgtaggaaaaatattaatatatttttcatcaatgaaatttagggaattggaacataagacattttgataaacaaaaagaataagcacacaattttgatatataagaccaactccaggtaaaacacaattttaatttgagttgaatttcccaaatctaatccaaccatgaaagcaacccaaattatatatatggtttatagtacctcaacaaattttctaggaactaaaaaccatgaagaaaaaaaataacgatattaatttttatgaacttttaatagtattgatttaataaaataattagaaagagtgagatagaactattgccatgttacatattcacatttatgattgataaatattatagtacaatattgatgttttaggattgaatttattaaacctaacaaaagtacatgatctctttccccttttgtagagaacaatgaaaaggagagttctatagttgtgggagggaaaagttacatgtcatgacatatatgttatcacatgtacaacaaattttatagttggtgaggatagttgagtttcaccttattcaaatttcaaatatatgtcatataaatatataattttttttatgagaatatatatcatagtagtatatattatagtagggaaagtgatgataaggggtttggagacaaaaatggacccagcaacaaatactatcatgatgagatttggaagactctttaggaattgatagaaagggtatgattgttgcatagaattcagtgttttctttctttctttcttcactatttaacttattgctttgccttgtaatctttttggaaccattatttattacacttttgaattttatatatatagatcatcaacatgtcggatctctaagaaaccacactcactatatttcttctatatttttatcactattattggtttggaatatgtattgttctacatccctattcttaccaatttatgaaatggctttcattaatttgtaattgtttttatttcactttgtaaagatcccaatgtgtttaaaatgatctctctccctctcatttttcttgttcacaattattatgagtctttatataaaattttttgaagttttaaatgaaaacaattataggaaataatttctgattttgtgggatctaataacaaatacaaaatttattagacttttagatacatgctaaggacttcttctaaatacataaagatagtctttctggatgctaactagggttgacggaaccttgcatgggcgagttgaattgatattctctcgaatggcaaattgaatcttgagcttggcctagtttacattatttgggcctactaacgggccttaagtttctattcagaatctatttgtctcttcccggaaacacgaataacaaaaaatattatatattttgtgcttaaaatttttataaaacaaaagattttgtagactttaggggagagtggaggcctaatgacattcaaaactacaccaagttgggcgctagtcttgaaagctttgcagaggtaatcatagtcagtttcgagaacattcttcactcccatacaacaacttccctctagcatagccatcgtgctatcatttgaaataaaagagaaacaactcgccatatttacctatgacagtcgattaatttattgtcgtaaccacaaccactgtcatacacaaaataaaaagtcccataccgattagattgaaactcaaaatgagatatttgcaatatagggatttatataaatgagaaatgaggaaagcgatttctttattttttttttttgtcttcattatattttataatattgttataaaattattcaaaaatattgtctattttgtgcttaaaatttatatcaaacaagtgcttacaatcgcagatggagaaagattgagcggagactctgcatgcttgagggagagagtgaaggccttagtgacattcaaaacttcgccaagttgggtgctggtcttaaaggcttgacaaaggcaattaggatcaaatttaagagcattcttcactctcgcacaataaatttcctagtgtagctgctgtgctactatttgaaatgaaggagaaacaatcttccatgttcactatgacaatcgagcaatccactactataacatagccaccgccacatacaaaatagaaagattgatatcaattagattgagattcagagtaagagatctgagatttaaggatttatataaataagaaaggtggaaagggatttgtttctttgtttctttgttttttctttatccttattatacttttgtaatattgttataaaatattgtatattctatgctttcaatttaaataaaacaagagcttacaatcgcagatagattggagactttgtaggcttaagggagagtggaggcctttgtgacattcaaaacttcaccaagatgagcttcgagaacatttttattctcgcacaacaactttcctctagcgtagaaatcgtgctaccatttaagataaatgagaagtagtctgccatgctcactatgacaatcgagcagtgcactgttgtaacaataatcactgccacattcaaaataaaaacagccataccaattagattgagattcagaatgagaaattaatctaaaatttagagatttatataagtaagaaatgaggaaaggaatttctttctttcttttttttttgtttttttttttgttttatcttcaatatgtttttataatattgttatgaaattattaaaatacattgtatatttcgtgcttacaatcgcagataaattgagactttataaccttgagggagaatggaggccttacttgtgacagttagtagtcctgtgatccgtaaggagaaataccaggtaagctgtgcaatcccacatcgtctggggaaggtcatgtgtgatgattctgag

SEQ ID NO: 17813 - DNA, 8299 bp, Cannabis sativa
aaaattttggtggtggtggttccgaaaatttgatagaccatcggacttttcgacggcggcggtcattgaggaaaaatcgtttgtaaaaaaattaacagctgaaatagacagtacagtagatgacggcccttatcgaccgcgttatgtgattcgaaattaggtcatttctttcttagccgcgtttctcctattcaattagaatatatactatttagtcaatattcacatatccaacaaacaatcgcatctcttctcagcaatttcaatttcaatttcttcaacagaaacctagaatcccaatttgaaatcctgagtaacgatcgccatggggaacaccgagaagctgcttaatcagatcatggaattgaaattcacatccaagtcgctacaacgccaggccagaaagtgcgagaaggaagagaagtcggagaagctcaagatcaagaaagccatggagaaaggcaacgtcgatggcgctagaatctacgctgagaacgccatccgcaagcgaaccgagcagatgaactatctcaggctgtcttcacgccttgatgccgttgtggctcgcctcgatacccaggccaagatgtccaccattagcaagtccatgggttccatcgtcaagtctctggagtctactttggctacaggaaacctacagaagatgtccgagactatggatcagttcgagaagcaatttgtgaacatggaggtgcaggccgagttcatggagagcgccatggctgggtccacttcgttgtccactcccgaaggagaggtcaacagccttatgcaacaggtggccgacgattacggcctcgaggtctcggtgggtctgccgcagccgggagcgcacgctgtgcctacaaaggagaccgagaaggtcgacgaagacaatctctccaggcgccttgcagagctcaaggctaaaggttaagacttttaatgaattccatcccctataaagaggacacaggatttcatatgcaatctcattacatatatatgactattaatatgtatcaattgaaaacgaagactgctttttgagaagttgaaatttcatatgtaaattatattgcatttgggtattctcatttaatctttttcttaacaatggtgtcaattttctcccatattggcctgacattttctatgacttttatggtctttgtgaataacttaacatgaatggagcagtgtctatgaatttctttctaggcttttagctttgattagctaatatgtattgtggatataacttatgtgtttgactatactgtagtgctctgttagttctcagtacagtattcattttaagtacttgtgtttgattcaattgctggctttcaacatgattggtatcgtatttatatatatgtctaaccttatcaaacaaaaattttcttggtctctttttcctcttgattttgtggtctaaattagtttcttatcttcatagttcatagttcatacttttgtagaaagtttttaatatttggagtgagccttacaatgttatcttctatttatatttgtctgtttagcttcgaaggttttctcctaaatgctatggtgttgtctgtcaaatttcaaatatgttatgaaagctggcctttttatcagtttattttagtacctcttagattaattctaagttggataaatctcatttgatggtaaaaaagataagagtggatttgaagaatgctactttgtgaagcctctcttagcagttttgaaagttctcttttcatcagatattttgaggaagcagaaactatatttgattctcatctacgtcaagtggattagcaatcgggttgggttctgtatgtataagctttgaagctaagtttgctgctcttttggatcttacaccaaatcaatcagtttatgagtccgttttgttttctctctttggtactgttatgttctggtcggttgatttgggcgtttggtatagggttagacttggtagaaatggtaggaataggaatctgaaactcaaccaatgtttccaggtgaatctcacatttaagttttatatttgcttaatctttaatctaagcaccttctaactctacttccaaatcaaactcatataacaaacacattttagtttttcgagttcaaaagtacaaatatctttgtaattgttttcagtacaaataagcttgtataaaattcacatttaccaaaaatgtaaattcttagaattttgtgattaagtattagttcctcttgacatctagaatctgattcatatcatgcagttaaacattctcgtaggggtgcgtaagaatatcgtgattgtgatttgtggtgtagataatctttgtctgccttattttttttctctctgaattccttatctgcggtgttgtttttggtcaagagtcaacacaagtgagaagtccatcaaaatgaataataaaattgaaaaatgtatcttattgaacagactaaactgaacttaaaaaaataaaaaagtaaagtagcctctattggcttatttcacagtttcatcctaattcgtaatcatttatgatacttttgctgtcaattttattatgttagaataatgaaaaaaaataaatgagtttaaaatataaaataatcataaataatattttactgtaatgtttataaaaaataataacattttaatttaattaaattatttatttttagaacaagtaattaattttaatttataaatttttaaaaagcgagtttattttttttatatttttaattaataaaaaaataatataaagtaagttaagaaagaaaaatatattttctactagaaagagttgtaatatttctttttatttttctcttaatttgtatgagttccacaagatttttccattttaaaatttagtaaataattttgtgaaaatcaatactatacaatcaaaatttattctctcaataaacatgtcattaatctcatttgacaaatatatcaataaatgtctatatctaatttctatatgtggtcacaaattatagaaatgaaaataaaagaaaagacaccttgaatttatatattcttttcaaaaggactggaaacattaatggcgaggttctaattgaaatcaatcgaaacaaacaaaataaaatgatctccacatttaggagacaaaccacacttctaaatttggtatttttagtattattttttccttaaattcattctataataaatatcttaattaaagaaaatgaatttatttaaaaatatccaaatattagttacattattataacaagtggatggatgttgttccaatgtctgaggttagaagaatagattgagaattagacaaaagaaaatgcaaaatgccatagcaaagtagtgacaaggaagaaaccaccactaagaaatggataaaatgttgttggcaacagcagcagagcagagtactacatagtaaaacgttctctccaatgctcactcaatataaataatctcaatttttcgattttatcgctacatacataccctttccttatcttctacatctacccacttacttaagtattattaaacagtcaactcatgcatgacccaattgctataataactttgcaataacaccatctaactcctgcctaattttcattattactaggcttaaatttgacaatcaaaataatggaaattccaagttttccttgtatctccacaacaagttttccttgaaaaactaactttagatcctcaaatttaaaggagaaaatataaaatatgcttgaaaaatataaatctatatatgaacccaatttaaaccactcagaaaagctaaagcttctagctgaaaaattgcaattccttttgaaaaaataaaaccagaattagcaacataaacaaacataaaaacataagcaaaaatgctaaaatgaatgagaatgatggtttttaaactaatatatatatatatatatatatatatattatagcataaataaacttgcaaatgtgtaatttattaatagtagtataattcctttgaatgaaaagttctcaagctaaatcttatagaaaactagttgtcatctcgaaaggagttttggaagactagcttatttatttggaaaaagtctttaagaaaattaattgtcttttaaaaatgagttccgaaagactaactgtcctttccaaaaaaaaaagatgctggatagtttgtttcaatcaactttgtgtttatctaacacgtccttctagaatacgcctcgtcagcttgtgacttacgtccaagaagcaggaagcagcgtagtttatatccggagaactctttgccaaagttgattcgaaaatctcacttaaaaaagctagttaaattgattaaatcgtaaccgaattaattatttagtggttacacccactgccttaaaacccatcagaaaaagctagagcttctagctgaaaaattacaattccttttgaaaaaataaaatcagacttagtaacataaacaaacattaaaacattacaggaaacaaaatgctacaatgaataaaaatgatagttttttttaaaaaaaaaaaaaaaacattctactgcataaactcgcaaatgtgtaatatatttatagtcaacctctaaattattcattataatcaagtagcgctagtctttatttatcaatcaaaaaagaaaaagtaaagattttttttttttctatacaagaaaaagtaaagatatgttcacatgtttatgaaatattttgagaataaataataataataacagaaaaaatttgaggtaaacaataaaactttttactgttttactttcttaaaccacaaattaatttttccgaaataacatcactattttttttattattattagtaagtaatgaaatccataagattagcaataaaagaaagaaaaaaaagagacaaaggttgccgagttgcagacaagtgaacagcgtgtctagtagtttgattcatcatcatcatcgtattcgtattcataatcgtaagtaaagtgtgtctattccccaatacacgtccacttaaacacctgtactgttctgttctgttctgccttttgttctttttcgttacattcgaaaatcccaaacatttttcaagtcccatttattaaattaataaatttgcctttacaacattacatctcatcagtcatcttaatattaataaaccccaccacggaggtagatagatagagacccataatacacccgttaatacagaaagtgagaaactgttgaaaggcatggacgtttttgagttatttcaacccaaaaccaaaagtcttgttctttccttccacctttctccgatccattaattaaacaacagccttttgtccatttgtagctctgggggtttgcaaatattggtaaagttatttcctttttgagactaatagtaaggttgttgaggtttggctggagatgaaggagcccgaggaagaagaacagcctgcgttcgagattggggtagtggttccgaagaggaataatgtgaaggcagaggatttgaattttgattctgtggaggttcttgtacgtgaatttaggaaactgggtcttatagttgagagagtcattggggttgctgatgagtttctcaaggtttttattattctcaattcctttctttctccattaaagcattttcctttttcttcatggaatggaatattcacttgtgatatatataaatgttttccctttattgatttaataaattttctaaaggaacatattatgctttcgtaattggctaacggtaaagtttctaaattttaacccaattattttagttagctgcgcctttggagactttggggagagcggcagtcagtttgcaaataaagaaacgaacccatattggtaatgattaacatagcatacaaagatcatctcaactcttttatatatttactatgttgttacaattttaaaaatttgtcctgttatacctttcaatttgtataatattataggaaatatgtgaagaagtttatccaatacctgatttcaggagtggatttgcaatttgaatgggaagagtttgaagcttttgtgagacaacctgatggttcattgttcagttggagtgagcggtttcactgctatcagcacttaatttatagaattgtaagtcattcagtcatccttagtatgaaaaatactcatttaccttcagtattatagagtttgatctgctccatctttgtattttaatcaatatagaatcattcaatgatccttctttcatatgaagacatccattatttattaactaatcaccatcattactttagacatggttattcttctccttattgccaccttttggtgtgatgtatctaataattgagctttagatggtgactaatcaatacttactaactttaacttgaatcctttaatgatgattagatgttttccatgttgtcattgaatctgacataatttgaaacattgaattgttatgactgtcatattatgtatttgtatgcatacttttgtctatgatcaataaaatcctatcaaggtagaagtacaaatttaatatgagcttctcttctatttgcaaattctacaaaatgtttaacaggagaataagagccagtcagctataatactaaaacatgatggtaaggaattacagtgggaaatcggggaatgtttgctgcagaagttgaagtcggagagcattgttaaagatgtctttccattgcatggtaagcattatcctttaagctatgcatgcatattcgatatcaacttaactgaaaatgagtgaattttttggttcatagatgaaataaagagaaagaaactcattcacagttgggccttacattggcgggacttcacaaggcagccgatagatgagatttactcgtattatgggacaaaggttagtaattatgtagtaaattattatgagcagattattgaggtatttgtttgcgtaacatctgaacaacgggaattttttcacagattgcagtctattttgctttccttggaatgtatacaagatggttgctgtttccagctttctttggtcttacgttgcagatcattgatttcgggtaattctgctagtctacttcttaatatcctatggactgttatcacatatttgtgcatctggtgtgatatttatctgtaagaatggtttcttgctctcttaggtcattgcagttactggtgcttcccattttcttcataagcattatactatgggcaatcatgttttcccagttctggaaacgtaaaaatgctgccctactggccaggtatattttttgggtgaaccgcctttccatacatttcagtttactttgtcttatatttatataatgttttcctttcatttcttattgtccctattggtttgggtgttgtagatggcaaattagttatccgattggagctgatgatggatgtaaaattttgggcatggagtggggttccttacagtcacctatagaaattataagaaaatggggaactgacaacacaaaagagaaagaagttttccaaaggaatgagtggtttggacgaataaagagattcagaaatgatgccttcgtaatcttaagtattatatgcctccaattgccatttgaactggcctatgctcatacttacgaggttatggagtctgatcttttgaagtaaggaaccaggttatcttggcattgttttcgtttcatactttccaaatcaacattcaatatttctatttcatcagtttaggctctttgttcacagagatggactaagttgcttctttgttgcattctaagaattagtgcatataacattctttgtttcggctgtgttgattcttatctgtgtcacgagaattgacgtttcgattccctttgtgttcagatttgggcttacaactatttatctttttgccattcaatatgttacacaaatcggcggtaagatctctgtcaagctcattatgcatgaaaacaatgaaaacactgaaaaaagagctgacagcttagtgtacaaggtatttaacagaaagtcgggttttcctcctccataaacaatcattttcatatacttaacaggcctagtttccttgcaggtttttggtctgtattttatgcagtcatatattggtattttctatcacgcgctactgcaccgcagtttcttaactctccgccaagtcttgatacagcgcctccttgtgtctgaggtaaactacatagatagattttcctcttcctttactttcttcttcgcattcctttactaatgtgcttgaa

SEQ ID NO: 17814 - DNA, 3334 bp, Cannabis sativa
ttggaggcttgaactgttggagccttaattgaggtgattatagttgcaaattattttactattattttatagtaataagaaggatcataattcatttatcttaaatttggaagatgtccaccaaattataattagtcaatgataacaaagacattatatttggcattgaattgacttgaacaaattttgggtacagagttccaaaactaaaataatcggctttagcttttagcaaattataagactttttggaataacaagaaagaaagagatccttagaatatagttagttaatataattaatttgtttctttaatttttgtgtggctcttttttctttccttcttttctaaattgaaaagcttgattgtggatcataggaggaagcttcgatagtgaaagggcttaattagttggaggaggctttcacagtatgtatttacttttttaaaatgcatgtatttactattattatttattttactgttgttagttacaagtttaatgaacatgtgatataaatatgattaatttgtgttttatgtaatttatatcaacatctatgtgcaaacatgttaataaaaaaaattaatttacatgttttaaaaaaatatttttcataaattaaataatttaaaaagtaataattttataaataaactaataaataaatgttacaataatttcataactagataataattttaaataattatatccacaatcattgggtttctacaaataaatcataaagattgtcttgtaaaatcataaaagtactaaattcataaaaaaactttcaatgttttcactattttatttgtaatgagttctcctctcatttcaaggaagaagcaattatgatgattgataagagttggattacatgtagacgtcgtaactctgatgagttttggaatggccttcaagcatttttaaatattgctaaggatcatgtcaatagcgatggagccgtgaaatgtccttgcaccaagtgtttaaatatgttgagtcaaaaactagatattgttcaggctcacgtacatagatttgggtttcacattggatatcaaaaatggatttatcatggtgaagtggatccacctccagtagaagatgaaagtccaacaacagatgagatgattgatgtcattaatgacataattggggagcaaaatactaatgaagagcttgatgaaggaattccagagggtggtggatgtggtgtgggtgaagattttgatgaattgtttaaggaggtcgaagctgagttataccctggttgtacttggctgtcttccttgaattttttggtaaaaatgttgcacatgaaggtcattaataaatggacaaatagttcatttgatcaacttttgaagtttttgaaatttgcttttccgaaggaaaataagattccttcatcacactatgaagccaagaagagaatgaggaagttggggctaggatatcaaccgatccatgtttgcaagtacgactgttgtttgtattggaaagagaatgcatcaaaacatagttgtcctatttgcggtgagagtcgatggattgacaaaaagtcaaaagggaaaaaagttccacaaaaagtgatgcggtacttccctttgacccctaggttaaaacgcctttatagctcaagacatacatcaaaagatatgatttggcatagtactggacgatcaacggaagaaggtactatgcgccacccagtcgatgggagagcatggaaagatttcgatgcaagatatcctaattttgccaaagagcctagaaatgttcgcttaggtttggctgctgatggttttaacccatttggcaacatgagtctgtcttatagcatgtggccagtcataatgacaacgtataatatgcctccatggttatgtatgaaagaatcttctttcatgttggcgttgttaattcctggccctaaatcacctgggaaagacatggacatcttcttgaggcctttaatcgatgaattaaagatgttatgggttgaaggagttcaaactcgagatgctacaacaggtaatatattcacaatgcgtgcagcactattatggaccatcaatgatttttctgctcgtagtagtttatccggttggagtggtcaaggatataaggcttgccccacttgtaatgaagatactccttcgtgtcgtgtaattgggaagacagcatatgttggtcatagaagattcttatcttctaaccatcgttggaggaagagtaatttgtttgatggtaaacatgaaaaaaaaccctcctcctagacgatttagtgttgcaactatacaaaggcaactatcccatttatcgattaagttgccaggaaaacatacaagctttggaggtgttaaaagaaagcgtgatccgagagagctgaactggactaaaagaagtattttctttgagcttgagtattggtcttcacttgaactaaagcataatttggatgtcatgcacgtggagaaaaatgtctgtgatagtttgcttggtactcttttgatgaatgataaatcaaaagacactgtcaatgcaagagtagacttgaaagaatggggaattcggaaagaattgtggcttagagagaaagataacaagattaccaaacctcatccaaggtactctttcacatcagatgatagaatacggttttgtcagttcataaaaggagtcaaactaccagatggatttggttcaaactttaagaaaaaagtgactcctaatgatgcaaacattattgggttgaagtcgcatgattgtcacatacttatgcaatgtttgctacctattggggttcgagggtatttggataagaatatttcaacgacaatcattgaactctgcacattttttaaacagctttgtgctcgaactttagttgtggaagatatgagaaaagcaaaagaacagttgatacaaatcatgtgtaacttggaattaatatttcctccggctttttttgaaacctgggtctcggttcgaaaccaggttcggatccgtgtctgggtcccgagttcgattccgtgtccctgttcgtgtccgtgtccgggtctggagtcccaggtctgagttcgggtccaagtctaggtttgggtctcggcacctgattccagttcgtaactcgcattcgggtcttggtctgggtcccgactttgagtcaaatttgggtcccgggtttaggttctagtctggattcaggtttgagtctctttcgggccccaagtttgagtctaattttgggttcaggtcccgagtctcaggtttgggtcttgtaccgaaatcggacccagactggacccggacgagttct

SEQ ID NO: 17815 - DNA, 5379 bp, Cannabis sativa
  modified_base (5320)..(5326): a, c, t, g, unknown or other
tcatagaattaatgtactaaatttctacagcccattaacttttcagattacaaaagcagttaagaagttcagcataaggaaaaactaaaacaccaaaatgcaaaaaaaaaaaagcaaaacattactatcataatcccaaagatacagagttttacctttgtggaaggcccttgggcatccatcacaaagtacaagattcccaccatctgcacaaatgatgcacaagtcatcattgtccttggcagaatatttgcggcctctagacaaagataccgccaattcgtggagagatacgccattcgatgtgtaaatatatgcataactgccagaggacaaaaaaatgaatgataaatcaaatttgagatcatctagctgctatttttcaaaaatacatttatatattattttcatgttttgttataagcacaatctaagtgtcaagaattgttctgaatacttccttttgctctagatgattgtcctaaattttaaaaaatatttctttaagtaatcaaacagaacaaagataaggaaatatatgatacatctaaggggcaagaataaacttacggttttcttcttgaagcccaacctgcatgagcttcaaactgtgaaggactgacctgcgaaatcgatgaatgcaacatcagaatctgaaataaaaggacttgagatctgtgaaacttcagagatgtagaatgataccacagagttgcagcatcgacaaaaaattccaaagcccttcttataacccacaagcaatttctgttaacaaaatgcaccatttacttttccataacatacaatacggaatttacgcatattaaatcagaacttgaacaacctgtccacgtgcataataagctacttcacttccatcaggcagtccaccattctcgaaaaccaatttatgtagccgttgatctctttggaaaatatgcacccaaacacgatggatacaaattttaatcatcacaaatagaaagtaattatttcagtaaaaaataaatttcgccaatacaaaaataaatacttgagtgaaaaaaaaaatactgactttgttgtgatcttccaatgaattttttttggtgaagagacactagctgaggtaattttttgggactttgaacttgaaagtaaaactgatttcgatgacctaaacacagataaaaaataaatatataaacaagatatgcaacgttcatcacctttaaaattctatcaggccaatttagaaggtcatgccacaatatacgaggacttgaattaatttaatagaaaacatgaaaactttcttactacattacactaaacaaaataaactaacaagaaagagtagacaccaactttgctgtcgtcttccactgacgcttatatggcggagacacacgcaatggagaagcacttttagaggcttttggcattaacagtggtgttgataacctgcagtttatatgaaatatataagaaacaaatgggcataaagcatattacatcaaatgtaaaccaggcagaatagtttacagttacacaagcaaacatcacgagtatattttccttttcaaaattccaaaaattcattaggaacataaattataaataatgttccattttccaccctgaattttcaatttaaagagtccgttgcactgaacattgttattgttgttacaatgttggcctttcctttacatatttgatgaaaatcatcacaacttcgagggctatagttgcatttgatgatatcaatatttttttaagttgaatattttaatgttattttatatgtgagtatagtataatttcactttgacaatttcttagaacaattttttttttctttttgctgaattatgaacaattttattttttgtaaaatacactctcttacatttgttggtttactaacttacccaatacattaatgtgaatattaataaaacaaaaataataattactattacgttctacagaaaataagtaaagagctgaacattgtacactaagttacctttcacaattgtacataaattgaaaatctcgtgataattatattattctagataattgaaagtgaagtataatttaactaattcccagcaaaaatatacatatatatattaatatataaatagacacatgaggtaaatttgtttgattcgtttacaaaaccaaaaatatccacaccaatacaaaaataataaatattaggaattatatgatttacaccataatttgagtataattaaaattaattttatcgaaataaataaattaataaaaaaatatgctgctccaaaagaaaacttagaaaagcgtaaacccgatcaatcaaaagaaatgagagagagagagagatagagaacaaaatagcatgagagatacctactttcttgttagcttccaagctcttctatcttgagaagagacaaattctggaggagttatgggggactcggaaacaggagctggcacaggagatctgaaacaaggaaaatcgaagcatactataaatggcaacagagtactggccaaacatacggactgaaaacagaggaaatgaacgcgataaattacatccttgaacatccgtacggacacaatcttattaaagccaagctttgggtcattttcttttgtgcttgacataatatttgattacagtaaacggctcaagctgacgctcatatgaaccatatctcaagacaatgccagatttacgtgttggtttaatataagaagtttctaagccgaaaagctctaagacttgcaaggaaatatagttttgcaatcaacaagttccttgcatttatttacatcatatggtttctaaattataactgaattaggccagtttcaaatatgccataccttattcttttaccaagtgactcagttgggctgctgcattgtggatttttcaaatcattgcatgaattgcagagagattcgtcttttgcagcacatgatggagggtaagacactataataaaccatagaaaagtcagcagcaaaccaaatatatattataattaatatgggttaactgctctgtttgcatgcaggcacagtcattcatcaaaaaacaaaaagacaagcataacactaacctctgcatttttcacaagtgaagtacttttcttcaggtgaagagcttatgaaactctgaactgttgcctccaatgtatgtagaggtgcccccctgcatgctttcaacagatcaaggaggctcctcccattttcgagacagatatactgtgcagctcgtctgtactgtctacaggcgtgaatctcaaactgggatggcggaattacctaacattaaaaacaaaaaggagagaaaccaatgattaagcccccttagtcatttgcgaaaccacaaccacttaatatgcgagtaaaaaattagattaacaagcaattctcactctgcatcctttgcataaggtacatgaacacaatatcccaccatcattgattatgcctctaagaccagatgcctgaaataaatagtaataccactaagttattctgaagcagaaaatgaaaaacattgaattgggtatcaaaaatgaaccttctttccacccatgtaaaccacagggaccccatcaactaaaccagtatcaaaaagttccttaaccgtggtaggcttcttgttaagcgcaatcttcttcgacatctttaattctaacttattcatcgtactagctgatgtgctaactcccgccgatgaatcttccccatttaaagtcaacatcaattcatttcccacagcctcacgttcattcactaaagtctttacctctattgtttcaaactttggtttgaatgccgagcgagtaaaccgccttaatgcctcttgcgccaaattcttctcaaccattagtactggaacctccacagcaccaccttccaaggggaagggggctgccagagaggaatgaagctcactcgtcgactcatgcttaaccggacgaattgccgaactaccaatagtatcatcttccactaaaacttcaaccaactcactttgtatacacgcatcaacactaggaggtggcttaagccgctcaacatgctcatctacacgcgcattgttgttccgagacttcctagctcgggtatacacaattacgccattcacaatacagcctttaaatctcttattgctaaaattctcagaaccttccacaccagaactcgtctgtgactcagacacagaagcagatgaagcccgagtcccaccaagtagcgattcggcgagctcagacttggcttccaatacacgagccaattctctcttcatgcctgttcaatcagaaacctctatacagcctcacaaaattcacctccaaatctgtaccaaacaaaataaaatcagaaactcaacaaaactgtaccatgaaaaaacaaagaaaaagtctaggagaggaggtttaattaggggaaaagtaagtaccagacgagcgccatgggagtgatattggatcagatggtctggaaaagaaatggggcaaaggatggatcgggtcggagaagattaggattttgggagggatttaacattggagggtgtagatttggattggatttggttgcagagaagaactgaactgaactgaaaagaaaaggagtaaagggccgtcgtaatcggattactcttacaagaaggggcaaatggcacaatccgtaaataagctatacagcttgaaaatgcgtcagatgatatttaccaaaaatactctactacccctttgcttttcacaattttgtaaaaatagcatttataaaaatattattggcaaaataattttataaaaaaatttattagcaaaataaatttatatgattttggaaatgatcataaattactttgtgccactacaaataattatttgatcgcaaaacgactataaatttacattgtgtgaccatcatgatctcatagagtaaattaagttagattatttttagtaaattaagttagattatttttattttgcttttcacgcttagtcgtactcatctataccaatccctcaatctacatcattaggttgtttcatcatttaaaaaagaaaaaaaaaaattactcttcttgccattctctcgagaaggaaattaactcggttataaattaatagagcattatattgtttttttagtataaatagtggcataatgtaacgctctactgtttaggtacgctacagtaattttctaattgttgtgctcatttttgctaatcaaagagtttctcaaaacaggtgtcaaatttaaacttttatgatgaaaactttttttttttttttgaaannnnnnntgcaactttcattaaagcaaatcagctaacaaaatagcttccaaaccagaagg

SEQ ID NO: 17816 - DNA, 4097 bp, Cannabis sativa
aaacagaaaaacaaaaagctaatggccaaccttgcttgcaagtaagaagggaggccattggataagcttcaaatctggatcagccatgtatggaacaagtaataagtccatctccctggaatacaaatttattatcttgttggataagatatcaaattcattatgttaaacacaaatgacactacctattacttatagactaaaatgggatattggcttgtttcctgatgcagcattcaaattttacctgttacttataagatcttcctctctgaaactattgactatttcattccacaactgggcaaattttgttgcctcccgcgttttagatagaacctaaaacaaccaccagcttggttatgactaaaacaatgtccttttaagtaattatatatgtccaaatgccaaattgtgtaaaaagtatcaattagaatatctggcaatgcaaagcagtaacaaaacctctttgtctttgcgaaagaaagcagcctttatccccttcttcttcgtatgctcacttttgtcctttggaattaaaagatcattaaaagcacctggaatggatctgaatcgagaccttagcatgaccagagtccgaatctgagcaaacaaaaaaagaaaattatcagtttgatactttatattcaccatctcaaaatcaataaaaggaaatgacaattaaagagataacattctactttctaaacaagaagaaagcttgatgtgaagaactgtttaaataaaggaagattaagataccacttagctaagtgataatatacaattagtcaattcaagacaaaacctttacaaaccacacacttgattgtgcaacacataacttagaacattagttttttaatgtatctgaaacataaaaagtgcatgcagcacatgaaagtttattatagtaaataactaatagatagtgattaaaatctgtgaaatctaaacaaaatagcaacttgcatttagtgaacggtaaacccaactgctatagtgtcaaatatactttacttggttgacacatcataaatttagagaaaattttccttgtaaaatctaggtctaactaacacatgattagcatgaagcttttgaagtatttccacaagatgaaacaattttagggaagtcaaagatccaccaacctcaccaagacgcctaaatgcaccatatatacctccaaatattgtggagaaaatagcataccaaatttgagtatccatgaagtagacctacagtgatccaataataagtttaataagctcgaaagtaagaaatctacgaaaaatattataccaagataaacagacacatacaaggagaataggagcccaaagtgcaatcaccactccaatgttattattggctgcaagtaaattataataatattttagttttaatttacaacataaataataatgtatacagacatgctgttaccatgggggaagaactcatgccattgataggttgaaatatgaatttccataatggcttttgttggacctacaagaggcttaatctgcacatacaaccaaaagagcgagagagagagagaatttggtatcaatgccaaatagaataaacttgacattaattaaaccaggttcaatatatatacagaaatttcaatttaatggagaagtaggaaacaatatgtggtatctagatcaaagatttacctcaagatagtagctgaatgctaattttgatacaagcaagagaacccaaaacatggtgtacctacaaaaaaaaaaaaagcaattgtacaaacttatcgataaatttcttgctctagccattcccaaaaaaaattatataaaattgacttaaattcacatgtttacttgaaaagtgaaaataagctctcatgcattccccttccaacatagagccgaggctgcaagacaaccaaaattaaactatgagaaaagaaataatgtttaacaaaaataacaattcctggaaaggatataggtaagtatatgataaaaaatttaatcaacaaagaactttattaatatttaaaaaaatcttctacaacttctctatgcatacctgagaccaccacatcatgactgtcaaaattgtatagttggatctttcaagaggtcggcgaatgaatgggaatagaaacaacaataaggacagcatatttggagataagtaaattacaacagccataatgaacacagaagatgagcctggaccatttccaaaccagttcttcatcgtctgtgcaaacccagaaggatttttcaacccatatgcataagtcacaggtaagataacaacccacgctgcagctgatataacctttaagatatatcttagctggacataagaggacatgctcttccgagctttccagctcaaaattacatcaagagtggctgcaagataaagacaaatatatataagtataactcacatttgataggacaacattttcaactaaaatttgacaatcaatgacaatttagcatcttctaattgtagagcaaatttattagaatcccatatcgactgtggaattggtttgggttgtgggtaatttataaatttctaggatcctacttataagtatgggattagttggtggttataactacttgagcatgctcctttcataagttattcttttgggagtgagttctacctaagtacccagtattcttgagtagaaccctggaaaagccctactgggtattttgactaataagttgtgtgaggataatataagatgatcttatgaacgatatattactttatgcataccttgtcctagcttcaatatggcagcagtaataaagatactcagaactttattgaaaacatccgcctcaaatatggagcttaattctccggacccattccatgcaactatgatcatggccttaattcagtttagaagagcatacaaagaactcattaggccaatatatgcagcataatatgagagagggatacatgttaataaacaaaagagaaacaaacctgtaaactcaaaatataaaagctccacattctatcaaagctcctaaatatatggtaaaatgagcgaatctcaacaaagttcgattttccaatccatcgatccacattaggagcactcctttcctaaaagtgatgaatttccatcagtcagaacaaaactatcaaatcataatcaagttagggcctaactagagcatctaaactctacaaaggtaaggaattgttgattcactacaatgtactaatgtaactactatttcacaacctttcatcggttcctcttaactgaaataattaataccctacatgtgctttcccattaaggggagaggtttctataatcgatttttggaacaacaaagaaagaaagctataagctgtgaaggttttgttcgagggaattgtcaaagtatgatatttgaattgtattgggttaataattcaataagctaatacatatatttatgttcaacattagattcaatgtttgtgtaagttctattaatgtagtcgataagtaattcttagaggaaatggtggttgatggttcttgagtcacagataacatgattcaatagttaaggtaatatgtgtttcaataagttctgagaagaagattacccacatttgtgtgaaagttaccttgtaggtagcttgttgattgataatggaaagctaccacataaatcttgttctactgatattctgattcattagttattttgatttactagtttaggtcattgaatgtatcagtgtttgtttttgtttacttgcagatttaattggtggtactgatctttaaaattaattaatagaaagagtcaatcctaataattcagctataccaatatacatgaaatgaataaagtatatatgtaaaatatttatataattataagcaggactgtagtttttttgcttattattgtttaggactgtatttcaatcaggattttaatatttcagatttcttagttatgctagccttcaacccttcactttgagttgcaattaaatttattttcgtagtcatgttaagtttctttacttgttataatccaaattcttataataggcatcctttaaaa

SEQ ID NO: 17817 - DNA, 7446 bp, Cannabis sativa
  modified_base (5862)..(5869): a, c, t, g, unknown or other
acaagttacaaatacgtagaaagaataataattggggtactcaatttaacttaattatttgaaaatatatatggtaattatacagcggattgtatgagacatgatcaaataaaaaaatatttaacgaatacatatgtcgatcttttaatttaaatatatatttcaattttaattatttaataaactttatttagtaactaatatatgtagttgatagaaataagatgtgacataaatcattaattagatgtaatataataaaatactaaattattttgggccaacgtgagagggaaagcccatttgagtgagacccgccccaaatgccgtgcattaggccgagtgagacggggtgaggacgtggtgtgtaagtgcgtgtctaccactatcactactaaacctattaaatattgggaaatttagatgatatagtaactagggaaaatatatttgcacccaaaaaattgatgaccacaccccaaactaaatgcaccccatttttttttaatacattttattttataattacacccccttcaattccaattcacaactttatcttaattacaaaaggataaatatgtaattatataattttattagaaatggggtgtaacataaattttaagggtgtgaatataatgcccctaaatattatctcaatttctattatttttttcaaggtttaattgacatatatgcttttttttttaatatatatatacgacagacacgaatgcaacacataaattttagctagtatatatatatatatatattataacttagtttatgttttttttggtctttgtattaaatttagtttaaaaaataaattattatatatttagctcaaattttataattcaacttaaaatacataattttaaaccatatgccaaaatatttgaaacttcttaatttctaatatatatatatatatagtgttattagatgattgttttttattataagtgagcataatctcaaagatataaaatatatgtggaccaatacatgaataaggatgaggtgcgtgtctttaagttatcttagattatactaagtagatatataaactcgcaacgacaagaagtttgttgagaacaaacatgttcctcgcaccataaaaaataatgagaatacaaatgatgtgattaaatgcaggaaaacatagagaatgtaacatagtaacatagtaaaatggtagcgacatatatacgtttatacgaatacaaagtgtttctcccctgcatcttttacattcttctcgacatgcaaaattatttatatagatacacattttcatgtacgacaacttgcataaacttgcaagttagaattagttaacataagaacgctcagtatgcgattaacatactgttcaactattagtgtagctgtgtatacattaaatattaattgttcttttgtttatttatgttaattgatttattttcatcatgttttaatcatatgctcgtttggtgtaatgatagaagaaataacacatttcataatcatgaatgtttttctttgtaatgttgtcgcgtcccaacgcaatagttatttttcttacgtttggaagttagatttttgcaaaagaagaaaaaattaaagaaaatgtaaggaaaaaaaaatcaattttcatgtttaggacggagttttttttttttttttgtacaatttttttgtataagaacataagattttttttttctacatttcttttttttttccaccaaacttccaaacatatccttttaacaatttagtattagaaagtaaccgcaggtgagattaaaaaagacttgtttcatgctctcttaatgactataaggagtcgattcaataaccaaactaaaaaaaaggataaaaattattttaagttttttatgtttattttttttttacaaaccacatatgatactaacacaaatatatacaaacatgtttttaaattatttaaactacaaaagtaaaaatataattcttgtttatattttttgtttttgaaaggcaaaattgtgtgtgtgtttttttttttttttttgaagtggaattcatcaattcgaaatattacaaagaaaaaggctcgtcaaaccgaagagcttgacaaacacacggggcaaaatctaaatccacatagcactagctttggataacaaaatttgattggctaacatgtacggcacttgattggctttcttaaaaataaaaaacacaccacaaacttgaacgtggtgcaacagactttttgtgaagaaatgaaagttttcaatacagaggtgaatttgtttcagtgtggtccctgcaaggacagttgtcaacatcctgctgcaatttcaaaataggaattttccaaaatgattgtaccgttagaatgtaatcattatttaatcattgtatgggaatattccctttttctgttatgatctctgccagctgtactcttgagcatcttttgctctgttattgtattctctaccctattgggctctgccaatataaatgcaatattctcactcagccgaatttgagctgagatctataaaaatctttttctctattttttaagttgatatcagagctaaatagccatgtcgaccgactcctaaaatcctggaaacaatattccagcccaacctactgctgctgctgcagcatccaccattcttggtgcaagctctaccagttctcagctccacaaaccaattcctcaccattttagcaccctaaatcaacccttctccttgaagcttgatagacacaactacagcttatggaaaaccatggtttccaccatagtcagaggccatcgttggatggatacctcaatggaactaacaaatgtccacctgagtttgttgatgcaggtaccatcatggaaagcatagatggtgaagtatctcaattcgtcaaccctgcatacgaaaactggatcacaaatgatcagttactaatgggctagctttacagctcgatgactgaaaccatagccatagaggttttgggagttgccactgttgcagctctagggcaagcccttgaacaactctatggtgctcactcaaaattaaaaatggatgagacaaggactctaattcaggtgacaaggaaaggaactacacctatgactgagtaccttcgacagaagaaaaactgggcaaatctactggccctagcaggtgaaccgtaccctgaatctcaacttattactaatgtgctttctggtcttgatgtcaactatctctccatcatccttcaaatcaaagccagacccaaaacctaatggttagaactccaggagcttcttctcagctttgatagcaaaatagaaagacttcaggccatgtcttccaacaataaaatctcccataatctgtcagatcctcaagccaactttgctcaaaaaccccacactagtggacaaggaagaggctcaaaccagtactctcaataatatggtggtcaaggaggaagacacaccagcagaggaggtggaaatagaactcgaggcagaggcagatttgggggcagatctaatggttccaaacctacttaccaagtttgtggcaagtatggccactctgcagctgtgtgctataaccgtttcaatgaacattacatgggatttaatcctaacaatggcactcaaaccaaaaatagcaaccattatgcttttgttgctacaccagaagtctcggagagtgaagcatcgtttgctgacagtggtcccagcaatcacatcacatccgatacatcttccatgactcacaaacaagattatggtggtaaggagaaggtcaccattggtaatggtacacaactatctatttcacatcttggtaaaggtttgttaatgactaacacagggaaatctctactattaaaagaaatgcttcttgttaatctctgctattaaaagaaatgcttcttgtccctgagatatctaaaaatctgttgagtgtttctaaacttacacacaataatgatgtactcatagaattcaaatggcctttacttgaaggatctcgggccactacactatttcttgggaatagaagtgtatagagatgaaactggcatttacttgactcagtccaagtacatagaagacttgctgaaaagaaccaaactcaccaacctaaagtcgtgtcccacacctgccactgcaggaaaacctatgtcgttcacagatggagaccttctcactaatcctactgaatataaaagcataataggaggactccaatacttatgtcacacaaggccagacatctcatatgctgtaaataaactcagccagttcttgaaagctcctactaccgttcattagagtggagcaaagagagttctgagatatctcaaaggaacaattcacaaaggccttcacatcagttgtgatgaaccattgagtatcaccggttattctaatgcggattgggcttgttgccttgacgatagaaggtctgttgcaggatattgtgtgttctttggcaacactttagtctcctgatcctctaagagataagcggttgtagcaaggtctagcacagagtcggaatattgagctctggcttatgttgcagctaagatatcatggatcgaatcactgctgaaggagattaaatttcaaacaccaattgcagtaacttggtgtgacaatatgggagcaagtgcccttgctttgaaccctatttttcatgcacgaaccaaacacatcgaagtggacatacacttcttccgtgacaaggttctaaacaagaaattggacatcaggtatgtgccttcatcagaccaagttgctgactatctgacaaaaggactatcaaattcaagattccatttcttaattgacaaacttgagatggctgactcacccctacgtttgagaggggatgtgaagaaatgaaagttttcaatgcagaggtgaattcgttttagtgtgatccctacaaggacagttgtcaacatcctgctgcaatttcagaataaggattttctaaaataattgtaccattagaatgtaatcattgtatgggaatattccctttttctgttatgatctctgccagctgtactcttgagcatcttttgctctgttattgtattctctaccctattgggatttgcctatataaatgcaatattctcactcagctgaatttgagctgagatccataaaaacctttttctctattttttaagtctttttatctcatgaaccagtgcgtccacctctctacaacattcttctttttcattgatcaaatgtatcacttattgacaattagtttcaaccacaaactgctgaaatccccattgaataccaaccttcagaccttctcgaatagcgatcagttcagctgttagcggattcatgggttggtgcaaaatactacgtcacggtttggtcgggctatagcatattttaataatccaatataaatatcgggttgcaaatatttaattgtaacccacccaattaaaaattagaaaaagttcaacctgtccaataatttcgtcagtttagtcgggtgaacccgtccaaaccgttcttcatttttgtttttttttttttttataattattattgttagtttttagtattcaaataattagatttaaaaaataaaaatacattatttatttcaagttaaaaaatactatagtttaaattaattttaagaactttaatataagataaatataattgagtaaacataaaataattaaaaaaagtaataatatggtatagattttaaacttaacttcaatatccaaatacaataaaaattattaactataaaatctaagttttaagttaagcactaaaatgtctaaactttaaatacaaannnnnnnnactaataaatgtaatttatgtaatatattattatataaatcggtttaatccgggttaattgggcggtttagaataatttataaaccatccaatatattcattgagcggtttggattttcattatattatttcgggttgtattttttatgagtttattcgatttgatttgagcgatttattcgggttgagcggtttccctacaaaacactagtagcagcaaaaagaacttcaccattatggttaaattggtactagtcatctaccatatattaatgataatgatatcattatactagaatcgtttcaaatatttttggtcaatgccgttcacaaccttactattattacttgtggctaagtcttttggcataatttagttcgtactactgcattgaaaataaattgaaaaattaatatgaacgaaccaataattttcattccagatgtatatataacgaaagagatgcgtaaagaacataccatcaaattataagtgataactatttattagttctagcaaaaactcttaccagtttagaccatgacgatcggtcttgaaaatttggtaacagttttcattcttgtaaaggtatatagaaggataaaatttacaattggtacgttataattaatatttttttggcaataatattatacttcaaccttagaagaaaataaaatattggtgcaaaagcaagacaaggcaaggcatgccttttaatatgtatgattccattctgcacttgttttaataatatatcttccacagtgatgagtggaccatttattttatgttctcagtgccttttttttcatctaaaatgtgtggcacctttatcttgaccatgatattcatttgtaagtgtatgactagttgatgatgagagcacatatcatttaaactttctaaacaggttgaccatttcaaacttagaaaagataggcatgcttgcttgcttggattagattcaaagcaattatagccatgactgcaacttggtaccaccactacttattcaaataaaagcatcactagctttcccaccctattatgcatccaagttttctggttatagcttaaacctattcacctaatcacttatatgattaatgatacgaaaaattaaaataaaataagatcatatgtatcacttgatgattttgcaatatttgttaatggaggtgtacctacaaaacaatagcactttgggcatgtgtattggtctgaagaactaacactatgtttagtagagggagagtggatagagatgggaggagaggagagagagaggtgggaggagataacaaatacctttgtttggcaagaagaattggaggagagaatggagaggtaagaggatagcatgttggattaaaatcttcaatataggctcatatatattggtatattgctatttgaagtttgtttgatcattttagtaattgtgggtaatggatattaaagtgccgtgagctaaatgttaagataccttaagcgatatttttaatttattaagagactaaattagaaaaatttaaaattaataacctagtggaaatttacatgatatactaat

SEQ ID NO: 17818 - DNA, 3475 bp, Cannabis sativa
  modified_base (31)..(49): a, c, t, g, unknown or other
tatatgaccgagctttcaataagtagatctnnnnnnnnnnnnnnnnnnnctcaacttattaattccgccttgctccactataggttagaaaactcaagccaaccatttgaaaacaccctctagactaacaaaatctcccaaggccaagaaactaccaacccaacaccactgaaccccctatcaactttcactgctctactcaatgccaccatgagtaacatcagtgaattacaaactgtgaaaacaacaacctcaagtttgtcaaacacctcccaaagttcgagtagttctgaatccacaagctcaaaatactgccatcttcccttgccaaccaacatacccctcctcgacacaagcacaaatctaaaactctcaccccttaccttccaacctgggttaaccacccccacaggccccaaaagcattaaaataaaacaatcctccaaaggcaaagaaagcttcaaaaggtaggccaaagtgattaatggtgaaactcgacaactggtcaagcatactcaatcgaagaactctactaaaactgaaatcaccttcctagaggcaagtcctgcggatgtgcaggcatgcctacagccatgaaggttctaagctggaatgcacgtggaattgggagtgatcatgcattccgtaacctctcccgtctcatttctagttgtaatcctaatattttatttctcatggaaactagacttgctaaggttgccttggatttttacaaacttaaattgcactttgattctggcttggaagtccctaggtttggtagaggaggaggactcctcttattttggaacaatgatatctcaatctatgaaccattttgactgttatgtttcgtcctctattgataattttgttccatttcatctcacttgtttttatggatcccccattgaggcccaaagaatccacacttggaaaattttgcatcaaattggtgacaacaaccccattgacccatggattatcatcggggacttcaatgccatccttacattggatgaaaaaatttatggtaacctcgacaggggaccatcaagaaattttaaacattttcttgaccactttaatttgtctcccattgatccaattagccctaattttacttggaataaccacaatgccaataagaaaaatattcaagagtgtttggattggtgtatcgttaatgcacatttgatgaatatttttcctaaggcttgtcttcatcaccaaggttttattggttcaaatcactgtgcccttttgtttgacactcatggaatgtcgtcccaatccccacatcgtaaaacaaaattttttccctttgaaaatgtttggctcactgacccaaattggctcaagatcctgacatctttttgggctaatcaaggtagtaattcctgtgacatctccaatcttgtggccatccaatttgtttgcggcaaccgcctcactgattggaaccacaagtcaagcttccaattcaaacatcgaataaatactattgaaaaagaacttaaacatgttaaaagcggccataattgggatgacaacacggtccaaagaataaaaaccctccattcccatcttgatagactccttcttaaagaagagacatattggaagcaaagaggtagaacccaatggctttcccaaggcgataaaaaaaccaagtttttccatcgtcactcctcatctaggaaaagatcaaatagcattcataaacttgaaagagacaatgggaccattgttacttccttggaggacatcactaaggaaattgagcgctattttttgactcttttcacttcctcaactcctaccgtggaagatattgggtatgatttggaaggtattgttgccactctttcagagaatgacatacaaatgctttaggaaacctacactgcagatgaagtggaaaagctttcttccaacttcccctagacgaagccccgagccttgacggtttaataccaatttctactgtaagaattggtcttttgtcaaacaggatgtggtggctaccattcttcaggctctcaatggagccagcttaattaaactctcatcactctcattcctaaggtcaaacaacccatcttagttaaggatttccaacctataagtctttgtaatgtcacttataaaatcccatcgaaaacaattgctaataggcttaaattagttcttaataagctgatatctcccaattaaagtgctttttcccatggatgcctcatcttagataatatcattgtggctcaggaaattactcactccataaaactcaaattgtgtggcatataggctggatggccttaaagctggatatggcagcttttgataaagttgaatggagtttcattagggccattatggataagttcaagttccccacgatattcaccaacctgtttctcgattgtctcacctcggtcacctttcaatttaatgtgaatggtcaaattgttggaaaagtcacaccttcaagaggaatccggcagggcgaccctctcttgccttatatctttttattgtgctttgaaggtttctcatctctacttcgttaccatggtagatcttagatcctcagtggatagagagtttccaggacttcccctacaacctcgcatcttttctttgctgatgatagtatcctttttgcccacactaccatcacttcttgcaatgcaatcaaagatgtccttcattactacgaaaaagccacatgccaacaagttaatctccaaaaattgtcacttaatttctctcccaacacgaacctcagggataaacatcttatctctgattacatgggtatccttatgaaagatacttttgagaaatatctaggtctcccctagcatattggctgctcaaaaaaacatgccttccactacctcaaagacaaaatctataagcatctcaatgcgtggaagcacaagaatttttcgaaaggcgacaaggaaattttgcttaaatttgttatccaagccatccccacttacaacatggcttgttttcgtctcccttatgccacatgccactccttggaatctatcatggcaaatttttggtgggggtttaattccaataataacccctcaactcactagcaaaaatggcaaaagctctgtcaatccaagagaaacgacggtctgggttttcgttcacttgttcactttaatcaagttatgcttgctaagcaagcttggcgaatccttcaacatccaaactctctcgtggaaaaaatctttgctgccagataccacccatgatcttctttcttgaattgcagcctgggccactctccatcttttgtctagcgtagcattcaatggggaagagaattactgcacaaagctctcatcatgaagattggaaacagtaagaatacctctccaattcatgattactggataccttcctacaagaacattcaccctcaggcccatgttcccaacattgttgc

SEQ ID NO: 17819 - DNA, 4512 bp, Cannabis sativa
  modified_base (252)..(282): a, c, t, g, unknown or other
  modified_base (3254)..(3266): a, c, t, g, unknown or other
atgtgtttatttcattatttcagaattcatattagggtgttaatgaagcatacttgttagtaaatttagatcctggtcaaatatttccaacagtttcttcatacacaaaagttctcaaatgtatttttatcattattcaaccccatacaatatgttgcttatatacaaacccaaaatatgtcaattacgtcacaccacactattttttatttctaaaccatcaaaaccaagagtatatatatatatatatannnnnnnnnnnnnnnnnnnnnnnnnnnnnnnagagagagagagagagaacagaaaataagagagcacatgcatatatgtccggggcaaaaagaattcatgttttctagtaataataagtaatcaaaactcataataagaacatatatatatatgtgcacatataataaataacgagtgagatgaatataatataatatataatgtaatgtaatgtaatatatgatgaaaaatgtcatttgtgcgcatttgtacatgctagtgggcagtagtggcaaatatataataggtaggtgaatgatcatattgctcaccatatcatgaatatatttaatatatgtatattacctgatgttgttttgtagctacggcgaggtgcaaaacggtgttgccatcattatcgccccaattaacaatttcttcttctccaatcctttgaatccactcaaccaagtttgtaaaggcctgaaatttattaaacttgacagccaaatgaagtgaagtttctccaacacaagttaaatcctcaacacattctttacaagaagagatcaatacatcaatcacctcaattttcccactcatggcagcatagtgaatagccgttcttccatctctccccttcaaacgacacaaattactagttgttgttgtaccttttatgagcacttttactatctctacatgccccaaagccgaagctatgtcaagtggcctaaacccatctttgtttagctccttaacaaattcaggcttaagctttacaatttctttcacataactaagtttcatagcttttgtggctacgtgaagtgggttttcatggggggacacaagtgagtaatcggctagaatcaaagggttttctttaatcagttggtgtaattctccaacatcgccattcaatgaagcctcgaacaatctccttgtactacttaacattatttttctttgttttagactaattttttattacacacaaatatagattgtactcgtgtatattaagatcatatatatcatatgtataatagagtttggcggaagttttataatattgaactagttattatatagatgaagtttttatggtgggaggttggagaaattataatttacttttttttttaatggcaattttgaaaaattaaatttgtaaaattttttaaaaaaattaaattgcaaaaaatgtaaataaaaaacataaaaaagtatatattaaaaaaaattaattaatactaaaaaaattgacaaatctcatgataatattttggtaattggatcaatgaatttgattgaaagttataaataataaaaaaaaaataacaagaacctttattttcttactaaaagaactaaattaaatatactttaatgcaaaaatttaaaatgaaacgttaaatatatgtgtgtaatataagtacagatataagagtaacaaacaattaataattaagaaagttttacatacacacatgtaataattataatatagatatgagagtacacgtctaatggggggttgtctatatataggtttaattttgatgattaattttatgtgaaatgttgttcaatatacacaatagtcatatagatatttttttaaaatttttttattagaaaatagatattttttacttaaaaagtcatcaatttaatctgaattgtgaaaatatggtggacaacttttaaagttttcaactattagagtatttttttaaaaaggggtctaggtctggtagtatatatatttatatatatatatgaaacaaacgggtttttcaagtggatttgtgtttgactctcgggtttttgggtatcacaatttcagaacctgaacccagtgcagtgggtaaatgggtgtaatccgaacccgccctataattttcaccttttttttggggtttccaaatttcaagtcgggtagttaggtttctgaccaagtgggtgagtttttaggtacgaatgtgttgccctttcttgtttaatttgatttgactacaaaattaaatataatataattatttttaataaatttatttaatttgtggggactttttactattttgtagtataattatacaaaaaaatatatatttatttttttaaaatataatttttcaagcggggctacagcccacaactattgaaaaggtgtgtccattcctatatgtaatatttgtaaataaaagatatcaatggatcattattaaaaatgtaaagtttacattttgataaaatataggatacaaatgagtatttattcttaaattaattgatggtaattataattcctttaatctaagcactttctaatattacgttctctctgaatctaacttacataataaatattccactatagtgttattgaaaattcatagggcttgactagaattaaaataacatataatgcaacggaaaaatagggtaaatattattttagactttgtagtttgtaaaagttatttattagaccctctgttttattaaatgacaaaataaatttatattttccaaaatggtaaaaataagatcacgagctcaatttcaataattttattttctaatataaccaattttaagttaatttttaacacgaacagatataaaaatatgtaaccagttttatcataatatctctagatcagattattattattaagttttattttaataaaaatcaattcaaaatgttatttgtataattttaaaaaatacagacaattaaggcataatattgaaaaaataactatccacaaacaaaaacaataataaaataagaaacttagttccaattccataaaagaaaatttttattaattaatttcaagcctgtcaaatacgccaatattggaaccagtgattcatcattatgcatatattaccacttttgggagctgtatgtgttatcttataatctaattattaaaactttttttggggaaggtcaatgcagtaacttaaacgaactttccttacaataataataataataatannnnnnnnnnnnnaaaaaaaaaaaaaaaaccattgtggaattaagttcaaaatgaatatataagcaaatttttccaaattagtcggcagttaagttgactacaacataaaaaaaaaaaaaaaaaacgctgttaatcgataattttcacaactaaaaataaaagattgagtagagagattgaagagagtaaaaaaccattataaagactcaatttctatgtaattgtgttagaattaaggatgaaagtgaatgtatggcaaaatttatgagaggaataattcatgtattttttctacgcattaacaatgtagactatttttaatactctttttatgtttaggtttagaaaatgtggttaaaatgaacaacttttaagagaccacataatataatgtgatatttaaaagaatctcacaagtctaaatcaggaaatttgtaagtgtacacgtttgaaaatatttaaaacatgtcaaagattccaacactaaaaactgacatacattgaccaaaagatctcaaattaatggaggtcaaagaaaaggacactcaaagtctttttttttattattctaacgctatgttaaaatttaggatgaaaatgagtgtatgacaatgtgcatggggtttcatctcaaaattaattggctatagaggagtagctcatgaatcttacatatggtattataaatttccatacattagcaatagaatatttctaataagtagtcttagtctatgagttactgtattagagttgtttgtatacaactgagtgagcttgatgggctttcttcatcaacatgggctttgaattaactatgacatgagacaaaaatttcgaacctatcaatatattacttcttcttataatatgaatgataggcatattatcaacttctcattagccataaaactcatttataaaatgctcctcaaatctaaaatataacaaaaagttaaaataaattaaatattttcaattaaaacaatattacaattaaaactgtgaaaatattccatttgaattaattttatctacacaattaaggcttcacaatatacaaatttgagccttaatcaacaacaatagagtttctcaataaatttcaacggtaagaaaatgactttacttatatgtaaccttgtataatgggtcagattaatggagccctgtgacagtcagtagtcccatgatccgtaagggaaaataccgggtaagctgtgcaatctcacattgcctggggaaggtcaagtgggat

SEQ ID NO: 17820 - DNA, 3386 bp, Cannabis sativa
  modified_base (3211)..(3218): a, c, t, g, unknown or other
atggtttttacaacacatcatcattcaagacattgagacggtccaaaccattaattctagtataattgacttttcccctagaaaaaagagcgatgtattctcgatttaaattagtcacgtattggaagaagcataggaagtaaattttaataacagcatcaactatgacatgatggtgcacaagttgaatgaaatggttgggactcttgacaataccatctactctagactaactatccaaagacgagaactcccagaaggtacacactccagataggaagtcatgaacaacgcaagaagagagatgacaaaaattaatatcaaatccaaaactagtagggttttgggagaaaggaagaattagccagcacttttgttgtaaattgatctacttcaaaaattttaaacgaaaaaattcaaaagattatggggttcgtggtgccttaatctacttaagatggcattcgcacaattgaaaaaccataatctcaacccataatagagcatgtaaccgatcactaacctgagttgttagtgcatttagtgagttgatttctgcatcaaaatccaagctcgtgatttcttctgctataacagtcttagtcattagagagggaaggtgtgggaattctcatgccctagttcttaggagaagacgaaggcaaaactccatagcattttccaggttgaagaagaagtattcactttgaagtcaatttgaagttcgaggaatcgcaaggagactcatacaccttgaagggatgaaaattttaaaaaagaaggaaaagtggtaactagaagtttctaagggtatctacacccaaaaatacgatctaagtgaggaggagatagacatccacgatcctttttccaaaaacacaatttccttctaacgaatgggagtccaacaatccatgcaaatcctagcattaaatgcactctagaatgaagatgtgaagcaataatgaaaatgctcctttttggttttcgcgcaaaaaattgaacatctgccaaaatatagctgtttttggatggtaactccccgatggttgtgccttaacacacttgctactgacacgtggataaaccatcatcacagacggaaggcagcttccacggtcgagtggtaattgaaatatcactatttcatacatcaatttccacatgtccaaattaagagaatggtgctagcttccaccacacacaacattctagaaacttcgggggtaaatgttatacgtgtttctgccattggacatgtggactctagatcaacatttaagatccatcagtgggaccctcattaaagacaaaatgggccaagcccatccagatgttacctttcagaaacatgtcgtggttctgcactcacaaagtctcccatcttcaacaaaatgaacccagaagaaatatcgagcctaacaagactagaaagacaagacaccaaattctcaaaagacccttctgaattccctttatattcctgctcaataataaggaaattcctattagcagatcacaacactgcatcaaaccatgattaaaggataaactccctacaacaaatattaagcaatagaggaaattcctattagcagatcataatactgcctagtcagcagattgtcttctccacgagctagacttcatgagaaagcccacaaaaagtctttgatgtaagctccccattagagggaacggggaaacctaatgtaattcttaaactactatagatatcccattaatctcatgtactaagcgttgaactctcttgtatactttgcttaggcaaacttgagatgatacattctgtgtatttcataaggcatatgcaagcaaatgcttattgattaatactgactcgtggagtaaggttagataatgctgcaaccacattaaaaactatttatgttattttatactttctctatctattatttactcttcagttcttattacttttatctatttctaaaaatcttgataaacaagaaaaaatatgtgttatcttattttttgcaccacgacgtggcaatgcgtactagtgacacgtgtctgctattctcaacatttggttggagagatattttgaacagacctcagccatacatctgtacggatcatgtctacctaaccgaatagggcaagggaagatgatccagacagtaaatgaagtcatttcttcgagcagtgtttcaagacctaagtacttcaagattgatatcatgaagctcaaaaacacaagcaatccttacaatcatggaatcgaattaaagggatatggcaagttgccggaatctctcattttatgtattctaaatatgtaatgtatgttcttaccaattatagatattgtaagtaaaaaggaaaccttccctcaagcctttagccctataaatagtgatccatcctcactacacaagggatcgaaagaattgcttcagagagatgtaagagaaaacactcagagatttaattgtgagagctttgagagacgaaacactgtattttttgttctcaagtcaatacaatctaaggggagtaggctattaccgaggtaaataggtcaaaccacattaaaatcttgtgttcattattggttactaattttttctttatcttaattacatatcttatcgcttattaatttactcattgtcgttggctaaaactgaggtcagcattttggtgctttcattgagagcaaaaatccaagtttactcattgccgtaagttttataagacacaaaatggtggtgctaactctcagagtcgtggttgatcagagtgacccaatgttaacagatcatgcattgcagactcctaggaatacaagggtcccactaggaaccaatcctgaacaatcaaacacgcagccacctactgtgggccaaggtgtgacatcccctctagctgggatcacaccctgtgtgctagagactggaaacaccagtttggcagccgatcagagcaccccaatcactgaaataccatccacaaccaatgctcagacgacaataggagatgatacttagattcaaaacctccgtaattctcttagactcactcatgcaaggtcacaataaataaaataccaccttgcatcatgatcaggaagagctccatgctgcaatgaaccttgcatttgaagaacagaagcgtcagttcattaaatggagggatagggagtgttggaatatattttaccagnnnnnnnntttactaacaagtatgttcttaaccacctaaacatgaactactaaaacaatataaaataaacacataaaaggtatgagaaacggtacgttggttgcagcagaattaaatgactccttctgctcagatctcttacccttgtatcctttctgtagcatagtatcaccaag

SEQ ID NO: 17821 - DNA, 3219 bp, Cannabis sativa
agttatttttaacaggattatctttacaattgtcactagaaggaagagatagtcatatgatctactatgatgtactcattttttttttttgaacaatatggactcattggaaaatagttaaataatgactaaaaaataaaacttgattgttcagaacaaaaaaaaaaaaaaacataaaactctgaaaatgatcatagaaaaataaagtaaaacaaaggtccattaggtcatacaaggaaattagttaagtttttgagactttattttggatgtaaatgatgccactagaaattagctctagtggtgtgcgtgagattaaggagtggaggtgaagagtaactaatagttgacataattggttttggtgacttcactcactgcttacttatgtaattttttaccgaaatattattttttttcctgttaaacaaccaaatttgtaatcaactatatgtgtataactcgtacgttttattgtgttcatgttttcgacatattgtagtagattctctttgctgagtcgtttactgggagctgtagtggaatctattttttaatataatgcaattcaagtctattaacatctttgttttagaattgtttaaaacgtaaagaaggatgggagtcatgtaatgtcaaatttcttacaattagacattttcaaggctttattggattatgctaatataacataagagtatatgctgattggaaagactacttgtccttcaggcactcgattttatattcttctgctgttgatgatttgtgctgataggcagagtgaatgcaattcaacatgaacaaccaataccatgaagaacatgtaagccgcacatatgaacttcttgatgattttattgaatactgaaatcatacaggtctcaaacataagatcttcatgtaggaggaaccaactgtcattggatttgaagttccaaaatcaccagattcaagttacaacaatgtgtaccctgggaatgaagacgaggcccaagatcctcccgttgttccacctcatctgcatcacaccattcttcgctgtccagcaagcagagatgatattggatctcttccaaccccaccaaatgtgatcgtaaaccatctttacatcgaggaaagggaaaccccacgatctgtagtggccttagggttcactcatcgttttcgttcaaaatttgttactgtagttctttacaaaccagttcagagaaggggaaatacaggcacttagatgtgtgcttataggacaacacaccttcactagggtttggttcggtagatagaccttggtataatgaatactagtcgtgataaacatgaatacaaaattagtggtgaaaggatatttatttcagtcagaaaatatatgaactttaggtcagctttattgttccccatacaaagtcttgagggtagttttctgtactgggtgtctatatatacatattcttttcaactggtaaatcatgttctatttgggtttgccagagtccgtttctgatctttattgaaagttttggtattttcttaatgctttgtactgtatgcatgagttatttaacggaagtctcgtagtttcttaatagtaatagtttagggggaatatttaacatttaggggatatgattttttttttctgctaaagttcaggggctatatcaattatatcttaaatatcataaaatcatttacatttaaaagaaatacaaggattgtttcagaaatattcaaaaataacaatgtgttttttttttttctctttttgactgttgtttacaccaaacgaaacactcaccagctctctatgacattgtttacataatcacctcattcttttacttttttacaaattgaacccaacgccctaaacttaataacacttttaatttctctactaagggtacaaacaacattacaagttgtctcaaataaacacaattactgtttttgcaaatgtaataaagagtagcagcaattacaacattaatcatttaatgttttaagtcaaagattgacttcaaacactaattttgcagatcttagaggtctttcgaccacttgagaaaacctaactagcttcctatttttgcagtaagtttcttggtgaagatgcagtccatgaataggtgattatgagactcactatgcctctcacaaactgagcacaaaacagaggagatatacatgattctactcaagttgtctctagttaggagttggttattacacacatgccaataaatgaatttgtgcttgggaataatcaatctatgtcaaatgcatagtcaacatttctagcattcaataaagaattataaaagtgttatccccgaaatttacctctatagcttgtatcaaagaggactcatcggttgtcctttgaagcctcaaaagcttcttgaaataccaactcatttgtttaattgagatatttcagatgttatgacccttaagatagatgataataatctatttaacccaaaggctttcttgtttacaggaaatagcccaaagaaacatcgccattaatgccatattccaccttttacccttttggaacccaataccactaagatttttgggaaggaaaaccttctcccaagattgaaggtgcattttgcttctattacccttcatttcccacaaaatatctctacaacttttgtctattgcagaattttttgaggaaggatgaatagactcatccaaaaatcccctatccccaataaaatagattgaattcgctgagctcgactagtaaaagaaaggttcccactagcctaagagttgaggattctattcggcttatctaaaatcatagcacaatcagaagctttccactttgtaggtctcaaatggacccccaaatattataagggaaaaacccttcttccaattgcaccaagtatagttacttagacttacaatcctctttaactgcaccaaagtagatatgagacttagacttgttcccagaaagtcctatagaatcacaaaaactctaaaagcctgataaactctcctcgctgagtttgtattacctttgcaatgaacaaatcgtctgcaaaacacaaattcaaaagcctgagatgcttgcaacaagggtggttaccaatccctttttaagtagaagtttgagccaataatctggtaagatactccacaatcaagacaaagaggagaggagaaacatgatctccttgaagaagacccttt

SEQ ID NO: 17822 - DNA, 4861 bp, Cannabis sativa
tgtttaatcactagaaatattccagttgatgtaaaatattttatattcatattattggctgcttttcttgttttaggtacaaaggaaacaggggtatattggctggttttatttagctgagaaccttgctgaactcacagattacacattgcaagccgaaaaggttgacaatggaaattatgccgtacctaaggctcttcctgggtccattgaccacagttttagtaagtaaaaggtgttactggtgtaatattctggctatttagtttcatggagccacaaaccttaatttatatatctatatatgtgtatatatgaatattgttatcatgaggcatatggattgaggctatttgaacttctcttccaattttcattttcttgattgatttaacttcaacttgtaattcaatttatgctggtgttatttacaaataggcaattagcaactttgtcatatgcttctgctgcatgaaaatcctttaccataaattttcttcatgttggtatgttgtattatatgatagagcactgcctataatattcaatttttaattttaggtggatctgtaaatctatatcatgaccataatctgtgcttgcatcatggaatgaatgctgatggcaccaaagatcagtgcataaatccagaaggcttttcaagtttcattggttttcttgaatcaattcctattcatggttctgattcgaaaaatggatcttctgaatttgaaatttctagtttgaggtataaatatcttcttcttcattttttttattatgtatatacttttaatattttattggcagttcaaaaaaatattttattggcagtggcactgatgactttgtcccaatttattccttaaatagcatatgtggctgtctatggtactaaattatggattcttagggtgatagggggttgggcaccgcacagatttttttttacatgtggttgttctagctttattattgactttatccttttctatgcaaattattgtttttttcttgcatctaacttactctcttcgctttaccagctatgttttaaagaagaggtttggtcaaggatcatatggtgaggtatggatggcttttcattggaattttcatgagggcagcaactcttctgatttcagtggcagagaaaataatgtctcatttaattctatcccatttgattcacaaagcaagaatagcagctcatcaggccacaatggtcaatctggttctgttgaagacaacttgtttgttttaaagcgtataatggtaattattttcatgacaacttgttttttcaacaataatggtaattattaattattgtcatttcaatattcacctgcctacagcaggggtgactctttactggaaggttttttgatctaagatctgttttattttgttgcaattgtttgacttaaatctttacttgaaatcagaggttcataattatgggaatttccattgactataaatactcattatgtatctatgtaaagtctttcagagttaataactattcttttgaattttgaagggattgaaaccccatatttttttaagttttattatggataggccaaaatggcagctactgagtagttgattacatcaacaggtagagaaagggacagcagtttacctaagtggtctacgtgagagacattttggagaagtctttctaaatgcttcaaagtgtcttggaggtttgccaacaactggagctttaggcagtttcccgaaaacatcatgtttaggtgtctatgacataatagaaacaaatgaatacatggcacatgaaataggaaacagttggagcttcaaaaatatgattcaagataagtttagcccacaaaggggttattatgaagaaggtttaaatcatattgctagatttgtagaatcttttgaatcccgaactaatgaaatatggcttgtatttcattatgagggtgtgtcattgtcaaagcttttatatagtctgaaagaagtagataagaatggcaacgaggaaagggctgaggatgggcagtatgctcagatgctgtatccttcgaaatggtggcattggttaaagacaacagaagcaggacaagaggaaatgcggagtctcatatggcagttggtatgtctgcaataaatcattttcatttgagccttttatgatcctttgtcgtagtagttgattttacttactgctatcttgtataattattgtgtggattggatagtcctattaacaatattgtctggcatataagatgaagacatatctttgatggatgctgaatttatgatttcagctttcaaggatgagtaaaagctgtttgtaagactgttgttttgtctaaatattgtgtagcaaggttgcttttgtttgtaagttgtaacagttgctttgtgtgaaaacatgcttttaggagagttatagttttttttttttggggttgttagttacgtctgttttctcgtaaaaggaattctagcatattgagctcatgcaatccttacaatacgtaattgtttttttctcagttgatggcagtcaagtcctgtcatgatcgcaatatcacccacagggatcttaaacctggtgagagattgctctgctgttaatttatatttgtttaattttgctttttgaccacataaatgcccgtggagttgcctaaagatttgtttttccaaaaaactaaaaagataagaaagatcccctacctatgtcgggataatttaatcctacatttatatctggcattttcttacactaacaaaacatggccattttttttaaaaaaaatatatatgtaatttttgttttctttcttctctctttcagatctactaatttattgattttttttttattattattatcattattttctgtagggaatatggtgatatgcttcaaagatcagaaaacagggagatgtctgaatgtgattccaaatggagaggataacttcactagtaaaatgtactgtaaattgcattgcatggctttattctggtcttttgtaactgttatagcttcatggtcaaagcttctactcttctcatatcaactgatgactttatattctgagttggagtataataatgcaatggactttatattcagattagggactattttttttttctgcaggtttcacaaattctataactctattttcccaatatcttcagtagtatacatttatttacgtatttatctgaatttgcatcaactcatatgtgcttgtaattttcttggtaacaaaacccacattttgtagaattacggcgttctgagtcaataaagtttgttttgtattttgaaattgtttttagcaataaattgcttttattcctttttgtttggtctgtaatttttttttctttttgtcacaaggttctttctgtctttttttttttttttctttttattatagtttggttttcttaaatcttaggcgcataattgactttggaagtgctatggacgagtttacactgaagcatttatatggttcttcaggaccttctaagtaagatgtgttcttttcgtggctatttctgtcgtgattcatagacatttccttattaatgtgttattcacggtatatggtttttgtgcattttccagagctgaacaaactaacgagtatgctcctcctgaagctttgctgaattctagttggcaccagggaccaatgaccaaaactttgaagtatgtggcattttatgaactgagattagatttatctttcagttgatatatcaaggcataaataatttcacatatcttattttagtgtgtgggtctgtgcttacccttaaaatgctcacttggtatattgacaggtatgatatgtggagcattggtgttgtgatcttagagttgaccttgggatcacctaatgtttttcagattagtgattatacacgagctctcttagatcaacatctccagggttggaatgtaggtttaaaagagcttgcatataagtaagttttgctcctaaagtcctgatctagatactcttttagtatgttgtggtatgtatggctgtcaaggttgatgatttagactgttttctctttttccctttattttgtggtaccagacttaggtcattcatggagctgtgtattttagtccctggggctttcccaaaacatcacagtacaatggaccgagtaagtgtaccatcttattcattcaagatataaaccatcttagtccctgggttttttcaaaatataaaatattaccacacatcttcaggggaaacatcatgactcttctgagatcatttgtagaaatattttcgttggtgtcttttatttgtgttttcgtggtctgctgttagatgtgtattgtcatttaaatttattttccttcttgtcattattttctcgttacaaatttttgttaaatattctcagatatacttgaactttgctgctagctttgctttataataacattacatgtctgaattcgactgcttttccattcagcactaattatgaatgagttcgaatgatgaagaattgtttagctttaattgaatgttatagctcgaatgataaggaattgtttagctttaatccaatgttttaactcgattgagaaggaattgtttagatttaatccaatgtttagcttctatccattttcttctccattgaaacctttgcagattgtttaggttttgcaagtgcctgacatggtaaatttcttataatcaggttggagtatcaccagcatcctggaaatgctcagaggagtttttttcctatcaaataaggagtagagatccacttaaaatagggttagtttagaagctgagatgataacctt

SEQ ID NO: 17823 - DNA, 3617 bp, Cannabis sativa
agtttagttgggttcaggtcccgcattattctgcatggaggccattgccaacacttgccaatcaaaacatcgtggcaagggagatctttaacgtgtgcatatgtggccaatccatgtggctccaattagatttcaacatgtgttgatcttgttgatttttcgtttgtcgtgttcttttattttgtttcttcttttgaataccctttcacaaaactaccttatggtcttgggttactttgttatttaaatggtatgttgcttaaaatagtggtatagctggaaagctcagcttgttagattttgtctccaaggctaatgtaaatctgtaaaaacagtgtccttggtcaattgctttcctagttttagctccacgttagattgccccccttgagaacaggtgtatcaatactccccttttataagccgttggtgcagaggttgtattcatgacaagaattgtaatctcttatttaatatttatttctcatattaaatattggcctgtgtatgctaaatatttgggtaaaacattaggggctggaaaagtttgtgagagatttcttgtacttggaatctttataaaaagattgaataaataatgatggagataaacatttgcagcagtgttttcctaaaacttaatccaatcataatcaccacgatgataagtgattttacaagatttaatttgcagaatattttttactctttttcgaggggaacaggagcactgtggaagttagaactatccgttagtttttatggttctaatgtaaaagcttaataagcctggctctgttggaatatgtaattaattcttggggaactaatagacgaagccaataaaatgattaacataaatattgcatcagctaaggtctgtggtgatggtgacccagagttccgatgcttaaattctgattagttgcactttgttgggatttccggttgggagttagaatgatcctttttggctcttatattgcagcaggtcatgactacgacgccagagaagctttgactgccctagtcaaaagaaaatctgacaaaggatttggatgggaatagaggtttaagaagagtatcttatcttgggcaacagtatcgaccgatggtttcttcatttctgttatatgctttttcaaccacatgggtgcatttatacaatagctttaagcagttaatgttcattatcatcacccttttttccatttggtatatgttgtggaccttagtaagcacaacgccattttcctttccttgatctttttgctctcctttagttctagttctcttattatttgtaaatcgaactccaccattccattactatccttttgagaaactctttttttccctttttttccataaatattaggaaaaatatgataaataatcgaatttgtattaggcaatttgccccactttctcaaatccaacccctacctttttcccacttcaaaaagaataagtagccattgactcatgcatttttacaggccgtatctgaccccacagtctacacaaataccataatcgcaaaaagaggaagaaaattaaaagaaaaggttggagtttagagaggaggaccaaagcttagggggcctgtactactcgagattcaatgtggacttttgcatcatattggaatcagaaaggaggcagaacagcaagtaagagataatcaaattggccatgattacttctgggcctggtctctactttcctttttgacatttgtgatgcctcataaccctccagctgtataatatttttggcaattttttttttttaaagaattgctaaaatatattattggtgcttagcattttgtttagtactcaatggcagactcaggattgaagttgagaggggattgaattttttttttccgtatttaggaggttgcatattttaattttctacaaaatataattattaaaaattgatacaaacttatatttatataatattaaatataataagtaaaaaagtaacaataaaattattgattttcatggttaaggcactaaataaaaataagactttaaattctaagattatttttttaaaaaataaattttaaaaattaaaaattaaaatgtttaagtagatttaaacatttgacctctatatatgcatgaggtacattaacaattgaacgaaacctaatgctttgttaataattataaaatttaattacaaatatatattgtaattaactaaaatacatatatatttttttttcgaattttttctagaggcgagtgcccctcttgtttctatgtagattcgttcttgatatcactattggtgtaattaagtagtgagtcatatataacttaaaattttttttagaaagtatcactaatcaattctaagatgccacttataaaaaatgataagtaccaatgtgcttcataataatactcttttttataggttgcaattctccaaaattggtcactaatgactatgaaagtgacatgaaaaagataataaaacttgccacttgataattgcttcaaattcgaactaggtaggataacatctacaatgcatagctttctagttttcctttttttaaagctttaaatcaatcatttctagtggccaattatgtcatatgggtgtttaaacgagttttatgactgaggctagtttgaaactaattggtgttacatcattatatgctatctatttttccaattacccttcatgtatttttggggccacaatttctttacaaagaaacaaaaatcttatccaccccattatctcacaccctcttccacaaaaagtaaaatacactccgatccaatttcacgtctcaaaattctcagtggagaaacaacatgaaatgattctctttagtagtaataatttgcattctaatttgttgcccataataatttggatttacaatagttaacttgatttgtagtattaaagattaaataaagatgagggctaaatattatgaaagagacattagtctaggagtaagttatatttagaatagagaacttaaaaggcgggctcaatttctctcattttgttaacctatttgcatgtactaaagtttgaaattacaaataagtttaccaattagaacccatttacattaacaaggttaatcactcaataatcgaataaattgcaaagaatatgcaatgaacacacaactgtttggtccatgacccatctccatgagtctgtctaggggtgttcacggattggtttgatttggattgttaaaataaatctccacatacactgtacaaatcaacattttaaaagaatacaaagtagaaaaacattctaggtggccttcggcctctatcaacctacatacaaaacacaaagttagttgcaaagtttgttaaaactgttgcaactaactctatgctctctctagttattcaacaacatataaatacatgaaaattaaacagaacacataacagatcagatcagaaattgggaggagaagacttacagagcttaagtcttggagccctaatttttagggctcggagatccagacccaaagcagacaagcatacacagaagagagaaaggaggagattagttcatattgagagagagagagagag

SEQ ID NO: 17824 - DNA, 2721 bp, Cannabis sativa
gcactttaaattattcaaaatttccagaaaagaagatgcctcgaaaaactataatggataccatcatataacaaaaaattgattaaaatttctcttaataagaaatgctctgactaaagaatttcagtagtgaatttggatagtttatgtaaattcataggcgagatttttcgacgccattgaattaaatggagatgttggcttgattggtacattatctttgccaacttttgtctaaatgtgtacttggacgatttggttatgtgaagtgctgaatgttttccttgaatacattttcgtttacttgtattgatattgaaatttgtcttctgacagaactctctggggtcgatttgctcatggctgatctcaaagccttggagacatatgctacttatttcaacattctgtcaaagacttggtctaagccacttcctgaagtttatgatccgcaacaagttgctgactactttaattgtaggccacatgtagtggcatttagacttgccgaggtagattaacttacttgatatgatcttgtgtttgaattatgcatattctttaatattgtttcctgataccatgttaaggtcatgattatgggcccaatatcatcagaaataaactcttttattattaaattctcttgttaaattgagccttatatgtaaatatcaagattctatacaaattttgaaactgcattcttaactggtttatggtatattgtgtactctaaggtatttacttcctttgccactgccgctattagaattcgaacctctaagatgagaaagttcttgggaccgagtgtggataaggatgttgatggcagcatgtcacagtacaattttggggttgtgctgaaagaaacaatgcttaacttaggtcccacatttattaaaggttagcattgttatgttgaagttaatatctgggttagatttccacttattgttgcttcccccattgctgtttatatactggcacttctattttttttctgcagtcacaagattaccaatatgctagttacatgcctttgcttgctggtgcagttggtcagtccctttcaacaaggccggacattattggtactgaaatggccaaggtcagatcatgaagaattatccagcttttccagcattagcttatttattccttgcatctgaaagcagagtttcattgctagttagttatttgttcataataaaaacctagttggccccgattggtatggtaatacttctacttttgctaatatctgaaaacagaagatatgtaagagctttgccttattttttttttataattgtagattattttagcatgttcaaataactattagatatccgaagctcagaatcaagtttttgggtagattcaccaatcaccatatggtgtgcatgttaatagttttatttatttattttcttccatgtaatactacaagttaattttgcttgtggctttatatatttgataagaggaattaacacccatgctcatgatattaacatagatgcaagatcagatacgtacgataagataataaattaagggctttattttttagtttaatttcttcttgattttgatttccaggcgttgtctgatttgcatgatcaaatacctccatttcctagaaccatagctatgaaaattattgaggaagagttaggttctcctttggaatcattttttagctacatttctgaggaacctgttgcagcagcgtcctttggccaggtgggtatttctgtagatgagatttatggttggggtaaatgattgatagatacaaaagaaaaaaaagagcaaaacatactaacatacctactatttcatagttttagtaaatgatgttttcgtatttcataaccctcctatataattgtttttttactgcacatttttaaaaatacttcctctttgttgtatgcatcatacaggtctattctgcaactacccttgacggatctaatgtggctgtgaaagttcagcggcccaacatgcatcatgtgattgtgcgggatgcatatattcttcggcttggggtttgtattgacttctactagccttctgtgtgtgtgtgggtttcttttttataaactttaagcacttggaagatactaatacaatagtttataattgttttagcttgggttactgcaaaagatagcgaagagaaaaagtgacctgcgtctgtatgctgatgagcttggtaaaggtttagtaggggagttggattataatttagaggctgcaaacgcatctgagtttaaggtagttgcactaattgtgtcatttttctttttcatcgaattcagttctgtgaagagatatctcataactctgctactttctgccaagataatttcccttttatatttctcttgcttttattgacctttggttttcttggtacagaaagctcattcttccttttcattcatgtgtgtgccaaaagtgtttcaaaatttaagtcgaaagagagttttgactatggagtggattgtgggggatagtcccactcaacttctctctgtgtctactggaaactcagatgataattggttatcgtatacagagaagcagaggtttgaagcaaaagggcgccttcttgatatggtgagtaatatgctatagttgtaatttttgaactttagtacagttcacttgcaaggggaaacaaattaattggaaaacaaaataagtaaa

SEQ ID NO: 17825 - DNA, 1697 bp, Cannabis sativa
agcttgtatatttatatatatactttagtaatcatcttttaagaggtagaatttgatcgatgatgattagtattatttatattttaattaagagtaatatttaagacacaaaaattattcatactttatagttatgtgtatttaatttttaatatggataattatatatgcaaatcacttctgtaagattgagatttttcttttttgaaaaaaggtttttatatattataaaatattatatatatgtctaatttatttaattttttatttattatcattaattataattatgatttatatatttattagattgcttattcagtttctcttttcatttcttaaattttttttatcaactttatattattcataataattttaggaaaacctataaaaatattagaatttagagtaatttttacaaaaataatgttacacagaaatttttttaaaaatacggtgttttaataaaacacaagtagaacacaaaataaaacaactcaaaacaacaccagaacaactaaaaattactagtagaatatcagtgaaaacttaacactgtatactgcaatttgaaacagcaataaaaaaaataaaaaataccacctgacagtacttttgtaaaaaaagtaataaaaattagtatatcatctaaattttcctaattttatatatgatatgagatacccatttggccatttgatatttcattttttaaaataggtaatataaacattatagtgaagcagaaatgatgataagtttggtagtcatagatcttccaagcataaagagaggaatcttatcattagaccacatactagctagagatgctgtcgcaagtcttatcctgtaggctatagtgtaaatttcactaaatgggccactcaagctttctcctagatatacattttcctctttacaaaaactagccctttttcaacaaaggataattaagaatttgcttcaacctccttcattatatacacccaaaccaaaccccaataaagcaacaaatattatagaataagaaaaagatcggtccttttgtgtaaatatatcttcaaatatatgcacagtacacaaagattgtgaaaaaagagaaggaataaaattaatatcttaatgattctgatttctatcgaatagtttcatcttttaataataataataatgagagaattttggaatatcatttataaaatgcattcaaataataagttaaactgagttaaataataataataataataagttaaacaaaagcagtttattgagatatgcatccaatatttaggatgaagtatcacttttgccagtagatctgttctctgttttttttgtatataagaaataataaattaatttttttatttacctaaaataaatagaaatattaaattactaacagaccaagagtattggtggttttactatcaaaatttgagattttagggttaaatataaataaaatgaaagtatgttgcaatttactcttataattattttatctatttttaaagaatatacacagcaggatcgaaggatagagcaattgtgagctcgcagagcggcataccgaaaaaagaaaggttttggaagaaaaactgtcacgatatgtaatatttataaatttgggtgtaaaagatcaagctttgatttttgttggaaaataatatttttaaataattatttat

SEQ ID NO: 17826 - DNA, 2802 bp, Cannabis sativa
atatatatatattaaaagtagtagctagctagagtccaaacaaagtgatctctcatgcataatcgatcgaaatatagtgatcaataatatattaaatatatgaaattaaagtagctagtaaaataataatagggagagagagagagagagagagagagagtttgatcttgaaaattgaagatgatcaaacccttgaatccaaagccataatagtgctaagattcatgggatacatgtattcagtagagccagtatgaatctggtcaacaatcattttattggccctctcagatggatgaaatgcatcccaaaacgcataaatgtctctgtttgggcacaagttagaggcagccgtgcaaagccctagcccattataaggtccttgtccacaacaagccacctttgatgtcacaaatcctgttcatcaacacaacaagaaatatatatattaaattagtaattaattactccattattttaattactactatactgaattgcagtaaagtgaaaacaacaactctatcttccaacaatacagtattaattaaaagggctgcttttaataaggaccacagcttggttgctatttgtattttattttttacaactcataaaacaggtaatattctgtaaattaattaatgcaatttaaacaatgtatggtgtatgggtgtatggatatggtcacacgttatatgacttattatgtgatgttattaatatggttttggaaattcaattcatcccaaggaaaaaagatggaaatcaagtatatttgagttttaaaaatattagcaattaattaataagtgagctcatttagttaattttttactttttgattcaatatttatattatttaataaataaaataagatgtgtaaaaatgtataaataataaataaaaaattttaaaaatatccatatacaattttttggatattattaaaaattaaccaaaatatctaaaaaaagctactatttattaaaattcttttccaaaacacttgattaattgcacaaagaaaaaaaaaatcacaagtgctgatcaattgccaaacttagttaatcaaaagacagttatgctgaaaacctttacttatatatacttgagttatacagagaaagctatatatagcatttaatatatgtatatatatagtgatataataaattatcataataaaggaagacgacagatacgtaccaaatgcttgagggttagtgataaaattataatgagtttgttgtgtgttgacagcaataaagatatcagcaccaagttcactgttgagtcccttaatcatctcaatgagttggggattgaacaacccagctgctctttgaagctcagccgagcattgaccgttactacttctcagggctaattctgctggaacacagcctagtggtccagtcccagtcaccaaaaccctcctggctccaagatcatacagttgctgtgtaccaaaacagaaataaaataattggaaaaacacagtgacatgaaaaaaaaatagaaggaataaattgagaataatatatgttatatttgtatgtaccaaaagaagttttctgtactcagagatgacatatgtgacataatcaggtagagcatattggcgagatctagcagaaaaagggactaagtaatagttgttgacaaaatcattgccaccaactgtgattagaacaagtgcttggttaaccagttgcttagcctgatcttctccaataagggcagcaactctttgctggtattgctggaagtactggaattgtctgtacattctgattatgtttatctgcatataaaattattcaatttatcagcactctttcttcagcacccttttcatcaatccatatatattactgaaaaagtaatgattgaggacaacaaagaaacaagagtatattgctaggtcttatatgaggtgtcacattgtacattattgttaattggtcaaaaataaaaaggtaataatagagacttacaaactgaacgccagtgtcgtttaggactccaataccagctgaggcgaagtttgcaccaacaagtagcttttcaccagtgagctctggactcaagtaaggcaatgttggttctgaaccaattttcaggcctgaaaaaagtatacatgatattttattagtaaatatataatatacatgtatgtataaccagtaaaaatgggattgagaaagacagttaaaacagaactgataaagtcaggaatgttgaagccattagagaaacggccagtggggcgatgagtagggtagtccacaccataaggaggagcatcagctctggctgtagtggccagataattgttgttgccattgtcaacaagagagtcaccgaacacaaaaaatgctcgagctgcctctgtggcctgatgatgaccaatgaaggctcccaataacaccatgactacaactaaggaagccataatagccaataagagtgagtagtactaactactcagagtgagatagaagaattgcttgacttgagggaatatggtgtgtgtgctaattggtgtagaaagagggtcttaaatagttaggggttttggagaactggccaattagaattattaaggccccacagaaagaaaaatgtttcaattaaggtacagctagtatataatattatatctgtgtctctatgtctctctatatccccaatatcccatgtgtgctttattttcctactttataattgagctgctactaatttactttttgggttaaaggatcatttcaaatatttactttttttctgctaaaaac

SEQ ID NO: 17827 - DNA, 1915 bp, Cannabis sativa
tcttccctcaaacttcctttcactcaatctttcactcactcaatctcttctctcattctcttttttttttcggaatttttcgatttgagttgtgggttcgctctatttttggaatgttcttcaagcttgaagattaaatttgaggtatgcaccctcttcacctcttcatttcaattatttttttttaaggggtgaattttatgttgttgtgtgtatatatatatatatataaatatatattatacatgtatacaggtataaggaggtttgtgaatgtttctaaatgtaaaaaaaaatgttatatgtgtgtgtatggagagaagatcaactctttttttaataaatatattttgtatgtattatatatgtataagtaaatgtagtaatcatttcttgtaaatttatatgggtatatatgtatgtgtatatatatatttgtatgtatttatatttatatgtgtgtatttaggtgtatatataaattgtatgtgtatgtgtacaattatatatgtatgtgtacaattatgtgtaaaaagatgaacaataagaaataaaattaatttgacaaaaattaagtacttaagttaagtttttgttaaaaaaaattggtagacttttgaatagttgaaaaaaagtatgttagtaataactaagtaacaatatttatgaatagtagttgaaaaaacttctaaaacaaactcttaacttttgaattgaaaaaaaaaatatattaaactaattattagctagaataataaataattagaaatagaaaatattatttaaaatgttcataatttaacttaaaatatcataaattttgtgaaaagttttgtgttttaattttgaatattatttgttatatagaggagcacgtcatcagaccatagaaattggataactatcaatagacgatcaactagatttggagaaggtgtggatgaatttgttagaggtgctaaagtgcaccttaattttactggacaaagtagatgtccatgtaagaaatgtcttaacagcagatttcaaactccaaacaccattaggatgcattcttttataatggcattcaacaatcgtacattgtttggcattatcgtggggagtcttttagtaaacttccagagcaatatgaagacaacgacgaagagaagattgcagatgtgttggtaaatatataagggaatatccaagggaattattcaatgacttgttgactgatgttagtactccaattgataagtatgatgatttgtttatggagatgtcgaatgcgttgtacccaaggtgcttgaaatcggcccttaatgttttggtgaagttgatgcattgccaagtgcttaataggtagagtaatcattcatttgacatgttactcaccatattgattgtgttgtttcctgaagagaaaaaactatccaagtcacattacaaggcaaagataaaattatgtaatcttggattaggttaggactctattaatttatgaaaacatgattgagaaatcttcaggttagagaatgaaaagttgaaatcatgtcatgtttgtggagaatctcattagaaaaaaaaaatgtggtgaacgaaaaaatgtgccacataaagtcttgcggtactttttagtctctctgagattataaacgctctacagttctaggcatttagcagcagacatacgttggcattactctaaaagaccacaagaagaataggtgcttaggcaacctacagatggtgaaaatcgaaagtggattcacgtgctttatccgtcattcgcttccaaacctaaaaaattgagattgggattggctatgaatggattcaatctgtttggtaatatgagcaactcacatggcacggtgatagttattttagtcctatataacatacctctatggaagtgcatgaaatcgga

SEQ ID NO: 17828 - DNA, 1549 bp, Cannabis sativa
cctcaattgaggcatgaaaagtatcctctccaatccaattgatttggagattaatatccatattccaaagtaagcaaaaaccacctgctaagccgaaagctgggatacaagcatgacctgtataccccagacttttggctactcccaccattctatccgaattgactttagtctccatgagaaaaatacactccggcctgtatcttctcacccagccccgaagggcttgaactgccgagtcttttgcaaggccccggcagttccaagataggactctcattgatcgggtgggggcatggtaaaggccgcctcctcgcccgagtgaaaattttgcacaacatcaactctaacttctaccaactggtccaaatccagagccaaattttttgcaatattaccttccaccaccgaattcgattcatcatcgtcaatagtcttgttaacaacggctggcttaattgactttcttcttctcttactttctttcttcttggaagagatagtagtgcctccacttcccattttgaaagaagatgatggttcaggagagaaacctttagtggatggaaccatttcttcaaaatctcgcacagtttcaggtgttctttgaacataaggaataagtgtaagccctgctttcctctttctggcttgaggacagggatgaatcaaattggttacatcttctgggtcatgaaaaataacaggagttggttcaaatttatcaatgggggccggacccattaattcctctgtgagcccaatttcacttgcgtatatgggccatgggaagtgggtcggttcagggtgcttgtgggcctgacgagatttgcaaagctgggcatgtggggcctccaccatttgttcataggtgggcccagttcgggccataatcgtagtaattattccagcatcacgttcagagggaatagggcgggatgaaaagttttgaattatctcattttctcgattgagaggaggcttacccgattgatgattacggtgtcccccaggtgaaactgacttcgtcctcctacaccatttagagagtctctcttccataggtaatgatctggagctttcaagctgcccacgatgggtttgattgggtgctgtgtttacaaccttcaatttttttcctgaaatgagtccccgaagtgctgctatgggccttgacaactttcttttttggtttagggaccggatcaactggagcctccgaagcatgagagttattgaccagtggttcttttcctttgactgagcttgctttcgccggagagatagtctttttcggagccgaggcaaggtttgttgagttaaaccattgcagttgattacgggtattgaaacaactgaaaaaagctgtctctgccttcatccatggaccatatgcagggacagctttcccttcaggtggaaaggcatactccatgcttctcacacaaaattttttatcatggccaaggtaaccacaattgtagcagagtttcggcagcttgtagtagcgaaattggatccattccttccttcctctgtaaatgtccag

SEQ ID NO: 17829 - DNA, 3659 bp, Cannabis sativa
atcctctcatgtcttgttagttttccatcttgcgagttgggattgttagaaaatctaaatctgataatgcttctgaagtgagcttttaaacgatgattgttaaaaaatggagtttaaaagtctaatttcaaggggggcttttcataattttaagttgcttgtatggaacttgatcctagaagtatatataaagttggttcttaatctacttctattggcttcttttgtagtatgaatgaaagctgatggtgatgaatatgaagactacacctacaaccattaaccatgaccatagcctcttaagatcccgaagccgtcgatggcgccagagcagcatgggaactgctgtcgtggctgttgcagcactcctaattgccaccactgcttggctttctcttgttttctctggcaccaccacccgctgttggcaccgctttaaggactgggaagccactcctcattctcttctttggaacaaacgacattatgatgtaatctctctattgcctccgcctctactgccatccccacctccgcctccacctcctcccccatatccagaactcacccttaagcacattgtctttggcattgctggttcatcacaactttggaaacgtcgcaaggaatatgtgaggctatggtggcgacccaacgatatgcgtggccatgtatggttggaagaggctgtgccctctgaagacagtgatgatttattgcccccaataatggtatctgaagacatctctcgctttcgttacaccaaccccactggccacccttctggactaagaatctctcgaattgtggctgagtgctttcgcctcaaattgcctcatgtccgttggtttgttttgtctgatgatgataccatctttaatgtcgacaacctcgtcacagttcttcgcaagtatgatccctctgagatggtttacataggcaacccttccgagagtcattcagccaattcttacttcagtcattcgatggcttttggtggaggaggagttgctattagctaccctttggccaaagcgctttcccgcattcaagatgattgcttagagagatatccaaagctgtatgggagtgatgacaggcttcatgcatgcatcaccgagctaggaatacctttgactagagaacctggattccaccaggtacatatctcccatccatttttctctttttctttttgtttaggaagatgagtaaagttaagtttgttgttgtttgttttgttttgcactaccttaattatgatagaagtcttgaatttggctttgttttgctatttttcttttggagccagtgggatattagaggcaatgcacacggtcttttatcctcccatcccattgcaccatttctatcaattcatcatgttgaagcagtcgaccctttctacccaggcttgagctctttggagagtttgaagctttttacaaaggctatgaacgttgaccctactagcttcttacaacgatcaatttgctatgatcatggtcgccgccttacttttgcagtctcgcttggttatgttgttcaagtgttccccaacatcgtgcttcctcgtgagttagaacgctctgaacaaactttttctgcttggaatggaataaggcatagaaatgagtttgattttgacaccagagatccgtacaagtctatttgtaagaagcctatactttttttcttaaaagatgctggaagggaaggtaatttttcagtaggttcatatgctcgtgctagaggcaaagatgatttaaaaaagaagtttctttgctttcctcatttgctcgcttttcgccatgtgcaaagaattcgtgtcctggggcatccgctaaccaagaaatggcatttggtacgttcttgctcctttagttttctcatatgaagtgattcactttttttggtatacaacgtaggatcaagagagtagacaaaagatttgttgatagaatacaactctagattctagatgaaaattcatcatatcaagtcgtagaaatgaaaataaataaaaataacataatgaatagaataatcttctaaactagataaaaattcctaagattattacaaatgatactagtcattcatcaaataatagtaatccaaaattgtgaggtgttctagagcttgaccttggacagtttaaacatttaaatattataaagaagcaatgtgaacctttgaaacatttccagcactagtgtggatgcttgaaaaagaggtagctagtaattatgatcgatgttaaccttgacaatccgaccacagactactttcttttttgcacaagactcataagggaaacgaatgtggagaagtatgagagattatagagtgaggaattttaagaaaatagaagagatagaatcaataaatgagatttgatataagaaacagaacaataataaatagtgctcaagactttaaaaacagtgataagtaagcaaataaaataactagagtagtaagaaaagtaattagaacaatgtgtaaaaatgatcatattattactattttgttgttggttttataataatgtccttgaatttgaacatgaacatgaacaggtacctcgcaggttatgctgcaaagtgaaccaaggcagtgaagaaatattaaccttaagtgtagggcaatgtagaaaaggatcttcgggttctgttgctgattctatgtgaaaatcatcatatatgttcttactcttactctgacccttccaaaaatagatttgaggatatatgttgttaattgcagatagtaagtgtactgtagtgtagagtgatatgtactacttgttaaaattgattaatatgaaaacgagctgagcagaggagttgacattcattcattttgttcaataggaattgcaaaaaagtgagaatgctttgttgttggatttgtgggctaaaaatgaagtgtacggttgatggttgatgtagatgggtgtgtgtggatggaattgattgtgttatatatatgtatatatatgtgtgtgtgtgtgtgtgtgtccgtactactgacagtgaacgaatgataagcgtcttcatcttgatttgtcagtcaaattctttttccttttgacattggtataccaatggatttgggattaactcattagacagacaaactagagacttagagagtcatgtgggatgcattaaatatgaaaagcttcacatgaattacatgtgatgtgattattataaacgtttcattgcctacactcactcaactcaactcctcatctaatcaaagtttaaagggaattagccacgtaatctaaattccaatgtgtaatggcatcaatcgataagtcactgggactcggcccaacttaggaaatgctcggcccaatttaagttggtgaccgtcagcccagtaggagttcggacactccacggccacgcacgttgtaggacccacagccagctactactgctgtaacaaaccaatctgttatttcttttctttgtccattctctgtagccacacagacatagccatagccacgtcacgtattcattctttcccaattcattaattcattcattgattagcccttaatgaactcccatcaatccaactaagtgaaataccctccaattccaatcttcactataaacccttagaacgtatatttaagt

SEQ ID NO: 17830 - DNA, 3180 bp, Cannabis sativa
tattattatatattatgagtaattacaatacataaagaaaaaaaaaaaacttattaaattaatatatatgtataatagttggttttgacttttttagtcagtttattacttaaaaaaacttaccgttcaatagtaattttaaccgttagcaattttttaagtttttgatttcgtcagtttcaattcggtaggtcggtttgaacaatttttttaatttcatgctcagtcttactggcaacaaattgcttgttcaatgggtatactatattatgtctaagacatatattaaaaatagtaccaaattcaatacaaaatatcgacatttagcacaaaatatagaactttatcaaattgacacaacaataaatacatatttttagatatagttttatcattatcattaataataaattttaatacatatttttaaattaaaatattgtcgttaattttttttttaaataattattaacaacttattactttttgtacatatttgaatattaaaatgctatatattgtgtattggatcaaaataacaattattgtatatataatatttatttatttgtactatatctacaatttacaatagagagatgatcttgaaagacaacgtgtggtagggttccccactaactacttataatcaccatatgtattatatttaaataaattaatataacaaatttaaattattctcttctctttttatttccaaaaacaaaataaaaagaagaaaataaaaaaaattagtagttatcttatcataagtgtggggtggctttctttttggaagagacttgcaaaagggtttaatttagaaaaagtaggagaaaaagagacctcatatttgatggatcctcatcttgttatcaaatgtgcattaattatatgatatagttttgagattgacctctattttttttttccaaagttggggtcgaagtcgagacctagggtttgagctcaggttggatctttgtccagtcgtggtatggtcgagggtccacatcatattagggttggggccaaagtttgggctttggggttcaagttcaaaacgggattaggggcaggggcaaagttgacggtgagggtgagagctaggctagtgttagggtcttgagccatgggtctggggttcatgtcggaccaaggtccaaagttttagtgagtcgaggtgtagagtttgagttttagtactgtaatgtttaggaaatgagaggtggggtggaatcaatgttattatcacatatgatatgattgaaaatatatattttattatttcaaacaaaaattatacaatacattattattgaatatcaaacataatataatttaacccaacttattaatacaaatgaatatctaacataatattatattaaaataatattatacaaaacacactatactcaccctaagatattatccattttaaagataaactcagtatctgtaactaaaatatagggactgaaatagtatttttcttcatatattttatatattggtgtgtaaaattaaattattacaatcataaatgaaaagaaaatttgaggcataaatccttaattttttaatttgttactaataattaatcaaaattttaaaataacggtaaaaatactccaattattaatttcagagattctgttagtactcactttaagagctcagttaattatttctaaagatgtcacatgtcaattttctattagtcaaactctcatttttattataataatcatttaaataatatttaaatattaataaaaactaataaaaaaaatttaaataatataaaaattaaaatcaaattaataaaacaattataaaaatatatgttaaaaaatattaaaaagaataattttctttttcattttcattttctttccaacgtttctttctccaacgttgagttcctacccagcttcaaaagattcggtccctctcccatggcggtgccgccctccgatttgtcattcgaagatctgctccagatctaccatggcgatttgaacctaactgggtcttcttctttcgcaagtgccgatgcaccatcaatgttttggtggggactatggtcggtgatgatgagtttggtgtgtggaatagtgagttggggttttggtatatggttataactttttgtgaaaatgtattttttttagttttttataatctagttttaattaggggtgtacgtcggttggtttggtcggtttatggtacattttattcaacctaatgcaaagatcgggttacgaaaatctatgtccaacccatccaattaagaaaaaagaaaatagtaacctgcctaatgaaattggtcagtttggtcgggttaacccgtccaaaccaaccactaatatttttttatttttaaattcaattgttatattttagttaattgtaataatgagacaaatatatatagattgaatttaaagtttaaattaaccacaatataaaaaatacattagtttcaactttatattttttaaatagtcatgtaaattatatgatacgtaaatatatataataaaaaattataaatatatacaaaaaaatcctcttaatcgagttggtcgggttagttcgggttaattgggcgggttggtattattttcaacccgcccaattcgtcaggtttttcggtttgtatttttcatcgggttatctcggtttggtttggactagttattcagtttgggcagtttacaaaagtttatgtacagtcctagttttaatattagttttattattaattatatttaaattattatttgaagtataatcttaattaatattttattattctcaatttttttatattttcaaatatatttaaatggttattaatatataataaaaataattatattgttaattaattttttattattttaaaaatatttaaatgattattaataaaaaaaaattaatttgaaccaataaaaaattgacatgacttttttttaaaaaaaataacaataaagtgagcaccaataaaatttcaaaaataaaaaattaaaatattttcattgttctttttaaatttcaaagtatttattagtaacaaactcaacaaattaatatttatactctaaatttgtcttaataaaatgcacccttaaaattaatgtaattttatatattttgacatttgggaga

SEQ ID NO: 17831 - DNA, 4846 bp, Cannabis sativa
  modified_base (1233)..(1235): a, c, t, g, unknown or other
attgtaaaaggatattttttacaataatacaaatagcattttcataagcaaattgacaataaataaataaattaagtatatttaaagaaaaaaaacacataatgataatattataatgagtaatttgcgatataaataattaagtttaactttcgattgtaaatatatacttatagttaatttttggcagtaataatacttaaattatatttctgaaactttgtaggtacattatcgttaaatgttaagtcattatccacgtgtcatttctaattggtatatttaaactattttttaaaaaataaaaatttaatgatttggactaatcagggattgtcacttgacaatttacttaacacttaacagccaggtatctacagaagttttaaaattataacttaggtattattatcgtaaaaaattaaacttaaatatttatttacaactatgaattaaaataaatatttatacgataaattactctattataattaaaaaagattgtattacttaaagaaagaaagaaaaaaagagattgtattagtatcactcattttgtaaatgaaaaaagtatatgataaatttagcacactttttatggtatcgctcattttatattagtactatacaaataaaatttaacacacatttaattagtatgtgaaaaatttaggataattaattttagcaagaaatctactttttacaaatataataaaatatgacaattcataacaaatttagcattcaattaaagatggtctaaggtgcatacatatattcatttttgctctaattcttagcccattgtcaccattcatactcatagtgggagcctaaccaaaaggcaacttggaaatattaaatgtgtacatatagaaaactatttagtggaaaggtgtaaggtattgttactatagggtaatttaaattaaacccatgattaaaagagcaagttgtagaagtagaagtggaggtactggtttttggtcttttttttttgaaaaaaataaaataaaataaaatttgaagttaataataatataagtaatggagcacactactctactgccttcgttttctcactgcggtccccatgaatggatattggggacctcaaagcttgaatataaataaatacatatacatctcaaccaattattcattttaattactatattctaacctttttgttttgtttggtcacttaaaatatatctatatatatatatnnntatatatatattttaaaaaaactttaagagatcccatacctaacgtaatcttcattatttgcgtgtgagctgacttgtgtaagatatagaatatagtactttaactttttcttggattagggaattatataccacattttcttatagatttaattacaatacaccactttatatattttctctaatttgctttagctaggttgtatcaaaatcctagctatcttatttgacaattgatctatcttttttttaatagaaatagaatttaatttaagaaaacaaatctatcgtctaacaaacaagacataagctcagtatgaatagtacttctattgaagattcgatttgaaaaaaataagaagttctaacaaaattatgaaccatgtcgttagcagaacaaaaaaaaaaaaaaaaaaagagactaatccaatatttacagtcattacaagtaaatcaaaataagaggtcatcaataactactcgcgaatggcctcaactgccactaaatagtctgtaagaatcacagtcgaccatgccttatccttaatccaattgagagcttccctaatatccataacctcagccaacttaagttccacatcatgaccatataacaaaaagtacgagcttcaataagcccaccttgatgatctgaagctattagagcaaatctaaattaatgagtcgcagtgaataatgaaacattattatttatcttgatttgattctcttgaggctttacttaaatcctgacaccaccttgtgccacaccactaggcagtggtgtatggttagcctttatttgagcactctttcattgttcaaagtacaacattgctgaagtaactgcatcattcacacgaagaattttctaattccaaacaaactcattttgagcccaaaaaatagcccaactaacatcacctaccatttcttgcttctccttacccacccaagctccaacctgttggaatcaaataaagaaatcattcccaacattagataataacccgacgtcaatattagctctatctagacactatgcagaaaacagacaaaagataagactatgaacaatagtctcatcattacgcaaaaaaagagggcaatgtctttgaattagaaaatgttttagactgatttgatacattgtgggaagacaccaagtgctattacgccatataagatttcttacctacaagagttgtcataagtcacaccacactataagagttgtaacttttatcagtatatttggtcaaatacgccagcaaaaggggtggcttccaatccctaatttaaccacattgactttttgtcagtgcttatttgtgtcgaaaaaataagattttcgcaacgcattttgtaaattttgtcaaaaaaaggctaagagggaaccaccaaaaggcgcgtataatttttggcggtttaatataattttgccagtaagcgccgacaaaagttccaaatgtttggtgtggaatttctcgcaattgaataggttttagcagggactaaaatattttatcgacgcatttaccaaaaaatttatggaaaaattcccatgtgggaattggttttggagctgggggcaataaagttttattggtgcatatatgcactggcaaaagtgaaccatttaataaaatctatcgtttcaatttagggtttcagtcaaatcttttgccggtgcaaccaaatgtgccagcaaagataacatacctaaatacgatatgcacccttcttctttgtcattcttcttcttctctccttctctctacactctctctctctatatatcccagccccatcgccaccaccgtctgagcagcccggtcaccaccaccgcattaccaccacagcctaaggccaaccgccaccactacaatccaaaatctcctaccctttattaagaaaactactccaaaaatctcggtcccctttgcccactaaaaaaaccagcactgcccccgccacacaactttgcctgctgattgagcccattcagtcgccaccactacctcccccctctcagtcaatgtatttgttattttgtaatttttttataattatttatttgtattttgtttatacgtgggtataattttttatatatatatgcataagtatatattcatattattttaatttttattatttttttactttaaatctttatgtatatgtatgtatatttttgtgtatgtgtatatgtgtaaatacatgtgtatatactaggttattgttatatgcatgtatacttagttctattttaagtttttatttttatgtgtatttaaaattttataaatcaaaggaaacaaattaattttttaattttttttttagaaaatatttaaagttttaaaaaattgaggaaaataaatataaaatttaagaatattaaaattgaacatacttcccaatattaaaaaataataatgttacaaataatatattaatatttatatatatttaaataaaaccgttaaatttaacgtaatattcttatattgttaaaatattttgttaaatcaataaaaaccattagatagccacattatatatataaagatataagtatgtgtacatatattatgtatatatgtaactatatatatatatgtgtgtgtgagtatctatatatgtttatgcatatgtgtgacttgtgagtatgtatacggtgtatgtatatatgtgtatggcattttttatttatttttgtgtatatatgtgttaacgcaaattttttttaactaaataaatagcctttttttgcaataaatactctatggaaataaatgaaaataaatgacaccagatattttatgtggttttgtagttaaaatctacatactctacgagtccttattattagggatattttttggatacaaaatacaatctcaatttttgaaataataagattttctctctcaattttgttgtcctttttcccatgaattttgcccttatttattggaatataggttggcagttattcctttgaaattgattcatttataactgttcatgaaacgtggacaatccccacgtttcatttatttacatatgagataatatctaataactacctaaccactcctcatttttatccattagatagacgattatgctgacttggaaagttgtatctcatcagacatgagttctccttcttgtccatcttaataggaaaaaagtgttcgaaataattcatcttgttatatcccttcattagtattagcagtgcgaggtgatcatcactctatgtctaacgcgaggcggttgagtgtgctacttttattcagctcgggtgggagaatatcatcttcttgtatatttaactgagtttatcccgaggcagatatatgtctcgtcaatactagtttaagagttattattcttgtctcgcgtaagactaaacagtcaacgagtttgaatattttctatcaaacttacatttaattgcaacaagtaatctaattgcatttaatgatacaacatcattagtatattttttgagttgatttacatttcttctgtagaacacgtgtcaacttttggtacatagctaaatttcaggtttaacaacttctaatggaaattat

SEQ ID NO: 17832 - DNA, 3698 bp, Cannabis sativa
tgtgctctttttaaatcaatttacacattatccaaaaaacgagaccacaacccattccataatcgatcaaatgaaactgtcatatgcttttttctggcataggcagaatttcattgaaggggaaaaagaactctttgaaagaaatcttttacagcattttggtgagatgtgtgatcagtgtgatttgatgtgtgtgcccccaacaatggcagggacccttagaaaaatacaagtgtgtttgacccttgcccatggcaaatctggcacaagtggcaacctatcatataatgcccatcaaccaatcataaaagtctaaaaagacaacaataatacaatacattagaatgattggctttagaaactactgattcaaaagtaacacaccatcttattaaccagttgaacttgaatgtatactaatgaatgagtcatgactatgtatgtatgtagggaggtttagccaaggagggaaaaaaaattaatattatacttttcttgtgtagtaatgtcaattgccaactgagtacaatctcattagaaacctgacctcttttgtacagattctgcatctgtcattgcctttgcatgaaaaccccaacatatatggttgtttcgatttcttcctgtaaacgattgttgccgatgctttacttaggtgggtgggtataataagacctgttgaaaggagtcaacttgattttatcaatgcccatgttcacagttcttgaactctctttagggtcaatcttttctggcctcaagtgtgtcttcctcagaaaagttgttatctttagtggctgaggttgtgtatgcctctaccacttcctgaaaatcgcaaatttgttgtttcatagttaaaataatgcaatgataagaaacatgtaatgctgttctaagaaaaggtaaagtgacaaaatgcagaagagaaacgtaaatcacagcacaagcatatgttttaaatcaaacttgtaattatacctttttgagatcttcgtgtgaaagcggtgtatccctcttgtcaactgctgagcttgtagagactgcattgtctgccacccgaaatgtgggtgccgtctcttcactttccttcaagtcatgtttagacagattaccattcacagaaactccattggaataattgagattaatgttctcagaagattgtgcttcatttttttcaacaactaaatcaactccagcctcgctttccttctcatttgctattggagtttctttaaccgcagccgcagcctcagctttcctcttttcttcttctctttgctgctttctccgtgcctcttcctccttcagctttttaaatctggaatatatcaatgaattaatattaaaataacacgaatttcttttccccaagaaataagaggaacaaaatgatatgacaattgtttaaacctttcaccaggttgtggaccctttgctgtcaacttcttttcttctgtggtaactttttgtgttacatttaaatctgagatggattgtttaacctggggttggtcttccttgacaacatcggtaaattgcataacgggaactttagccccccctaacttttgaagccatacttgttgtgcagtgctcaaaatattgtttgttagcctgcataataatgttcaaaggatgtaacttaaccttgaaaggtattgtattagagtatttatggaaactataatttacaaagaaacaaaaacaatttcctgaaagaaaagctacgatgctcatacaataaaatggctttacatctactcaccaataaaggctcagaccggaaggaactgaaagcgaaaaataaccaatcattaaaggtagcaactttgtaattgcttgagaactcttcatgttcggatcattactctgaaagttaaaatagcacatgttaaatacgaatcatttaccccacaggatatcgcatctcacatccaaattagtcctatttcaatagaaaaaaaggcgaaactacataaaatcaaccgtttaagctgataacaaagttacagatggacacttttatcaatcttgtaacgggaaaaaaattaaatgtgagactacaacggaggcaggagatagacacaaacatgaggtgttgcactaaattgaaaacctagaacaacaatgtgatttatagaagtgaaatgttttatgttggtaaccaagctcatctagtcaacgaggctaagttaatttaaacagatatgatttgcaatggaaaattactgacctgcgatgactgcataatttggatagatatgtattgtgaggcaaccagcaatataggcaacacaagatatgccaaagtatctgaccatccaaggggtggatgaccatcctgagaaagtacaaagatcgagaagagtaaaaatttgaaagtttctcccaaccaagcaaagaacagttaactaaataataattttaatagaatgtgcaaatatatcatctagtggcaaccgtaaggattatctttccttttcagtgcagaatttctaaggaaaaaaataacattgagattattataacttatacttcaatatgtgtacatttagagagaataattacccttactttttaacaatgtattcttcttacattacaatattaactcattgctctagtgaaaagaagaagaaaaaaaatcatgatggaagtcttcactgaatattgagtattaaatttcagtaaaatagcatataccaaaaaaccccttagaatttagtaaaggaaagtttagctttcaattcaagaaacttactataaatggaaaaagccaagagatgccacttccattttgccgggcagcaattgatgttggaccagacaaggagggtatccagaaaaatccttcagtaagcagtccctttattgaatagaaaaagtttgattaaatttatgatagtttggaaagtagagtagagggaaaaaaaggttgcttgcaaaactgtaaagcaaatacagcaaatggctacctcatctgccacatttgaaagagctctatataacccaatccagactggtattgtggcaagtgtaggcaggcaccctataacaaatacaggataataaataacatatacaaatagcacaagtaataacaaacaaaaaatagtttataataaacacatctttatgcacaaaacaatggtagtcagtacgaatggatgatcagttatcagtcaatttcctctgaacatgcattcacactaaagtcaaatgtaaagtcaatacctgccaaaggatttatgccagctactttatatagtcgggcagtttcaagctgaattctctcctgaaaaatatgattgaaaagaacagaccttggtcaatagaagaagaagaagaagaagaagaagaagaagctaatcagttaatcagtgtaatattacatggtcattctctttgagcaacaaaaataatcttaaaataaaaaattaccttatctgcagcataacgttgctgaatagcttttacttgaggttgtaaagctcgcattgaaattgcagattcaacctaaataaaaagagatacaattataaagttccaaactttttaaaacagggaatacaatacagtcaccgaaaagctaaaatcaatccacaaagatacaaacctgtttttttgtcaaaggaaatgtggcagctttcacaagaacagtaaggagtattatagcgaaaccataggcataggga

SEQ ID NO: 17833 - DNA, 2933 bp, Cannabis sativa
atttagcttttaacaaaattaataatagaataaatgtgttcaaattaaacatatacctctcatacataaatcttagcattagacaaacacaaacaattactacccttaaaaagggaattttaacctttaactaatgtgtaatgaggaatattgatatttttgtaaatatatattgacttagcatcaatgaactatatatttgtaagaaagtaattaataaactatatattatcaatatatatattaattgtttaagtataatcaaaattggtacatgtatataaataacatttctacatatgcatgtatacatataagggttttgatcaaaaccaaattttattttcctaattttgtaaaccaaacccaactttcttatgttcatatatatagctttagcttcttacccatttcaagaaatataatacataattatacatatattaaaataggtgctacctatatagctaagtaataaaagttacagttttgtaaaataatattcctcaaatccattggcacagttaaaactggtatagacctcaaattagttaatatttacatataaaggtaaagttttttgtaataatgattttgaacttattaatatatagtagttgaacatagttatgtttatatatatgtataaatgaattatatagtacaaaaaaattggtacagttgttctgcaatatttttggttgattaatttttggtaacaataactatgccaattgattgaactctgagttaataagttgcttgacctaaattgtgatgcactaaagaacacaataaattaattaatattttaatttaattttattgtattgggttttctaatttgggaaatgtagcataccctctttttcttggtcggctctcctatatagtttcattttaaaatatatatcattaatttatttatgtataatttaatatatatattaatagtttttaatttatatgtgctagctagagcctcgaacacaataattcatttgaatttgtaacctcaaatgttattttttgggaatttttaattaattaatttgcatacttatagtaatatagaatgactctatatataaccacatagaatagctataagttttaataattccaaaactaacccttggaaatatttaatatgtataatattagtagtgtatgaatctttgtagcaaaagaaagtgtaattttttagatataaaagtgagtttttcaaattaaaaatattttattttattaagtattagttttataaagttatgtaaaaatcttatatcacaaaattatgtaaatacaaattaaccacatctggtttgggtaagggtttgaattccattatagctcctggtggccgaaattttatggttggttgtttgggagactcgtttattgtggcaatgtcatctttgttgacttgaaaagcctcaagatacattctgatgacttaattaaaagaggatgagatataagtcatctgtaacaggcatgtggtcttcgatattgtctaagctactaaaaaagtaaggaagagatctaaactatgtgaacccttataacctacaaggcaaccataacaacaaactcaaaaagtaataagatcgtaaccttctaggttgcactgttgcgatatgtacaatctttatcgaactttatttcactgttcctccagcttagctgtacccttacctacacaaggtaacaaactgatgagtcaacagactcagtaagataagcataaaacatatataggcaatgcaataccagctttatgcttaagctgtttgagcccaaatgctaagctcaccaaatgttaagaacgttctcaacagtagtacgaccactgtaccacatgcactagaatactgttgtgaaaattatgtacgcaagtatacgtagtcacacaagtaataaaatgataagtaagatcgtctccacagggattgcaaacaaaaatatgttgtaaaaccaaataattacaaattaaagtaagaggaaataacatgaaattgattgagcagtgtttcagaattaaaaatgacaggaattaaacttgctaaaattaatactactgcggctagaaaaatttcttgtaagaaaaaaatatataatatggtaaaaatggcttgaatagctaattccttctagtcaggttttctcccaggtgttacaacatcggttcagcattactccagattctgcacagagataacaaaaattcctctaggcttgtgagaattttccaacactcacaaatttaagtcgaccacttagttcaatatattcctatatcagactagcaatcagaacactattcaaacatcaatttttttttaagttatgcaaggtaaataaaatattcctattccacttacaaagaaaaccccaaatctaggttttcacttgctccaatcaagttgaactactagatctagcccttccgatacaagatctagcttagcaaattgttattcatggccaaggaacaacaatctaataaaaataaaactcacttgaatgaacaaaggtaaaaatactaaagtaagcttaaaaattaatcatacccaacttagaagttcataactattcaagcctcaaaagtctagctcatattcaagtaagaaaaaaaaatccaaagtaaaaaacattcatccatggctgctgccatttgtttacaagttaacaaattttaatatctaagtaaaagaaacaaaaaaagagaaagagaaagaaaataattaagagagggtaaaagaaaaatcaaacactaaagcttggacccccttttctcttcctcctctgctgtactttttctgcatttacttctcttccaaaatatgcagcagccctcttgttagagagaagatgattgttaggttatatttagcctatgtttcaggtctgaaaagtaagcattttctcgt

SEQ ID NO: 17834 - DNA, 4088 bp, Cannabis sativa
aagacagaaacactgttctctccaaaataatgagactaacaatttaaagttctacacttcattttgttacaggttatgtcattgcattatgttatcaaattgtgtgtatcatccaaagtccccaagacagaaacactgttctctccatgtaaacattactagttcaagcaaatgatctgggtctagactctagacatgtacgtagagttaaataacatgcaaaccaaaaattaatacagcttaccatggatggggatgctatatctggccgctctgcagttaaagcagttattagctccttaagaatcatggcaatcgacctcttaggtggaccacctgctgctaactcctcatcttcttgactagtcagttccttcaatttttgttgcagaagggcagctatagaatctcctttgaaaggagattgattttgaaaagattcctttaactcatcattaatggtcttctcctccgattccaatgaactaccaggcttttgcctaatgggggaattaaagttgaaagaaacaacattattatcgatgcttttagcagctccattaccctctcttggaccaactaatctacttctactgcaatttcggttcaatggatgagcattcaatcccaacccctttcctgtcgatgaatcacattgaatagtccttgattttgtagcagttgaactaacaaactccctactttcaacttgactattaaagttaattatccttctcttccgtactgagcctcttaattgagataaattaccttcctctcgcccattaaaagctttcctctctggaacaaacttttcagtctcttcttttggagttacccttggtctggcacgaccactcatgcttcggttcaaggcaacaaaatcttttgtatttctcacagcatttgcagctgatgacactcttctagtatccaaattgtgttttgaccttggtggaattctatccctgcctaaaggcatctgttcctgtatctgatcccgacgcttcaagtcaaaagaagatgattcatctttccgaaaattacaaggctggcccattgactgccatggagcttgaccttcacgaagcagaggctttctttcagttatgggcctagtattaataggttgtgtgctatttatttcttccttcttttgacaagcaaggttgtcccaacttctatgaaaaactgcatcattatcttgcttgaaggaggaaactggtaaccttggtttacttcttcctgctacttcaggaagtgagccattggcgaaactcgaaccaaatgaggcaaaatcagatgaaacttgatccacattcggcctgcagttaataacatcaagcaaattaccacaatttttacaagaactctgccccatcaaagacttagacacattgccactaaaacaagatggtttaggttgctcctctgagttaaccatcgttctctctattacagcctcgtgattaggaggataatgaactgaacttgttgtatatgtaatacattttgctttgctagaagactgcaacccaggttccaaaatcttagtggcagcatcaaacagccgagaggtccgagaaacattcttcccagaaggagtcctggggcttttaaccggagatacaaacttagggtggtggttatgctttcttgaacgtgataaaacactcttgatttgaagtgcgtcagctccaagcctagtcattgctttcctctcagactgctctgtcttctgaagtttctgaggccgagattcaacctgcttcatgcttcctctctccatatccataccctctttaccagacccaccagaaaaaccattcaaaaatttattcacttcattatcacaacaagcatcagaaaaggaagccttcttgggcttctcacgaatggcaggcatggattctagacccataagcctagccaccaaacccggagaccgggtatcatgcttatgctctgaatcaacacttcgagagccctgtttcttcatgttggggaaactacccttgttttcatcagcaatctgttgtttccaaaccaccaagactattatcaaataaagtaacgaaaaatgaaaaattaaatgaagagccaatatccattaatgcataccaagtgatgcttaggcatcctgtcatcgcctttaaacttgttagaagcctgctttgatcgaactggtacggtacatcaaagcaataaaacaaaagttaaaaccatgttttgttcatataatgtatacgtttttaagatacataaatacatatatatatatagagagagagagagagagagagtgtggttggatttcacgaacgaataggactaaccaggaggcagcaatttcttggagaaaagcttcttcttggcgaaccttcggttccaatcaaagagctggaagaaaatgccaacacagcctccgcttctatgagtcgacttcttctctgtaattgccagagacgacgacgtcgttgccttcaccaaatcatcacccatttctccaaaacggcccagagaaacccacaccttggaaatgctaagacttttcgaaaccaaatctctctcttgcgtttctaacccaaaatctccatgaaatcctactacaacagcttcaaatctatgaaacccagttcagcattgtcaaaatacgacacctataacccatatttcggccaaatcaaaatatcaccaaaaagtacacaggagtggagtccaatatcccaaaagtaagaagaatccaagaatttttcttttaaaaaaaaaatggtacaagattacaggaaaatacggtacaatactactgttgggtatatggaaaaactgaagaaaccgaaagtaaaaagccagccataaccaaaataacagcagctcagctcagctctctctttctctctctgctgcagagccgaaagctactcctcagtccatggctctgccaaaacgacgacgcacagacggactacgacatctgcacaagcaaaagcaaatcctattggctactacaaaataatacaaccagaaaaatccaaaaacaaaagctggagtgggtctgaactctgagcgaaaattggagaatgggattctgattaagaaatcgaatccagaattatgaaaagctctgaaaggttatagaaccaaacgacttgacgtatataaaaaaaatgaacacgaataccaagagattgttccaatgtagctcgtctcctcttccctgcctgccttgcccaacctcaaaagcttcactcttttctttctagcattactgtttgactgtttgtattgcactctatgaaagagcctattcaatcagtgagactgttagggtgtcaggggtgcgtaggataacaaaataaaacctatcttaatttgtctctacctcacgcgcccagacattaaataaaagtgagtcaaacatgaaagaggagtgcgtgcgcaactaactttaagctatttaattaattaatttttttaaaaacaataattaatttctgtttggagcaaagtaatttaaaagattagttaataaaattggggagtttgggaagaaaaactaggaaatggggacaaaattggaaagtgggagaatggagagtgcgtgcagtaggtggatgatgaggtgtcgtcgggtctctgtaggagcgtgttctttcaacttcccaatatcgagctttgaattatctcacgactcacgagctcatactattctattctttccttggaacatgccaccaatgtactcaggggcggagtaaaaatttaggggcaaactatattatatattaagcggcaaataggcatgtgtctactggggaagcggcggcttgctgtttagctatagaggaggctaaagctcgtggtattgagttccttattgtggagagtgactcgatgatggtgatccacgttcttaataggaagaagtcatgttgggagcttgataactatgtctctttttgtgaaaatacctccatctcttttattggttgtacttttcaatttgttcgtagacagtgtaattttatggcccataatgtgactaacagtttctaatctaatatatgtacgcttttcttcaaaaaaaa

SEQ ID NO: 17835 - DNA, 3941 bp, Cannabis sativa
  modified_base (45)..(62): a, c, t, g, unknown or other
  modified_base (3377)..(3387): a, c, t, g, unknown or other
  modified_base (3441)..(3445): a, c, t, g, unknown or other
attttttggaaaaccgtaaaaatgtaaaaaaaacattctttgaannnnnnnnnnnnnnnnnnttatggtgccttatgtaattattcattgaaaaaatttaagtgaggttgggcctattacaaaaaaggaaaacttacaaaaatactgaaatttgaattattttttacaaaaatactgtacactaaaaagttttcaaaaatattatgtttttataaaacactagtagaatacagaacataacaactcaaaataacagtagaacaactaaaaaacactagtagaacaccagtgaaaacttaacacagtatactgcagtatgaaatttataaaaaaaatacagtaaaaagtaaaaaaatattgtaaaaaaatagcaaaagtccctaaaaaaaattaggagaaaattttttttataataaaaaacaactttgtcactaaaaaataaatctccttatacttgttggagtgttaaatgtaccctttaaactttagacaattatgaaaaattagtataatgctacattgtatcaatttctatgttttcttgttgatgtaatataatattgtcaaatttagttaccacctaaataaactaaaataaaaataaactttatgacattttattttaatttaatctttaatataatattaactttttttatgtggtaatgaaattactttcaagtttcaatttttctttttattttcttaagaaagtttagtttatgaatataatttaagttaaaatgggattttcattataaattagttttattatatttttcattaagtcctcttaaactttaattattttttttattattcaaccacataaactgatatttgcacaaatcaacctatgaaaaacttaacagaagttttaatttttaataaatgataaagttaaagagagtatttttaacaatactaatattgcaagaggatacaatcttataagtgacaaagttcaagaggcaaaataattgtttattccctaacaaaagtcttaattttactaagagttatttgcgactaagccttctaaactctcaattcacttgcaattaaccttccaacctcaaattttagtgagaaaatccgccaacctctacttttgttagcaaattaaagagtggttatgtgcaagtatggattatcctacatgtaaacaaaaatacaggtgttgcgatcatattaatccatataattatacatatttaaatatcattaaaaattataaaaatcatttcaaatttattttaaaattaaaattataatttagttttgtgtatggtgaatttagtttctagtaagatgcaagttgacaatgagtatgatattgttattaatgatattttcatgtttgaaagtctttctctagtatttttatttctcattgtaagcgagttaataatgttctagctcattcttttgctaaattagctctctctttagatgcttctcgagtcttgtagctgagtcttctactaaatttactttagtttatcatgcttgtattgatcattggatctctttcactttttgctttttttaatggaattattcatttttctcaatagataaataaataaataaaataaaaacaatattcaccacaaataattagatttggtccaaggccgaagatgagatgagtagtcccccaaggccccctcactttagtcaaattttttttttgaagaaattacattgtatatctatttttcattttctattataatttttacctttatattattactctttaatttatattcagtcttttaggtcatatccccattatataactctaattttaataaattatgtaaggttatatttggtactttgattataaaaaatgatgtttatcaattaaaattaatttagaattatgtttaattaatgtgtacatttgatatttatcttaaaatgttatgtacatttgatattttatttaaaaaaaaataatacttgttttatattttagactcttacaactatatatatatatatataaaaattcttaacaatttttttacttgaaggcatgactgtctttagggtagggcgatcgagactgttgcccaaagtctctcaatccaagaggcctcccatatctttttttttctcaaattttttttagcattagtccataagtccctcataatattttttttcctagaaaaatgatttaataacttgtttgaattttattttatttctcaaataaaatacctatttttaaaattttgttctaggtcccataataactaaagacaaccttgctcaaaggcctccaaaattaacccatcctaggtattatccaaaattaatctacatctattattggacatactatttactaagcatatataccaataagacacaagaaaaagatcaaaccaaattaccattattgtttgttagtccatggattgaccatcatgaatggccttcttaaattgcagtaaatatgtgttattaaacttgaccattttatatatacatagttataattcacctaagctttttgtccattattttttagctttggctttgcatgttaaaatatattaataaataaagaaacaaacaaaaagtagtaggccctttttcatttgtttctttttctttttcatgtattatttgtacaactacaactgattgatgaatcaattttatatgagatgagaatgagaagatcatggaccacatattccataataataatacattattacacaccattttaggtgacttttcaatccttctatctatctctcaaaatttgtccttttactgttttgttggcccattagattagatagtactcacctcaccaccttaaaccctctcattttttagattttttattttattttattttttaaaaataatagtgtagatttagatttacagaagaaacacttgtgtttgtgtttttatttaataaagttggatatatccaaaacttattaacatgttgaatgtagggttatgaaaatattgaggtttaatacaaactagattcagaaggtatattcgtatattttcctcagttgttgaatcttttatagtggcaaaatatgtcaaatacaataacacaaatcaaaactcgcatgaaatagtgagtttagatttatcttaaataagtttgggtcattttttaattgatatgtctaacccgttttataaaaagatcatgttaggactgatatggctaacacgaaattgacctgttaatattgacttatttaaagttaatttaggactttgacatgtcataaaaaggattaattacaccacatactgaaatttttaattttttttttttacttttttactgtggggtataattttttttttcaaaaatactnnnnnnnnnnnatactgtgtactgtgttaagtttaaactgttgttctacggttattttttagttnnnnnactgttgtttttagttgttttgttttgtgttccactgttgttttataaaaatacaatatattttttttaaaaaaaaaaatccacgtgacaatgtttttataaaaattaactcaaatttcagcatttttgtaagttaccctaaaaaaatcataaacttattgaatatgtcataaatgtgttaaatagatcattaatagattaataggtcgaaatatttaaacattatctatttatacacaggttacatggatcggtcatgtcgaccatttaatttataaacaggtggcatttgaattttattttgtgacacaactattgaaagggttgtgttcgggtcaagtctgtacatgcaatacacgagtcttaacatgacacgaacatgaacacacaattgccactcttaatctttagagtattgttactgggcactagtggtgcctaacactttctataggtgttactttacggttgtttagcgatattctctaaaagctat

SEQ ID NO: 17836 - DNA, 1636 bp, Cannabis sativa
cactacaaatttaacaaaatttacttctaattaaaaattaattataaaaaaaaacagagaaaaacagaaagatttatgattatatttaccttgactcacaagggtcctttgattcgataaaagattgacgatcatcaacaatggtatcaaacgccgcagtacactgatcctcataacaaagatccaccacttcttgataatcaccatgattatgatgttgatgttgttgttgttgttgttgttgatgatgatcttgtggagaaaaaaacagagtctgtctgagttgctgaggatgaggagctatttcattcatatcaatcaaattagcatgatcttcttgattatgtatcttcataattatttccttattattatgaccaagatcttgatgatgatcaagatttgcaccatcatcatcatttccctcagcaagaaaatcataattagaaaaataagcaccatgaggcattactgtatcattattatgatcgatttgaacgcgttggaattgatcaagaacagcattatgatcattagaatcagcagcaacagcagtagctatgatctgttgttgttgttggtgttgctgttgttgtctgaggaagaagagtttggaatgaatttcatgaatctcttcttggctctgttcaatctgagattgaagaagattgattataccaacacaaccatgaacagggaacttctttctcatatcagattcgtaaatgattgaagtcattgcatcttgtctctgaaaaggggtgacgagtttcaagatgttgagtatgtttcgaaccccaaataatcgatgagcgtgttggaatctttgtggctgatctgatgggaagtaaggagccaagggacattctcttgaacactttcttctttggtatttgcatgcagcacatgcttgtgttgttcctccttttattgtcataataagtaattagtgatatgatttggtgatgatgatgatgatgatgatgatgataataatgagagtttattagatgatgattatggtggtgaatggggttgttttggtgtgagtgtgagtgaggttctttgatcaagaataatcaataaggcataagtgaggtggaacaagaaatgaccaagtaaattagtattatatatatagtaccctggtctataggagattagaagtttcgaatttctttcactctttgccaagtcgtatccctatacttattttgttagttattatctaaataaaaatattgatacaaattacagatggcatctttattgttagggttctttttttttgttttgtttcgttatttctctaattaagtgattttaataatgtgttaagtaattttttcattggaaggatttatttttttattttttaaattaaatataaggggatttggaatattgtgtagatattaattttagtttttatgaaagatttgagatacttgttttgaaaagtttagaattgtaagttaaggtgtaaacaaaagtgtgatgtaaatttacttagtgttattttaattattttttatatattgttagttttttttttttttgaacaattatataatgttagttggaacttattggaacgatgtaaatttatgtataatgatagatttttttttttttt

SEQ ID NO: 17837 - DNA, 4119 bp, Cannabis sativa
agaattgagtcatattttcaaccactatagaattttttgtaatggttgaaactccatgcaagtttgaccatgtcgtttttagaaatccctgttgagggcagctgagcttgagagtggtcccatctcagccacagggttgggttttgttttcttaaaaaaagaatgtgaacttgactttattgaagaataaatttgggttagttgagcacttaaatgttccattaaaatttcagatcaacccttcaaagtatgtagaggaaactttaatttctaagattttaattttcttctgccttgcgggggtaactagtgaaatgtcattttcttcttgatatctatgtcaggctttcaattcatgcttgttcagaaatgctatcttttaggcgcctggtactgttcaaatttctttaatgtcttttagcaagaaaataaattctttaatgtcaatcttaattgtatgactatggtttggtttcattggttttaatttaaagctgaaatattgtgatgaatgatgatgatgatgatgtggtccatttgcaatttctacttcattctagtcatacatacatatcatcatgtttggttacattggtttaaatttaaagttgaaatatggtgatgaatcatgatgatgatgatgtggtccattgaccatttctatttctttcatttgagtcatacatacatacatacatacatatcatcatgtttggttacattgctttaaatttaaagctgaaattttgttatggtagggtgtggttcattgaccatttctatttcttttattttagtcacacatatcatcatgtttagacttgataacagttttcacattacgtggtttgaaaatgcactaactttggtcggtgacaaatgtttgtttaggcaagaaaagcattacgagcactaaaaggattggtgaagttgcaagctttggtaagaggtcacattgagaggaaaagaaccgcggaatggctgaaccggatgcaaactttgatgcaagcgcaggcacgagccatcggtagtcgatccgttcaagctttggaattccaacattcaagttgcaagtcctctcattttcatcatccggtaagtcaatttcaacttttgcctccaatatttgatttttgaaattcatatagttttggaaacttatatatcttcatagacaaacagaaaagtgagagttttctaatggacttgtggggctcccttttactttatgactctagaaaacttttcagtgtgaaaaatttatgacttttaaaggtacacagattggttgtttatgactgtaaaggtctatccatatttacataacttatgtatctgaatacaaggaaccctacttgtttttttattattttaatactacaaaaatggtaacatttctcccatgccccatgtctgtttcacctcacttttcaactctctgattttacctttatctttttccaagaaacaaaagtgaaataaagcattctgaattcacctctttctatctattaatttgcttttaataacaaagtccatcaatttgggttctaatgtaatgacataaaaatctagtcttgagtttccattaatttgggttctaaagtagttgctaaatatgcgtaaaaaatttcttgttgcagggaccagctacccctgaaaaatttgaacatcatatcagaacaaagagtagaaaacatgagcaatcttcatcactcctcagggtataatatctatatgaatatcttgtaacattaataaaattgtgcttaacaatgtgctaggtgaatttttgtatttgttagtgttatcttattacaactatgctatttaataatacagaaaaacagctgtaaatcaaatgcaagagcagctgttagtgatgaaagatcaggagacctaagaagttattcagtaagaaactcagtaacaactgacgacgaaaggagcgatagagttgtcgaaatagacaatggtaaaccttacacaacaatcaagagaagaaacctcttttcagatcaaaacagtcacagttttacaacctcaaaagactcaacatctcacttcacagttccaagtccttcctcctacgaagtagttcaatgtctaaacccgttgaagcttcaaaacgacaataataacatggaagaagaagagagctccttctgcacggccaacaacagcccacaattctattcagccacctcatcaaagggcggtggaataagctcgaggaaaagtcccttcactccaacaaaaagcgacgggtgtagaaacttccttaatgggtactcggattacccgaactacatgtcgtttaccgagtcttctaaggcgaaagtgaggtctcttagtgctccaagacagaggcctactcagtatgaacgatcaagttcaactaagagaaactctactgttcatcagggtgttggaacacagaagatgtcaactttgcaagccaattttatgaacaaggcttatccaggatctggtcgattggacaagcttggaatgccaataggttacagatactaattaagaagatttggctttttctaatttgactaactaatttaagtgtagtattttgatatgtaattattaagattttatgatatcattctctaagattaaaattcagcaactaccttttgctagtttttgattaattagatatttaattcaatgctgagttcaatgcacttttttacttaacagacaattgccttttatgagatgtaataccgtagcactgtagtgttacctaataaatatgctctttatttatttattagggaataaattttgtcttcggcggttttagtaatttttaaaatttatattaaaaaaattaatttcatatatgttctttatataatatatttatttaaaattttatttttatatgtgattaggacaaatagtaaccataatataataaaaataaaagtacatttgagatgaaattatttataataaaagttattaaaaatataaattatttttaaatgagtcaaatattacaataatataaatttgtacctaattaaaataatcattttctatttacttataccaaaatttaattttttattcatatatatatttaaattatatatttttatagttttttttggtatttatataaaaatattaatttaagtggtaataatttaaacataataaactattcgatatttttattgagatgcatatatttttataatattatatattgttgttattcaatattaatattaattatatatttttattgttgttagtttaacaaaatattttaagaatataagatgttatatccataattcggttattaatcaaaagctgacatgtgtcctacaaaagaatatgaatcaactcaaagaatataataattaaattgtattattaaatgcgatttaaagcaactcattttaattaattatattcaaactcgttaattacataagcatatgtgagataataataatcataattattaacgaatttaattaacgagacaatatatccgccacgggataaaaaaattatataataagaatatgcaagacgagacatcaaagatcttacgactcattgacacacaattgtacgtgaagaagattacttttattcatctcactttttatgtgatgcattagtcatctcgctaatatcattataacatgagaatgctgtaagaagaagcatgtctacacttcgcatttttcctcaaaagacgaataagaatgataactcatactcagcgagaaacaaccttctaagtcagcaaaaccatttaaaggataaagacaaggagcagttgggtaggtattagacattatctcatgtgcaaataaataaaactgggaatctccacatttcattagcatttgtaaatgaatcgatcccgataaaaataactgccaacctagacacctataaagaggggcagaatccataaaaaaagggacaaaaaaaaaaaaatagagagagaattttattatttattattattgagaattatactctgtattcaaataaatatccctaataatgccaactcgtggagtatgaagatttaaactacaaaaccacgtaaaatatttggtgttcatt

SEQ ID NO: 17838 - DNA, 2959 bp, Cannabis sativa
caacaccagaacaagtcccatagttaatgtctgttgctcgatcacacaacgacatacaacctgttctgtacctctgttcgcctcgaaagcctcgaataatggcgtaagtatcgcaaccaatggcagtgaacttgttctttgtagatgaaacggtgaagctggacaaccgcagactagtccggagcctatcttttcgatattgggagccattcttctcataacagtcttttgctatgagctgaagcactttaatttcgccatctttaatagatatgtcaataacttggaggttaccttttctgagatatgtcttcggagggcctatggaggtgtcgttacatgtgatgttgaatttgctgttcaagtagcagccggcaccgatcccgaatggatagggaatgtcaacatttccgcagcgcctgcggcagccgtcatctggggttttggcttctgtgcggcgcagattgattgtccctgctgctgcagttagtgccaaatgaaggagtattataccatgtaacaaccccattttggtgactattttataataatagagatttctgaattgcttgtttgtataaatgttcatatatataggcatgagtactactaatttaaactaatggggctcattttatacaaaataaagaaaaagaagccaatctcttgggggtgacccgtgaccacttcatcattacttgtcgttaatttcttggaagttacatggtcaactataatagtactggtaggctattacatattgacgaaactttccaagtcttccttttcttgctgcactatttaatataagaaaaatgctaagggataagttgtgaaggacgatgagtgcctgtatattattggagtaatttaatatcgaatcccacaaattttaaataatattaaaaccgctaacaaatcaaaactcggtatactctagtgcaactccaatgaattgctattgaatgtggctgtcagaacccactgttaaaaaaaaatgacttctcaaattttaacatttggagtgctgttgctgtcgagcatatctatctcctaatgctactgttttttttcatcttttttctattctaattagtcactttaaagatactataattaaaacatatactaattgttaaagtttgttttgagtctctcttgaacagttaattataaagttgcctatactttaacaaagcataacccccgtactgtctgtcgggttattttatagtcttctttgatgtctaggaaatttcatggaaccctttgtgtgtaaatatgatattggaaaaacttcgttttaataagtattatatatcttaattatataaatatcataacaattgtattcttatttttttttagcagatttaacataaaataattataagaatttcatataaaacataatataccatatttatatatactatttataaatatacctgacttttagattatttaatttaaaattgcattgcttgatttactcttctattatatcaactttctaaataactaatatttaaatattttatttattaaaaataataaaatttagaaatttttacacaaaaaatataaaatacacaatttattccatatatatttacacacggttaaaacaacttttttactcttcatttttattttattacaattttaccacatgcacactcattccattcagtggtccatgacccctatcaaacaaccatccatcatttctctctctttttttcttctttttcatatgattttatatttcttttcagttttttttttaaaaaaaataatatcaatctccatagctgaaccttccctctccccgatcccacgtccattttgttcttcaaattttttttcaactcccagtaatcgaatcccataaccgttttttctctttttatttgtctctcaatccgtatataaatatagctgtaactcgttcttcatcaactcattcccctgttcaaaagaaaagctctaaaatgagattgaaatctttagctaataaaaacaagggtaaacgacctgttattgaggaggatgacactgattttgctcctccattgtctaaacgtgggcgaggagtccaaagaagaaatcgaagttggctgccgaagaaaaaattgctcaagatgtttctgaaaaaaaaaatgatcaagttaatggtggtcttcgatctgaggtttgttttcggtttctttttggtttccccccttttctaattttttttgtattttacatttttcgattttgtgtttttggattgtgctattctaggttttccattttagcatttcgtttggttttgtttggttttttaaggcttcaatttattttgttcaattttatttgttcttttgatgggttttgcattttagtttggttagtcttaatttttgtttcattttgtggtcttttttttctgtttttatttttccaggttttttaatattttttcatttcagtttcatttttttatctcttctcattttcttttattttttttatagtattttaatagtgtaatcactttctgtatgtcgttttttgggaatattatttggtctagttgtttcgtgtccatttttatatcattaatgggtaacaatttgattttatcatggatgttgatgttcaaagaattctttctatattttagtttgttttctgtttttttatagttttattatagtttggctacttgcatatgttatttgtttatatttgccatgtgtatttaattgcaggtctgggataacaaattcagtccctctgatttctacagattgaaatgtgtttgtacgagtaatttctctgttcttgataatattaagaatactttgtctgtcaatttgttatctatgttccgtgacacccaacttggtcattttttttttttggatatacctgattttgttttccaccctcaaattgtccatagcctact

SEQ ID NO: 17839 - DNA, 6381 bp, Cannabis sativa
  modified_base (588)..(590): a, c, t, g, unknown or other
  modified_base (5682)..(5690): a, c, t, g, unknown or other
cctagctccagggtttaatttttttttttttttttaaataaggactcaaaaataattatttttctatggcccactaaatcattgcttatataaagtaaaaccaataacttatgagggtttgggtttgtaagaataagaaagttaatctatgtttgctatgatctgtccaattttttttggttagtaaataatgtacaattagagctcgtttggtaagtcatataagaattgtattgtattaaataataagtaacattacgtttagataaaatattatattgtattaattaaaaattaaaatctaaatccaacccatttagagtttaagtctcgggtctcgggtcttgggtccgggtccgggtcccaggtcctagttctaggtcgggtttgggtccgagtccatgtctgggtccgggtctcaggttcgggtccagtcccaagtttaggtctgggtctgagtctagtttcgagtccagatctcgattcgagtctcgagttcaggttcgggtcagagattggggttgattccggatcttttataaataaattataatataagctaatacagactatttgttatgtattaannnatacaacttacattgtattaaaaatttgtcgtaataattaatacaatacatttcttatttaatacaatacagtccttatacgacctaccaaataagctctaatacaatgtgaattgtataatttaatacataacaaatgattcgtattaacttgtttcataatatttacaaaggatatggggttcgggtttgggtcccgaaccccagacctggccccaactttagcaccgaaccccaaacccggactacgacccaaggtctcaaaattcaaacccgtcttaaaccccgacccaaccttggactcgacctggcctaatccagacatgacccgaccttggaccccgacccgacatcgaaccccaaacctcaaacccccaacccgacctctaaccccaaacatcagactgtgacccgaccttggaccctgaccccaatctcgacctaggtcccgaactcaaactcgacctgtcctcaaattcaaaactggacctaggctctgacccaactacaaattttgaacctcgaattcagactcgaacgccgaccctgacttggaccccgaccccaatcacaaaccttagacaggagttagaattagaatcgagtttatggtaaaaacaacatgtataattgtgcacataatatatatttataaaaacaacatgtataattgcaattgcctatttaaatcctatttttaatattgtttgaaaattttcaaaactagtttaaatatctactataactactacatatacattattatataaaaaatattgagttatatttttctcaaaatgctaaaagtatgcctatacctaggaatgtacctacgtgcagatgagggtgagcgccacccctttaaaataaaaattataacatatatttttaaattaattacatcatatagtataattaaaactagcaataaaaaattaacaaagggtttgttagagtaaaattagtactttacatatgtgtgttcaaataccaaagtttatttatttatttttttcattttataaaaatgctcatgatagaaattaaactcctaccattaagaattttattaaagagcttcttatccattgacaccaaaatctatatcattatgttttagctttaaattatattaaatactttaaaaatagggcccttaaaaatacaaattttaataatttttagcatattatattatttaaaataatacttagtcttatagctcagctcgctactgtccatgcccctaccaacttaaatgtaaacaggagggcggggcaaggacagagatttctttcctatttccatacatttttctaaatttactctatattcacctcaatacttatttaaatcaaaacaaagacgggacgagaattacctgtcaggaaaaagattcctattaagtaccgattacatatatatttttaaaagaaaaaaataatgactcaaagagaatttaaaagaaaaacaagcataaaaactcattaacacaataaacataagtgaaatagtgtgtatagtaaatagaattaataaatacaaaattggtaatcgtaaataaatggttaagtgtcatttttcttttaaagcagttgaatatgattattaatatgcatcacctcgaacttttttatgaaaattgaaatatctcattagtgtaatcagtaaaaaaaagcatgaagttattttaattgtagtattatgattttaaaacttaaatatatacatatatcatatcgggacgggttcggggtgggtatctattctcatgcccctttattatttttgactcgagtatgaatatttaaactcatacctgttcccacccccgaaagtccgcccctgccccattaggagcaggtacccgcaggtataattgcgatccctaatttttatttttatagtttttaagatataaatttgtaagtatatatatatatatagtttttttttttttaaaaaaaaagttattttatggaaaattttaaaataaaaaagcttaaaaaaatatgaaaaaaataatataaagtaactacttatttctctagtaagtctaagggtattcttatttgattttttcatatttgaaaaaaaataccatatttttgcacagaaagtataaaaactcataaaatttgtaattttctcaatttgtaaattaatatatattaaaaataaaattatgagaatgaatatatacttaccaagcgcatgaagtaaatgctatgattgtatatggtctttgaagtttccaacatgccttcccaaagtttaaaattttagttgctactgaatgattatcagattctggaggctcagtttgatttgtagtagctgcctgttaacacatcattattactattattgttgttgttgtgtatttttttcttttaggttaaagaatggaaagcacaattataattaccctctaattaaatataatattaattaaatattatgtataattaagaagaaaaaaaaacatacaaatatatagaagtaagagacacacacataccctaatggaattttttgcgattgataatgattctgagcatttgttttgtagatgaaaactcttggtggagcaatgtttagagggaaaattattgtaagagtatttaattggtgttttggggtgtcgataacataataatgaggttttgggattattattgtgaggatttaataaagtatggtaattagtttgaaatgaaaaggtacaaactgatgagagtcccatgaagattattattgattgaatattaaaaagaaaaaatgagggaaagaaagggttagaataacatagtgatatcaataatgaaaaattaacaagatttatagtaaaacaatttttgcttggtttcaaaatttaaagtcatccatgttttagaagtcatgcatggtaggcacatctatctttcttgcctaattaattatggctatacaaaccatgcatgcatgtagagctctacactacgatgagattaaatttatacaatcatatcaaaattaatattttgatttagtgttgaaaatttatgaattattgtaactattaaaacatgttcggaaatccctcatctcgaccaccaaataccatctagaatcttcctacaggactctcctacccggagcctcacatctagaacttccaatccgggacctcccaactagaggcttcccaaaataaatccttaaccacacacacacacatttttgaaactatcagtttggacccccaactaaaaactttgatccagaatataccatccaaacctcactcatcacctattcgggatcccttaataaggatactaacaaccaagtcacacctatccaagcaaccaaaactccagctcttaactctagattcaccaaccccaaacctaatcattgaaaacactatctaggactacccttccgaaccttaccacacaaatcacatatgacaagtataactcattcaaaaccattttgggcagaaaagagttcaaaactactcaactttcagaccttcaaaattaagtcattccttgaccaaaggctatcaaacttaccagaactacaagagggtaatctaaacaaaacatacacttcaaaagcatctaaaaccacctaaaactaatttcaccatattgttgagtggactttgagttcaaaaactcgaactcctccaacacgaactacatcagctaaaatcttacaaaccaacacagaattcaaccttaaatcaaaccaacaacaattttaagctcaaacaaactctacaaaacctaacccataaaatccaaactaattacaacaaaagcttttcttttaaaaatttaaagagacaaaggagataggttaccttgatactccttctaattcaacactaactctagttagaatttcttagttaattggtgtgtaaattattataaaaaatctggtttgaggttggtatgacctagaaatggaccaaatggatgtgaaaacaacatttttgcatgggagatcgacttgaagaataaatctacatggaagagcctgatggatacaaaaccagcaaaccaaaccaggtatgcctcctacaaaaatcactttatgggcttaaacaagccccaaggcaatggaatctaaggtttcatgaatttatgatcagtattgggtatagtagaagtgattatgacccttgtgtgtattataacaatgaaccaatttggttactattgtatgttgatgatattctcataattggtaacaaaaggcaggctatagcaaaattaaaacaaagtctgaatacagaattcaaaatgaaagatcttggagaagcgaagaggatacttgggattgacataagaagagacagatcagagaagctttcactatcatagagaagttacatacgaaaattgatacaaattctgcatgagtgaagcaaaaccagttagcactcccctggcccaacatatttcaagttaacacagagccaatcacccaaaattgaagaggcgaaaatgtacatggatacaaactcatgtttgtgtatgaggtacatgatcaagcattgatcacatcagttcaaataataaattcatgtttgtgaatgatatatatgttgtgaaaggaggatacaaactccttgttgtagacttccttacaaagcatcttgtggtgttaaaacctggcagattcttctcattttgctttcactatcgcctttttaggcatgatgattcgttgtggaatcttcatgtcaactctcgtccacctataactgtttacaagtatggtttttcttcattttaagtgagagcgaacattaatttaaatataactatgtaaagatttgctactaagttatatcaataacaataaattttatttataatgtgttgagagtaagtgtgttttataataacaaggctctaaatgaaaacatatactaaatattcagcataatggagcttccacatgaactcgtagaattttctgcctgcttcctgcattgtacaaccaatatatatatataaataatcaaatgtatgattaataattaattagaaaattatattattttttatgtatataataataataatannnnnnnnnataataataataataataagtgtatataattaccgggttgtaatttgttatagcaaactctcgagtctgtacgcaattaaacaattaaaaatatttataaatatgtgaaaaaaattattataataatatatttgctcttaatttcttttgtgagaatttaaatggcaaacctgaaaaattaaccaaaatgctaaggttgcatgtgaaagtaacattacgttactcttgaaagcctgtaattaaataagaaatgatgaaaagacaattaacattaataaataaaatacttgaattattttagaaataataataaattaatcaagaattgaatggatgaatcttatgagtattatttcgggtgtgactcatatggtaaaaataatatgatatgaatttaaattttatctaattaaattagaatatgtattaaaatgtaattttaaattatacaaataataattaatggcatgtgtgttagacaatattttagtacctcataatgtataattaataaaatacctgtggccaaataatggcagcaagtatagcagatacataggttagaagaacaattccagaacaaagaaatgttatgtttttagcaccatatctggttgccaaggttgatatgccatgcctatatagaaataagataataagtaatattattaagtgtttgtttaaaaaaaaa

SEQ ID NO: 17840 - DNA, 6289 bp, Cannabis sativa
  modified_base (1179)..(1180): a, c, t, g, unknown or other
tatatatgtacctttgattgatcaaaggtgttacaagcctcagctgcttcagctttcttggcagtgtttttctcaaaaaccttcttgatctttggaagaaccttacttttccaataacccataatcttaatttcttttcttaaaaaaatcaaatgagaaaacagagaagagaattgttattattattagtagttgggatgaaacaatcaaaacgtgtgtacctcaaatatatacaactccttttattttccatagacattaaattaccaaaatacccctcctcctattttccttaattatgtaataatgccttgttgttattacttaattacataataataataataataataatatgtattatgtccagccagaaactccaccacaaacaaaataacacatagaaaatgacctcttttgcccttcttcacaggctggggggaggggcaaaagagtcattacacatgggaatatgattggagggagaatggggagttaagccagggtggatgatgaggtggcatctggggtgatgacagctggcaatgacctcaaaaacatcaggtggcccctatacctaccctctcctctcctcacctcctatatattattataacagctcacataatttctatatatataatacactaaatttatgacaacacccaaaaattatttttttcaactaataatattatttctatagtaattaattctttctatctttcactatataatattaattattttatattatattatatatatcatgatttgatgatttttttaactcattaataattaatttcatatctctaaaaaacatatataagacatatgaccctacattatttatcatgaccacatttagttgcatacatgttttatataaatatatttatatattgttttgattgtatatatagtatatattttattaattgtgtgacatatatatgatatatcagatagaaagtagtttttacgatttgaaaaatctgatattattgtttgattcttctgcaatatatatgaaaattatagtttaatatatatatatacatatatattggtgtattattcatggattgattgtttcattaatataattagctgtgttcttgggtttattctcacatggcttcgctggtaatttatatatacaaacatatatatatnnataaatatatatatatatattaagatttgagtggtgtaggagggttagctagggttttatatatatttgatctaaataagaaaggagtggggaacaagcaatcaatcacgtatatatatacattaatttaattatatatatatatgttttgattaataatattttatttatacaactaatttatattttacctaattaattaaattaatttatattcattaattacatctgttaattaaaatgtacgtacaacatgacacacatatatgttcctatttataactttattagttgtctcatcatatatttatattaattatgtgcttttttatttatatttattttaattttaagaaagactggaatattttaagaatcatatctaaagcaatgagacaaccaattacacaacaaaatgataattgtctctgtatatatataaatattaattttatagattttcaagtttgaatttttctcctctccccaagcaaagtaaataaaattaattattgtgtcctaaattggactcatatcatattttttaaatttataacacaactttttcacaatacattactttaagaaagattttaaaaatattcttttttatgttttatttaaaattttataatttaaattttttatttacaaaactaaacttgtaataaaactttaaaattacaaaaatatactttacttaaaacgtaaaaaaataacgaaaaattaatcgatcactataactataaataaattataaaataaaaaataaccagaaaaataatttcataataactataatataattataaacaaattataaaacaactaaaaaaattatttatcatttttaatgaaaaaatatttttgtaaataaaaaaattgaaaaattatttacaccacatactgaaattttcgatttttttactttttttactgtagggcagaatttttttcaaaaaatactgtataagttttatattatgtaagttttcattgttattctacagttgttttttagttgttcaactgttgtttttagttgttctgttttgttgttttataaaaatacagtatttttgaaaaaaaattcttgtgacagtatttttgtaaaagttaacccaaatttcaatattttttgtaagttttctaaatttaaagcataaaaaaaaaaatctgtgttattatatttttataattttattcaaatttttgttctattatatatatatatatatatatatatatttattatagctctctctggttggtaattaatttcttatttagcaattacttttgaaattaatattatttttaatggaaattaatgttaataattatacaaaataactaaattaattttcgttttattttgcctctgtcaaaatttcaacccataaaaaaaacaattaaatttattgcttataaatcattaattaatcaaatattaggagtaactaataataattttttattttgatttataattttctgagaaaatattaacaaattaattatatatatggaaagaagtgaaagaaagaaatgatggcgtgtgtcccaatactctccaagatgatttaatttgaatgattattcattatatataattaatttcttttgtataatatagttattattggattaattaaagatcatcatgggatcattcataacatatatagtcaacatattaatattaattatatatatttgaatttgaccagttcattagttttgttttgttttaacacatttatagtacagtacacttctaagtttttggtacacttcttatttgttttagtatttaagaaagtgttgtaagtttaattttttttgttttgttcatttataattatttataaattttaaaaaacaagttaaataatttatcgttccaaaaataatattcaaatattttattacatgcataattattttttctttatataggtacttcttattttttttagtatttaggagagtgttgtaagttttattttatataattgtgtatattgtatttatttataactatttataaatttttttaaaaaagataaataatttatcgtaccaaaaataatatttaaatattttattaaatgcatgactatttttttttatataagtagtatataattatataaattttatttttaacactctaaattatttttaaaattttactaataatcctaaaagactacaataaacacgcacgagaatattaaagactaaataatttttttaaatatcaaaacagattaagattaattaaggatactttgattgttagagtaattctttttatggtgcattgtagatataatactaatttaatatagatatataatttaatggaaaatatatatatatatatatcatcaaaagataattattatcaaaattaaaatttaaatcgactcgaattaaatgattgattgtgaaaaaatagaacagtacgtgtctagataaggattgatgttgttgcatttaaataatatatatatatatatttatataatagacttattggtgcatatataatattattgtagagaccattaaatgttatatatattttggttgagtatagaagaatagtcatctcttgattaaatttagttatacatacgtacaaacattatattcatcagcaatgatatatatgacatttaatattaatattaactatattcatacatatacatatatgtatgtgcagtttatcattatagctatagtaattaatactaattaagcattgtataaatatattttaattaagtcatacaattaatgtccaagattttgaaacaagttacaacttggaatagttataaatagcagttgttcttactaattatattaaatattaattaatatatatagtcattaaaaataaaaaataaaaaaatagaatataagttttattgggtgctgagtttgtgtcacaaagtccttttcaatctcagtttgcttcttttcttccccttcattcatatattattttttatacacaaagcaaactcaaaaattaactctaaaaatcacaccaatgctatttttcaatagtattaatttttatgaaataaactgtacatttatatattttccaggagaaaattaaaaaaaaatccaaccattatatactgaatcactctttgttttttttttcttatttaataacatataagaaaaaaaattgctttactcaatcaaaaatatattataaataaatggtcttaattatatattttatttggagatatttcaagatgatttggattaggttgagaatagtgaatggataagatcttaaaatattctatatatatatatatataaatattaataataatatagggtaagtttagtgcgtttttaaatagatgttttggtatattcttatctattttgaaatataaaaaaaaaaaaaaattaattcaatttttttattatcgtgtacgttataattatttaaaactaattataaatttttgaaaaaattttaaataatttataataccaaaaattaaatttatatcttatattgtatgtgcgattgtatttttcttatatacgtaataaataactgtttaaactttaaattcaaattataaaactattcgaaaatttcaaaaaatacaagtagtcttaaatagctacgaacaatcattataacagataagtttctactacaaaattttcaataatatatttctatagtaatagtctttactaaaatgtttgaatattataaataataaagtgttaaatacataaatataataaataaatagaaggtatggggttgggattgagaggtagcgtttgagtgtgcaatattatgttattgaaagcaactaaaaattaaaaattacatatataattttttattactcatttacttatgtcatatggaaaatgaaatataccttttctttcaattaattattattattattattttacatagtaaaatctaattaaagagattattaattatgtacgtaataaaataaaatatctttttgtttggtctaatatgggctagtttgactgaatttatagcactgttttagtgtgagaataaatgaaatattcttttaaaaaaaatgatatgtagtttgaatttgttgctaagtatattactatgtcctttttaataataatagtaacaaaaaattaaccaaagttgaagctaataaagacaagaacaagggatttcaaatatatataattataaatttataatacatattttcaaacttaaaacctttgacttaaaaaataaaataaaataaaaacaatgacatacatagtttataataagatatgaaaacataaatacacaaaatatattagaaagtgtagcactttgattttgtaagttattggtgtataagttaatattgaatttcacatagttcaatttaaattaaaatacataaaatccgatatcaaattatacaaatagcaaatatgatgtgtttactgaaaaatagacaactttatataatctgatctcacaagtgatacaataataataagaatgaaaaaaaaaaagtacaaaagatactacaatttatagcaattccctttttatatcgcaataataatagagctacgtctacttccaatttttattattcacgatatcacaaactgtgtatgagaaatttagctaaggagaattacactcaaaagatctaaagatataaataagtgagttttagagataaaaaccttccgtaaagaaatttaatgaagagagtaaattaaaattgaaagatgctttgcaatgataaaaataaataaaattaattaaagaggacaagtgatttggtatagttaatcagcccaaacattaataattaatatacaaataaataaataatcaaaaggaaaaatgatctcatgtagtgtttttggattggcctagacatatgtgtgtgtttagagcacacttagtctagaagtccaaaaaaaagtttatctttttttattattttaaaaaatactataaaattgattcaaaggcttcattgatattaaaaagttgactacaaatgaatacaaaatcagtgagaggtatga

SEQ ID NO: 17841 - DNA, 3251 bp, Cannabis sativa
atccgccggtaataaccttattattaggggcggaccttccccgccggtaataggtccgcccctaattatcaaaattgttatagtgagctttggtttctaaattaaaactttctcaaatctaatcccacataccaaaactagctgctagaagctaaatctaactcaaatcaaacttagaattcgaatcatacaacaagcaaaccctatcagcccctaatttcaaaaatcacatactcaaccaaccttaaaattcaagaactaaggaaaagtgttactagggcttaccttggcttgatttttctctgaatttcttgctgaaaataccaagaattgcaacaatctcccttagttccagctggttttgagagagagaaggaaaggagagagtgttcttcctaattttggctttttcttctaaatgaaaaataatggtttaactaaattaaaccttggctgaataaaagctaggtgtcatcatcaaaattagccacctaacccaccattaaaattactaaaatgcccccccataaccttaactttgacattttcaaacttcggggtaaaatggtcaaattcgatatccccactcaatctcggtattttattttctctaatatatttcccactaagaaataaagttctagacttacccatgtgatcactagtcatccatttccgttgtcaccaagcaaaaattgtgaaaataacataattcacatataaatcaaataatacccctagagtttaataaaatctctggaattgagaaattataactctaatatccaattctaataattgagcccacaaattcataaataattataaaaatatcagaaattagtgctaattgcttttactaattcaaattatttatgcggtcattacaattatattcctataattaaaagtattagaaaatataaaattaaactatatgttgatttatttataaaatatgatatagaaatttgagtatttatgagtaaatattcaattataataattctatttttaaatatgattatctgtgtaaaatatcgttaaaattatataaatataattgaagctatgagaaatatacatatattattaattgactcattaattataaaaataaatgtgataaagcaaacaaattcgagcccgaatgtgaaaacgggccagtacggcatgtgtaacgcccgaacttgaaattcaattaattttggatttaaacatacttaactaattttaaccatatataaatatacttataaaattttataagtcaggatcccgagttaaaaaccacttttaaaaaaatataccatatatatttacataatatttttttacaagccacgcggcgacaacaaaagatgactcaaaatacagtaagaccgaaactctctcagttgtactatcgtgatatgtacaatccttgccgagtcccaacccacttctcctccactttagccttacccttacctacacaaggtagcaaactgatgagtcaacagactcagtaagatatacataaaatatatatatatatataatgcaatattaacgtgtacttaggccctaatgagcctaagtgcaaggctcaccaaatggttaagaacgttcttaacggaagtacgaccgttataccacatgcactaaagtaccatctccgtactagtgttggtagggcctaattgtacttccaggtgttgttgggtgttgtaccacatgcactctgtacccacttgtactcgtgttggtaacaccgtaacttacccttaaacatcatacactacactaacacacttaaactataactattctagtgttagtagtgtaaccaatataaacatgcattcatatatacatatacatattttatgctaatcttaccttgttttttagttcaggtgtgccagtcaacctgagtggatcagtagcacgatgctttacagggctctatatcataatatttataaatctgatgagagacacgctaacacacttatcggagacttagaatcaaaacaagagatttccctatcgatgaactatatgtcaataccctaaatatcacaaaaacaagagaaactagggttcccaaatcttcctcaatcggaagaccagttccccaaccggaaaaccggttctgtggggtttctaggagaccgaaattccagttcttataggttctcctgaaccagttgactgatgcaggaaacaccaaaaatactcccaacacctcaattcgatcccaaagcacacaataacttccaaatcacctgtttatatcccaataaacttaatttaaggaataacactccacaattagatcggaatccaaaaatactattagagaacaaagtttgagttcttaaactcaaacctttctttaacaccaccaaaatcaataaactcaacacaattcaactaaaataacctcatctaattctcaaaatataaatccaaacatcaattaacaatacaacatccaaatactaaagattcatgcaacaactcaacttagaacttaggaaaaacaagaatagaggtgctaggggttatacctttgattgagacacctaaatcatgctaaaatcctttgaattgcagctgaaaaagccctcccttcttactggttcttggtggttcgaaagagagagagagagaattgtagagagagagagaaagttctaggtttatctctaactttaactttgtattagattaatataacttattattcattaaatctaacctaaatcagatttctaatgcccataaaagacaaaaagaatttcctagcaaaatgaccattttgccccttaacataatccaaaagtttaatgacacctaagggtaatttggtcatttctaaatcctgactatttcccgacactaccaatgcctaaccatgttgccctgctactaatggcccaacgccatattccagtgttaccgggcacaaatacagaaaacaaaaatttcacacatatcataaacaacacaatctaaattcaaataactccataaatgcataaatcatagttaataacataatttcataattaaaccttaattatttgataatctattgcattaaagttaagcggtttttacaacatgactcatatttttttataataggcatgacatgatccatattttaaaaagaacagtataatataattcgggacagtacgagacccacaaatttacatcactagtttgaaccctttgtcattgtaaaaaaaaaaaaaaaa

SEQ ID NO: 17842 - DNA, 2742 bp, Cannabis sativa
aaaaaaaaaaaaaaaagaaatggctaaagtgccaaattgatgggttaacaagatgtttttaaggttagcagtattcagcgtgcctccgatcaaagggcctaaattgaatctaagtaagcataaatcccctggatctaatggtccaagaatgccaatggttgcattcaatgcaatccatagaaccacgaacacgtgcattaatgatgacattagtctctcgcttaaatgattagtcgtcattcctcaacctaagacaacacacaccctagaaaaccacgtgacatacacaaacgaagaggcaatcgacatatgtgttacactaatggtatatgaaaagttcaagtgccttcgtaacattttaccatggaatattaagaggccaaggctaatcatggcctcaaatatgatgataagtttggatgagggatggaagcctccatgactcccaagttgtgaagacttaagggtaaatgatattcgtatttctagatagatgacatgtgatcctcagattaaggccattaaagttaccaagcccattgaatgggtccaaatgggtcatccactcagccatgagtgaagttggatgtattgtccaaattccatagctacttcctaatgataaagtcggacataatgtcctaggatgtaaacttaccttcaaccaataggcattcaaagagacaaagacaaatatgttcaggggtcatttgggaaaagaagttgaagaggcatctgggagcatatagtgtctgggagatcttcctatgtggcacttatctaacagaagtcctaagaaatctggcggcatgtgccctgtgtcatgcctgcaaaaggaacaaagtaaaaaatatcaactttttgggcaaaggcccactactttgacattctctgtcaacaaacaacgattcatgctaagttgtcactatcagcaggacctccacgtacagatgatggttgcctacaaattaggcctcacctacccgacctaataaaaaatagtttattatatttatcccatcagtgggattttctcatccaattaaccctaatgggttagggtctaccctacccattagccaaaaagcttatatatatggcttcatcctttcatgtaaaaggttaacaattttatgtgtgaaaagtattaaatacttcatagccaaagagctcaataatattgattcatggactaaagctcgtttatgcccaaatcacgtaaaaatattgccttatttatctcttaatcttacttttctttagcttaatcttcttttaatttagttttcaaaaatcatgacaaacaagatccattgatataatcattatatacttcgtcaacctctatttatggtttgtaaataaagaaaaaaaaaattaaaattaccattttatctttttaattatctctttttcttagagtactactgaatttactagtgaaggttatgtcacaacttattttatcttgagtgctcgtaacatttttaatactaaaagttaaccctttagagaacgaatgaaccattagtcaatctagaagaaggctaagattctatatttgttaagctatgtccctagccatatatatcaccaaatttccaaaacaagttcttagtctaatcatctcaacaaaccataatacatgaatcaaaagatcatattatgtatagtagttcatagcaacctaaagattaagactatcatgtatatgatcatcaattgatgtgtttgatcaatactacaaagttatatttaaacaagtgttaacaaatcacatctggtccaattttacatattctcttgtattgtatgtatagtacttccactaaagtactaatagtgacccagatctatgtcacatttcataatactagtggaccatactacactagcaataagcaatctaaagatttcataactttattttaatgcatactctataagtttgttatctctataatgatcctttgatggcaagtaagtaatctaaagttttcagaactttaggtgattttcataccatcatacattgtttatgcacatgtatttattttaattatttatttatttaaagtatatgctagttaaaattatttttaagggcactatttttaaaagtttcattcttgggagccttattcaacctccagcttctaaaacgaggtctacaattaatttttgcaactcgatttcatctagttgagtcgaagatgatttttttggccaaaattgagtgaaaataatggaaatttgaggggttttgatggacgaaaaatttctaagaaatttatgaagcttaatttgagtgaaatttcaaaataatgaagattcaaatgaagcaactaatcgccgaaaatttaaagaaaataaattggtctatttttagtatatatattgacgaaaaacaaattaaacaacaaaaaactattttagctaatatatcaaaattataatcctctaatttcgagtttgaccattaaattaaagattaaaaaataatttcatgagcaaattaatgtagaacttaaaatttgaaatatgaaagtttttcatattactcagcaaaatgaataggaagcttataatgagtaaaaaaaacttttaactttttacaatcaaaacatgaaattttttacataaaatactttaaattaatatgtagtttgtggtaattaacttacattaattaatgattgaaaaaaatatagatctgttataaatattaataattatgtggat

SEQ ID NO: 17843 - DNA, 6195 bp, Cannabis sativa
ctatttcatctctttttcaacgtattgtgccttgttaacttgattcttacaaaaacaactctattgcagatcaaaaatactttcccaaacttgcatgtgttcaatgcgaaaccaatgaaccaacgcaccaaccaagaatgacttggattcttctgttgctgctgacaaagatccagaaactcaaacatgtcaaccgcaagaactctaaagattctgtcgcggatcaggatagtccaagtgattttgttacgagagacaccaaaatcctgatctggaaagaagtttggtgaagaaactaccaaaaacatcaaagacaaaagggagtgacccggatgttattgatgacagtgaggcttcattcatggagcttctatcaagtgttggtgaagaagttcccgactacaaaagggaaaagaagtttggtgacaagtctggaggtgtcatagtaaccttcccaagtaagacgaagaaagccaaatcccaaagtacaggttttgtcttaagtctctcaccccaagttgaagttggaatcggtggcccgtggcgtggcccctcaacatggggtcattagtggtcaatctatttctcgttactcattttgtgtagagtattttagtaactacaatattcacttttggttctagtttttcttttctttttcatgtatatattttgattaatagttatagtgttttttttttcttataagtaaaatagctgtagtgttgaaaacacaataatgggatatgatgaaaaatattatgaaagggttgtaatttgagtatttttctaatattgtgaaaaatattgtaaattatatacttaattgtgaaatacaactcatattctctgataataactttactttctctttggtatatctctgataaattattatataaattgtgaactacaactacaaataatttagtttaagttttgaattgaatgccatttttttaactgggtatgaactaaatttaatttactattcaagctcaaaaaatattaattataaaaaaaagtccaaacaatgttaaaaataaaaaaagggcatttttaaaaattaaatttcatttcagtccataaattaaacattcaggctcaacccaataggaccagaacccaactacacccaacccgaaaaagcccgacccaatacccgacacacccgaacacttgaaaatcgggttcggttgtgcatttccaagacccaaagcccaaaaacccgaacccgaaaccccaaaaacccaaaaacccgacccgcgtgcagccatatactcttctccaccattatttgccaaaaagcccattatcagacccccaatgttctcttctcttcttttcccactatcaccgaacccctgagcttagaaaaccctctgcccaccttcactcacatctcatcatcatcctcgacttttcttcacttgaaccacggcctcatcaccatcttcacatgaacccagctataccagtcccaactcgcctagtttattatcatactattaaagttggcaaaaaattatgatcatatcatgtattattttagagaaaaaaaaaataaaggagttaaaaataaataaataataattctatatgtgctacttcatgataactgttgccttggattttttccaaaatatgtggccgcagctgcgtatgacacgtggattacaaggacacctcaccacaagtttagctaagtcatatatagacgggcaagtgcacttcagagggtgagtccccggagaggcacataaggcatgtctctcctctccgggagaaggagaacctgttcgaacagtcacttcgcatttaatgcagcatgggaaaaacatcttggaacacccataagaggacatgacagatagcgtaaacctcgtttatggcgattacacgaaaatcaaggggctagtgacggctccattatgaaaaatcacatcaatcaaggaaggataaagattactcttacctaaattcctatgatacctgcgacataggtcatgtatgccctattttatatctcttggaaacttgtgcacatacattgttggcactcaaagacaagtgatccctttttagttatccttacaaaactctataaatacccctgaacaaaatggaaagggggatcgatcgaaaaaacaagagagagagaactcaccaagaacattctctatataagaactctcattaatacaaaagacttgtggactacgactcattaatgcccgaaccatgtaaaaaccacctgcattaattattccaaagctctcatcattatctcatttaattggttgtcgaaaacctcggtcaccaataacgaaataaactacaacaaactattactatcagattaaaaattaaaggtttaaaaaatacacttatgaaagtaaaaaagtgatactcccacctaaaaaaaatcttatatattatatataccaaaacaacaactcatatataatttagttcattctaatttcacttatgagagtaaaagtgatgttcccacctaaaaagaatcttatatataccaaaacaacaacccatatataatttagttcattctaatttcaatttttttccatagtttaatctgatttggtcaagtgtcaaaccaacataaatttcatctcactaatcaaaacaaggttatattttttttatacttggttcattttttgatagggtttatgcaaatactttattaatataatttctgttgatgctaaataatatgtgcaattttagtaatgagtccaacaattcttttgatcatcaccaaatgaattttttttttttttaaaactaataataataaaaatatatataaaaggccgggtcaggactgacctgctttggccgggccgggctgggcttgacccgccagactaaatgaagtggtaggaccgggccagatcgtgccaaaaaggtattggggcagggtcggatccatgccggtcgggccgaacccggcccgattggtattcctgcgttttgtgttttcatttcttccccagtctctctgcagctaagtttaatctctctgagtctctgtgactgaggtgtgtcattcacttctccatattttcttgtttgctaaaatggagtctaccaccttatcctgctattccttctttttttacgtttcaatatatcctccattttagggggatgccgtcgctttcaactttccgggcaaagaaaatgttgtggcggcattcatggaaggcaccccaaaaaatgatgttttcattgctaccctttatgtcaaatcgttacctgtcatcgcaaaaggtatgtgcaactcacactacccataaaattttcagggaaaatcttggtcgagaagattttctcgacgggaggaaagttactctaagttattgttcggtacattccacattattgaattgttcatctgatttgatttccttgagtttcttcttgtggtgtgccaaaaagcctaatttttttcatgatagagtaaccattgagcatatggttggagtggtaagccgtctcgtggaaaggtacaaaacagtgaaaagggttgtttgggagctggagaatattgggtctcttgctaaagctagtacgtttttgcttttgttgaggatttgttggaatggagggatgaataatttggtacttgaggtgttcgatgaaatgtctagcaatggttttacaccaaacacatttgcacgcaatgctatcattgatgtgttgttcaaaactggtcatgttgagtcagctattaaagtttggagggaaactgaagcccctaattttttgacctttaatattgcattgtgtaatttgtgtagtttgaaagaattgtttcttgttacagagacttttaggaagatgttacgaatggggttttatctgaatttggagacgtatgaaaagatattaagttgcttttgtaaagtgggtaagttagttgaagcatatcaagtattgggtctaatgattgcttttggagtccctgtgtctataaatatttggagtatactgattgatgggttttgtagactgagaagatttgatatggcaatagaattgttaggaaagatggttggggctggtttacctcctactgttgtaacatatacaagtttaataagaggatttttgaaatccaatatggttaatgatgctttaattatattacacctaatggaatctagagggttcagtcctgatttggttctttgtaatgtactacttgaccgttttacaaagttggggagatatgacgatgccattgatgtttttgatgatatgctgaaacgaaaaatagccccagattgttacactttttgttctttgttatccccattatgtttatctgggaggttttctcttgtgctgaagttagtctctggacttgtagttgaagctgaccaaaagttatgtaactcacttttaagttacttttgtaaggctgggtttccatgccttgctattaagttgtatgacgatatgcaagacagaggtttacagccagacgagtatacttttgcggctttactaagtgggctgtgtagatcaagaagaattgaccaagctattaatgtgtaccactggattttgctgaactaccacactcaagatcctcatatccatacaatagttgtcgatgggctaataaaagcagggaagtttcatggagccattagagcatttaggaaggtagttgaagatggctacccacttgatgttgtatcatatacggtggctatccatggacttttaaggggtggtagaactgaagaggtttggtcattgtatagccagatgaaggaggttggtatagctcctaatgtatatacttataatataatgctctgtggtttctgtaaagagaaagataacagaaaggtacaatggatactagaagaaatgattggtgcaaggatagaactgaactatggtaatttcagccgattatgtagtttcttcagtagttcataccattctaattctattattggccaattaatcaagatgaaagatttgggtttgatgccggccaaagccgtacatatattaaatcggcatgtccaagttgtcaaggtagatgaaaataatatcaagattgtggatggtcatttggatgacaatctacttgttgacacctcaggctctgaagacctttctgatgtggctgctttaatggcttgaggagtaatcagtgaagaagattattatggcttgaggagtaatcagccaagattttaaagccactttagtgcttcttcctggtttggttctattgtgagcacctaatatcttatgcttttagtacaagtgattctacttagaggtatttttttctactctctttttattttcgaattatgagttaacaagagtaccatggactgtgtttttgctattgtactcacctgctgcaacttacataggctctattaatttaaatgtcatttcatgtcttttcatattgtttattttgacagttacttttgtggaagcgtttgaaagttgtaatagtatcaaaattccaatattgctgtttctaccatccttaaatgttctgagcacaattttttttggtaatattctctcaacattcatgatctaacggtaagtaagatttggatttgatgacttggttttctttttgtcaatcaggtcttaaatgcaggcaagaataagcttaagtctatgaatgaggcccgatcaattacatctttatagcaataatttttaatggtgagcttttagaagtattgaactctgttttgtaaaggtttataggttttctgttctagccgcatttctcatcaataattttctcatttttctctttgcagataatgaaattagttcaatttgcaggcttgatcaaatgaaagaattgaacacgattggtattactatgcattatctgttattcattttagctccctctctctctctctctctctctctctctctctgcttattcttgaaatgagagtaaaacattaaatagctactgtaatgatagcaaaatcaatctgtagttaatgacaaaatttgaaccctgaaaacattttagaagcatcctttatttggttaagaactttgcgttcgcctttgcgttctaagtgctaaaacaagtcaactggtttttgtggtgtcaaatgatgttgatagagtagagtatcattgatgatatga

SEQ ID NO: 17844 - DNA, 8480 bp, Cannabis sativa
  modified_base (27)..(29): a, c, t, g, unknown or other
actaatcagattgtaaagagttttatnnngggcataaaacctaacagaagcttgctctgataataggttgaagtgtgctgacctgttgggtcgcatggttcattggttggagatatctcgtttgaatgatttgtatatggacctgctgtagtggaggatgctgactctcgagtgtcttcttattttggtacccatgtggaggagatggttcatctcctccatagaagctatgggaagtgtgacatggaattgtaaagggttggggcaaacctctaaagttcttgagcggaaagtccctaatttttaaagagcagcagatacccagcaggagccacactgctatatataccattgaaaagtcgattttttttttagacacttaccaccatttttctcacagccaccttcatagcaacaccattggagttgcacaaatgtcaagaaattggttggtcattcttttgacattattattttatcaataaatgatgaaattgatcattgtgaagagttagtaaactaaaaatctgtagtctacaattccctttttgggcatacgcgagatggaaaccttcacaatgaacacaagcaaaaacttaaaatgtctgaaaatatgtaagttctaccattcaaacttcattccactggaacattgcataatgggaggaaagaatcatacaactcggacaataacgtctggacacaaaggggcagcaaacaaacacacatatcacccttcctacaacactaaaaaaaaacatatatttatcaaggcaccacagtaccaaactgaccaaaaaaaaataataataatctaggtctccctccaaactattttcctttcctttcccttttagttatgtactctcttctctcttctctctctcactctaactctttgtttgttacatcattaatcagattttacatggctagtgcagaccttgtgatcttgaccccagggattcttcaaacaaatatgtcagcaggctgtatacaacgtagaaatccaaaacttgagcctgacattacataataggcagcagcaagatgatgcttatagcctaaacaggataagtgaggcttcctcctttgtattttttacccaaatgggtttcctccaacagatggaaaaggagtcggggtagcaggtgcagaaaatctaccagcaatctgttgatccacatttaatgagccaaaagctgcaccctctacaacaccacctccaaatgcttgattcctgcaagtcagttcaatcagggtattaagattttaaaaatattaacttgaacaagttactcatttaaaccaaaaagtgttaaaatggacactcgattatctctcttaaattcactatttcattgtgcagtcttgtcagtttctaactttcaactgaaaagaaatatgtaattgctagagtagttaccctgaaggtggcatgttaggaacttgttgccccatgtaggcccctgatattcaaaaacagaattcagctcaaagggggaaaaaacaaaggattgggagggtaagcaatactgaagggaaaaaaactaaaaaaaaaacccatgaaaaaagaaaagaggatggttttacttggtggcagtgctgatccatattgaggagcagcttgaggaggaaatgctggtgcatatgattggggcatccatgcagacggtggtgcaccaagactggaagtgcgcattaagcccgattgtggcatgccagatggattcagcacatttggtagagcaccttgcaagggttgcatggaaggaaactgcagcaaaagaaacacagtttacgaaagctataacataagacaaccaactgattgcaacataaagcagaaattgtaaatcttactgtttggccttgaacaggaggaggttcactgctcagatcaaatggatttgttgattttgtcgactgctggaaagtatgcatgggctgtaaaatgaacaaatattgaaactcctattcgccattgtcgttaacaaccacttaactaaaaaagaaccaaaaaagctaaaagtatagggcatgacaataccactgccgtattatattgtgtggggaaccccataccaccaggttgaccagtttgccacccaggagctggtgcccggtaggctggatagtttacagtaaagagatcctacaaaaaatacagaatttttaatacaaattcacagatataaaagagaaaacacccaaagcaaaaactgtcaaagacaaatacctctggcaatgccatccttccacttgattttacatcagcagcagaagattgtgatacaacagcagaattgatgtcatgggcaggttgcaaaacagccgggggtgcctgtgctgttaagttattaggcaacccttgtgcattaggggcaggcgataaattccatggctgtcaacgatccaacgagaaacaaaatgaaaaactgctccacttttcaaatatatcatcaaaatcaaagagaaaacaccaaaagcctcacctgaaagctagaaggtccagtaacaggttgttgaaattgctgaccacttaactgattaccagcaacagggaaaagggaaggctgttgttgttgttgcatattaggccactgcatagcactgggcacattgacaagagtgttactaccattgactggaaatactggtgttgatacaggggcagcaactgaaacaccatccagaggagatactaacaagttgttcactagaatatacatagaagcatcggtgatagggagcgttaatttcagcagtgcagaaaagagaaataatcactaaacagcaatattatcatgttaccagaagctgtcacagtagcagtgttggccggtgcaacagaattatgaggaacaggtgcatgaacagacaattgtgatagtacagactccagtggattcacattaggagcttgagacacatttgcctgagggaatgcatcaaacgaggcccagttgttgtcactgattgcatttgcaggctgtgaaatggactgagatatagctggttgttgctcaggtgcggctgatgcaataggaggttcaggatcagcatcaaaatcaattaaacttcgagaagtctccacttttacttccacggggttgttcccactggctgatcccaaactactggaggatgcagttctctgaaattaacaaatcagccaatcaccactatttgatttaaatttgaaatttttaatagagagaggcctaaatcaaattagtatacaagcatctaagaaacagaatgagtacagactcaaggaggagacataaagcctttaattgctagcagacagaaaaatatagtactagaaactggtacagctacgtactatatttatatacttagattgataatagtatccaaagaaaaaaacagtttcatatacttagctaactcaattatcttgaaaaaactaaggcattatatacaacctgcctagatagagaagccatcaaattttaatgaataaattaaaagaaaaaaaacaactactgatgtaataatgtattttcatcaatatagtaaaaacatcttctgttaaaagaagtctcacctgagtctgtgcagggacatcagaagtcctggcagtaggttttggaggctcactaatacggagaggtattgtattctcccctaaaatctccctaacaggccttaccacaggcggactggaggcccctacatcttttggtcgttcaggagatctaccttccagctttagatcaccttcagacattctcctatcgtcttgtctccttccattaccaaacctgtcatcccggcgccaatcattaacaatttcaggacggacaggactctttctaaaatcaccatactgccgactttcttgatcataaccaggacttcttcgcccctcataacttcttgctccagggcttgatctctcattataacgacggtcattatcctcataaggtggacttctagaccctccttgatatgaatctgttctcctgctttcatataattcttccttctccccctgtacaatatacatttaaaaaaggatataaggatacttcaccttaaacccatccacccacacacaatattaaaatatacaaatatatgcttaagtgcaaaatagtgaaatagaccatttaaagcacttctagttctagcaatatttacatgtgatctcaacactaaaggaaacaataagcttacctttactctaggaggtctgtccaagttcctttcaccattatatcttctatccacataaacatgcttaataaaatctctaagcctctcaacattactgtaaacaagagcatggtgaacaatgagcatcaaattgaaatggagtcattacttaaaaaaattgcagttgcattaaaacctgctgtctgggaaagaattccgctgtgggtcccattctttcaggtaaatctcttttgcacgctgtcaatgggaaacagagataagccatgtgcaataaaaggagaaagatgggaaaaagatcccaacagctggggaaaacacatgcatcttaccttgtttcccccttcttgaagagcattaacttcttgtgatgtaaatttagccattgatactgatttcactctgtgtgtgaactctcggctgaaagtttaacataaataaacaatataaaccacaccttgttcacatctataaaaaaagcaaattttaacagcaaaggacagaacttactgtattccactgcaggttgtgcaaataaacgtccagaaattagtgcaaacatattggggtccctgtttaacataaagaagtaagcaatattgtgatagaaaaagaaacaactatcataagaaagatgtggacaacagttgttacagtttctaaaattcctactttaagccgttaagaaactctttattacatgaagatccataaccattgctcagcagcctaaaatgcaaaatccaataaaaaatttttatggtgctccaattactaaatttcaatagcatagttataaatctaagagagaaatccttcagcattaattctcagtacataatatatttccatggtgaattgtttgataagcaacgaagctttctcttcaggataaccttatccacctttcttattttgttcattaatattgtttttgttccttctattacaaaattgataacgaacaaagccactgagatcgtgcccctacatatttctgttatggcattgatgataattcaaatggggtcaacatagtccagaggctttattaaatcatcatcaccaagggttatctgggtttgagaattcaaaaggtaccacttgtgtctgagtgtgttgtgcgtgtgtctatatacaaagcagatgcttgtaaaaattgttgccagtgccattggaggttatatagaattagattttatgaggtgccatttcgttcatcattctgttaaatcagtagttttcctattcagtaaaatttaaatgaaactggtgaatctaactcaactagaaacccatattaggacgtccttcatttttgtgcggataaacaaatacaaaaacaagccaacaaacacaaattaaaataatttaattcactaagaaatggacaagcttatcaaagaaaacgaaatgggcaataccccataatctagttgttcggacattcaatgtaacgttactatgcataattgaaagaagcacattccaaacatgcaagaagaagcagaaatatacggctacaacatataaaaatgaagcttaaaaagacatagataaaaaagaagagataaatatcgtaccaaactattacagttaatgcatctacgattctcggcaagtttgagcagtccacgaataattcgttcattcttttcatcctccttcactcgactcgccatttccccactgccaattccaaagaacaccatagttatgtaaagaaaaaaaaaataacactaatcacaacaaccgaaataaaaaagctaggtcacagaatcttttttcccaaataatttacgcaatttcagtttcttcaaaatccaaaagttatatgccaccaataccaattacgccattgaaattcaacgcttgcacattgatttaattttgagaaaaagaaaaaaaaaaaacttaatacatacacaacttaacaaattattgtctacatttcctcgtcaatcgaaggagggaccacaactcgaataacaacaaactaattaaaactcacgatccaagaaagaaaacaataaaatgaacgaaattaatcaagaaacgccgtgattggaagccaagaaaatcgaagagaaaaaaaaaagaaataaatattgacatatatagagaagttacctggatttgctgcagacggagaggttggtctaccgctgcagccttctagctgacgacgttgacaagaagatgatcctacagctcacgcgcttcgcgtatcgctagagatagagagagagagagttgcagatccttaaggggctgataacaatggcttttgtacagctcagagcttaaccaaagtctgcttttcctaaaatgtagagagagagagaagggttgggttgagttattttggttttgggtttagggaatgttagggtgttgtgggacacaggataggtattctgttgccgagactataaataaaatattaatcctaatttcacgtaattggtcaagacgaatctcacattctcataatgacagtccacggtcgcagtaggcgacttgctttgctttatcagtacttactaaccaagtttttaaacaccctttattttcatatttaattaccaacccaaaaatgttacaattgtatcggttttcgcagtgcaagtagtgcgggttgtaatatttttttaaaccaaatgtaaattttataatttttcaatttgtaattgcattttaagaatctgtaaaattatactgcaaaaatatagtgtaatttgaataatttgcactattattattattaaatattataattaaaattttaaaatcaatctaataaagttttaataatatgtatcaaaaaatcttattaagattttaattttataacatatatattaatcatcaaattattatattaaattgtctaaaaaaaataatataatatacacatatatttatctttatataaaaaataaaataaaaattatattataaaaattagtaattttataatatatagtgtagtctaatttaaataacaattattaaatttaaaaaattaaaactataatttttaatttcaaaaagatttcaaactgtattttatatacagtaatttgtcaagtgtgaagaatttgatcaacattcttaattaatacactactatattagaggaccatcatcgctattattattaattataatagacaaatactcacatgtatacatctgtatattttatattttaaatatacaaaaaaattcgtctttattataaaaaggaagggataccattagatatgaggtggttttactaattccctatattattatttggcctcttcctcatttccatatctctagaagtttctcctttctagttgtaattttttagtatttatatatatatgaaatgaaaaatcaaacataaaatttattaaaaattgcagcttcgacaaagattgtagttatgtcatgaattgtaccaatttccaactaaggtcatgttactatatacgcttttgtacaccatattaacgatctcctacatttaaacaatatttcaaaaagtttatttcctcaaaaaaaaaaacaatatttcaaaaaaatatatattatatatattcatcatttgtctcatcttttacttatactattagcgagaataattatggaactcattttgtagccgaagcagtctaaaatggtaatatttgtgctatttgaaatacgaaaattcaccctttcaaaaaaaaaaaaaaaaaaagaaatacgaaaattcattttattgtgaaaaattctattttaacgtattcctctattacattgcaattgtttctgtttattttatttatttatttatgtttttattttatggaagtaatcatgtctggtttgttaatgactatatcctttaaaaaaaatctcctacatttgatttttagaagctttgaaatttataggcagaaaactaaaagtataatgatacttttatttttagatataaaataaatgataaagaattctcaattattatcttaaaatcattttgtatatatatatatatatactaagcgtggagacatgtcataggcacgtaatcccgttaaaaaatttggattataattatatatcttacttttataaagtatatttaaacaattgttaaaaaaagttatgtttaaacaagaacatagtgtggtataggactatagattaacttattgaaactaagatcattagttattatgtctaaatataaatccatgtgatttattctactattatctattaataagcaaagttta

SEQ ID NO: 17845 - DNA, 2418 bp, Cannabis sativa
gagggtgatattgaggaagttgacgaagagaaagagaaggatacgaaaaagaagaagaaagttaaggaggttagccatgagtggcaactcatcaataagcagaaaccaatttggttgagaaagcctgaggaaatcactaaggatgagtatgcatcgttttacaagagcatcaccaatgattgggaggaccatcttgctgttaagcacttctccgttgaaggtcagcttgaattcaaggccatcctttttgtccccaagagagcgccttttgatctttttgacaccaggaagaagatgaacaacatcaagctttatgtccgcagagtgttcatcatggacaactgtgaagagctcattcccgagtaccttggattcattaagggcgttgttgactccgacgatctgcctctcaacatctcccgtgaaatgcttcaacaaaacaagattctcaaggtgataagaaagaaccttgttaagaagtgtattgagatgtttaatgagattgctgagaacaaagaggactatgccaagttctacgatgctttttcgaagaaccttaagttgggtatccatgaggacagtcagaacagggctaagctggctgatttgctaaggtaccactcaactaagagtggagatgagatgacgagcttgaaggactacgtcacaaggatgaaggaagggcagaaagatatcttctacatcactggtgaaagcaagaaagcggtggagaattcaccattcttggagagacttaagaagagaggttatgaggttctctacatggttgatgccatcgatgagtatgcagttgggcaattgaaggaatatgatggaaaaaagcttgtgtcagcgacaaaggaggggcttaaattggatgacgaaactgaggaagagaagaagaaaagggaggagaagaagaaatcttttgagaacctttgcaaaacaatcaaggacattttgggtgacaaggtggagaaagttgttgtatcagacaggattgtggattcaccttgttgtttggtgacaggtgaatatggttggacagccaacatggaaagaatcatgaaggctcaggctttaagggatagcagcatgagctcttacatgtcgagcaagaaaacaatggagattaaccccgacaatggtatcatggaggagctgagaaagagggccgaggctgataagaatgacaagtctgtgaaggacttggtgctcctactcttcgagactgctctgctaacatctggtttcagcctcgacgatccgaacacatttgctgcaagaatccatagaatgctgaagcttggtctgagcattgatgaggaagaagtggagggtgatgaagttgagatgccaccattggaggaggatggaaacgaggagagcaaaatggaggaagtcgactgaatagcctgtcagtaaattttgagttacgagtcatgggtcaatgttaagtgtctagttatgggaatttcggtgtgtgttttttgcttttacttttctttaggggtctaatgtgtatgtctgtttatatccctttgtgattacctaattttgttattaatacaaaggcattattctgttttcaagatcgatcacactccaaattatgaaacgctgatggataagtctagtgaatacacgtatcagtggcgatttttaatccaacattttttctgaaagaagaaacaaaagagggagtttttccagcttttagattattccgtacaaccttattagcattcggtttacctttgaccgatcttaacgacgggcctcagattcaagtgttttttagtgttcaaatccacatttaaggtaatttctgtcgatacaagtctcaggttctttgatagaaattactcttacgtgtctgtctcataattgttcttgtataaatacaaacaaatttagatttactggatataatataaggatactgctgaaatagatgaagtaaaatgaagaaggaaaaaacaggattagcaagataatgataattttattctagttaaatgtgtagtatagagaggcaatcaaaccttttattctgtgacattgcctagtggagaatcctaagatctcaatcaaaacctttttatgatttcatgtgtagtccaagtcaaattccaatggctgttgatgattggttttcgaagaccttttcttgcatataataaagattatattagcatcacgggcatattagtgcagctaaggtttgggtaagataggggcatatgctattatataggagataggttaattgagagagagagagaaatgcacttatatttagatatcaatttcgacttaaaaatgtatatacagtagaacctcctatttaagaatactctattcaagaataacttctaatttgttataaaaaataagtctcaatttgggccagttata

SEQ ID NO: 17846 - DNA, 3489 bp, Cannabis sativa
aggcttcttgaactcaacaatttcttaagttgtgcttttcaacagtctatctagaattacctctctatgtggaaacttctaaactccaattcatatgaatggtgaaaataatctctagtatttttcttcttcatttttctagataaataaattatcccgtaagaatgtgaaggaaaacacaaatcgatcgtcttttcatgctctcttcttggtagaacagatgctacttcccctctccaaaaagttcattttctcaatcatgatgatcccatgacaagtttgaaatgccatgaaatattgatgatttgtatgtttgcatgtttgtacatactcattgccatgaaatattgatgactataaactatatatttacttaccttttttgcttcctggacttgattataggtgtttagattattgcgatacgattctcgtttcaatgttggttttggcagcaatacctgttgtaagttctactccctgattttgcctcaaatgtcatggaaaaagaaaatcttggagtacaattttagttggggatgaagaaagatagttcagttttaattgtttctttattcacttggtacttcggttagaaaaaaattgttatagtaatattcaaattttggaaattagaaagtctgcttctttgtaattcattgcaattcttgttagctaaagtttgttttatagtcttttcactatatttgtagttgtaacacatcattagcaccaccaatcacacatggaaaatttgttagtcactagaaatacttaggatgtttgtgtaattagaaataatcacaacagccatatcagccccaccaataacacaatcagcacaagaataagagcccggtggacaatctgattcgcagatcgtttaataagaacaacaatcacataacaatgatcaaagatctatgcatgaaccacattagcacaatctgattcttcttactcgtcacctctacaatttcaacactgacttgaaccgcctctagatatgaactagactgatctcgagcaaccatttttaaatgtagtctcgtcaacatttactttgattcatccatcattaggtttggactactgctgctcgaacaccatcactacaccgaacagtagcaatggaagaagagatgctcacgcaacatcacacacactagcaacagtaagaattttttaattctacactaaatcgtttctaccaacacatcatgcctaccattgaagctcagatcctaatcagtccttgcatacattttgaaaccaagctccaaatgatctttcaatgatgaatagagtcattttgaagatttaggactcttacctattttattcgtggcacttgccactgctccccattatgtcgaaaatgttgctttaatcctagatctatgtataattttcctctcagatgatctcagagaaagaacaattccaactccatcgtcgtctattaccagtttcgtaactatcgcacgtagcaactcttggcaaagaacagagtgatcctttgcttcttgttctatatccaaacattgtagttcctcaatcccgattaactcatctatttcctttttttaattagatcttaagaacttggtcttttctttttggcccccctctttgtcacttgaatcttagtagagttttttctcaacctttgtctcccggccatggctaaaccctatcagagcagaattagagagaaacaagaatgttaacttagcaaaatgcacatttaatgttccatttatttctctcacaatactagagcactcctaacaatttttatactttatcttttaaaatacatcaccaaaattctactttctctaatttacaacatactcttacattacatcatgcattagtttctttaaaatatattaccaaaatctcatttttttttaatattttattatattttatttattttaaatatataatattaatgtatacacatatctctatacaaaaataattattaatactcaaaacaattaataaaatatgtttggagcaatgaataatagtgtgttttaaaaaaactttaaaacgatgaagaagtttagagtatttgttatagcatgtttttagtacggttctttatgagagtgctctatctttaaaataaaaagtagaattgttagagcactctcatcagtttctctactctatcattcaaaatacatcaccaaaactccattattttgattttatctctaacttttacattacaccatacattagttttttttaaaatacattactaaaattttactatttttttcttcaaattttaatatattttatttatttcaaacatataatattaatatatacacaaattttcgtttaaaaataaaactgaaactccaaataattaataaaatatgtttagagctataaataatattttttaaatgtagagcgtgaatagtaaattttaaagaaattttaaaatgaaagagttcaaagcattgatgtagcgtgtttttaatatggttctttaaaatatttaaaaaatttctatgtaagagaagttgttgtgaatgctctaacatttttcaagaatgttattataaatatattatttattttcattataaattgtataaatttatttactttaattttttattttttttaaaaaagatagcattaatgtcattgtacgacattaatataaattcttagaatgacatccatttttctctaatggtatatcaatctcatttttccaactaagctatccacgtgagtaagtattcttcgaaatttaaccatttaaagggcatcacccatagttgccaaaatacacacctcatcctaaatattgtgttttttattattattttatctctcatctacataaaattcgacacattttcttacaaaaattactctaatggtggacaactccaaaaattgtctagcatggtccttcataccactttttaattaaattttataattatatatttctctaaaaaattagttgatgataaagtaattttttttgtaagaaaataaataaacaatactacatgatcaatcctcattttagataatgatgttcctaaagttggtttgaaatgttaatcaaaatgcacatgtgttaaagactactttattggtaattactattggaggtgatctccaataggaatagtatttatagttgtcaaaatacacatatcattttaaaatattagtatttttattttcactctcatttacataaaatttgtcacatttttttcaataaaaaaattaaaaaaaaaatgtcatgtgcccattgtttatattaagcaacaatttacataaaattagtcttaaaaagtgaaccacattgcctacgtggcaagaccactccaatgggtaacccccattggagatgctctaataagtagaagaaacttgctagctaagagcattattggtgcttaataccctcgttgcggtgtcatcacgttatta

SEQ ID NO: 17847 - DNA, 15347 bp, Cannabis sativa
  modified_base (12436)..(12439): a, c, t, g, unknown or other
acgtatgttttatcttttcatttaaatacctacatctttacggtagatttaacttagcacattggaaataataccagggttgttcttcacatcggttaagtcatctttaattggctttatgcagattttgcatataaataatggtgctgtggaacttgaagcatctatcatgggtacccaacaagagggaaagaagatcaaagttccacttaattcaaggtgagatattgctcctttttggtttattttgtaatacaacagaaagaaatcctgctttgtatatcagacattggttgcagcagtgatgaagtcttttctccatttcctgctgctgtttccatttctttatgagttgtattgctgctataagaattgtggctttatatctggattaatgcttctaaaagatgtaactctttcatttagtgtatagtatagatggattatatgtcataatttgatgtaccttactctgtttgtctgatgaggtgcagaagttgtcctcacttttgttattgttgccagaccagaaacctcaccacaaatttatacatctagaaacctgactatgatattcatgaaatttttaagtgtgatccaagtttttttcaattgaaacccatgggtatctggaccccaccccaactaatcccacagggaataccatcatgcttcagtgccaggtccaagtctaaggggacatcaggaaattagtgtagtggctgggttcaaacttgagagttctgcctaagaattagtgtagtgaccccaagattttttgttgtgctcatttcattttctcattctctgagaatacttttgaagatccatattattatattaagtagttgattgcacggccaaggttgacaaaaaattaaataattagtaatttggattaatgttcagtcttccaatttctattcttcatcattttctctagcctttcattattgatttactctctttgttaaaattttagcgacaagctctttaaggagatacgggatctgaactttgaagttgttgtccaggttcatcttttcttagcagattatgtttttcattgttcatttctctttcccaaatcctcatttaagtgtccattttactgtataattcctttaaagtgccaacatcttagttgctatctgcagtttgattgcagattctgcgtcaaaaagcaacatccatgaagcaggactacacagaaatgacaaccactgtgagtgaatgccacaatctttcacagtaaaatattttgtctttgttattagttctaatggacttatatctataatgttttacagaaccagtctgtttctgaattgaaggacttcgtcaaaaaactgaactctttgccagagatgactgtatgtatttttcagttggtgaaaattgattattttttttgccaccattgtttttctaaatttgtttccatttgtggctttagagacacataaatcttgctcagcacctgtcaactttcacctcaaagccatcattcttggggcaacttgacatggaacacacacttgttgagggtcagagttacgacatgtaagctgattttttcttgctatttaaaacgttatgtgtggatatgtctggtaattctacacagctttgtagtcataataatttatgctgtcatggtggtagttttcttatctcgagcttactttttgtttgttcttcattgcacattgaaagctaagttactgaagttgatgaatgcagatgtcttgagtatattgaagaaatgatccataagcaagaaccactgataaatgtcctccgccttctcatcttattttctgtaacaaattcagggctgcctaagaagcattttgactatttgaggcaagaaagacgtttaccatcatcaattttaatttgactccaactgtttaaagttttatagatttgcagctgtgatagtttttactcaattgatctgacgtggttcataaatattggtttaggagagagctcctccacagttatggatttgagcacatgggcacattaaataacttggaaaaagctggattgtttaaaaagcaggtttgctcttaccgacactgatcatttctgtagtgaaattccatagtagtaagccaagtaaaatgtaaattatttcaattataatttatatttacttatttgataagatgaagttttaattgtctgaacctggcaggaggccaaaagcaattggcagacaataaaacgtgctctacaacttgtcgttgaagataccgacacagccaagtatttcttatcatttgcactacatgatcctttttactaaaataagtagtgttgtttcattttaaaaattgcaccacatgatccagttccttgagaaagtttcccttctttatgttggctcacagtctgtaattcataaacatattgtgttacattctttttgcagttgaaatatccattttaatttactcatcatgattactttttactgtttgatggcacttgcaagtttgcattcaagagcaaatcgattgttttttttcctttccaattacttgaatgcttgaatattcatagtaggcacgtcataacctttttcaagtagaagtagtttattttttctgctagttttcaagttgtgcatccactttttagaaatttcttactgtggattgtccttgtttggtttagaaagtaaagacttaaaccaaaaggctagaaaagattattcacttgagctcaattttcagtagaaaattgtatgtctgtgtcggtcactgctagttgcacattctttctattctttctattactgtgtaatcattgtgactaccttatctccttcaatggtttgcatttataatatgttcttattgttccttgtgtcttgctcgctaacctattataataatttgatattgtaacagccccaacgatattgcctatgtattttctgggtatgcacctcttagtattcggcttgtacaacatgctgttcggtctggatggtgaggcttatgtttttagctgccatgaaacattcttattagtttgttagattccaactattatcattttagaatgcaactgctgattttattatatttcttggaaagtttgaatcattaaaactgattacagcatataactctagcattttgtgcttccatttgttaaaatctcggcaaataaacaatttcaatactattgcacagttcaaaacataatatattaagtttaaatgtaattactgatgctaaatcactcaacatagccctacaatataaagcattcatcaagtcaacatttcccgaggtgattctcttgttaaagaattgtggggtctactggtcaaaatgaggttttgagtttgagattgtaatagacatttaatgttcagagaaaagaaaaagaaaactctggcattagatccctgttctttcaaaatcttttgcactaacttaatctgaaaattctgtactatgattccatcttctttactgacctttgtggatattgttcatagttaggttgctattttagaattgttgctaatcagttgatgttccttgtatttcatatttgcttagcttcaaccaaattttgttgtacttgggtacatgacttgttccctttcttctttggctacaggcgtcctatagatgaaatcttgaagctgttgcctggacctcattcagaagcaaagagggtctgttgaacactctctctcttctataattttgttttgggtgtgggggggccggggtgatcttttgttttcatttactcgaactatgctccctattttctgaagcagtctttatctctttttcttttttgatttgctttctgaatatttgtttatcctacttattgcgcagggtagattctcaggtagttcatcatttgacaatctgcaaggtgcttcagctagcacagataagtatgtctaaattattgtttttttttaataattttttttaatgattggcatacgctgtttgtaatgtgtatatatatataaatgtctaaattatgtttcaagttgaggttttcaactaaatcagttgttatcaatcatttgtttgttttgccctttttcctgttttgatgagataaatttcaaatgcaattatatcttcatttttaattgttcctaaatttattagcagagtggctgatggaaggcgctcccttgtacttgtcgtcttcattggaggagtgacatttgcggagatctccgctcttcgatttctcagttctcaggtaattaatagtatattgttttatctaacattattaccaaaaagaagaaaaaaaaaaaacaggtagtttttactgctttgcctgaaattcctgaaaatgtttagtataacatggaattaaatccattttccaacttggtacacttggaaattttcattgtctaccgagcatatatgtgttgtcaaggtagtttgaaagacattgtaaccacaactatataatgtgtatatcaaagtattctaacaatctcttgatttatgacttagagcatcaacattgagtgccattttttttttttcttttccaattctctcaaacatctttgccattgtgctattaaatgattatattgtttcttttcccttaattttacaaaaatggtctgttgagcttattatgtgaaggttctgaccatattcaaagtatgaggttgattaataccaaggctatcagaaccactgtttttaagtgacttagatatcttgtccaatcagtcataactatgttctttctatattagtacatgcatactttttgttgttaccggtgtataaaggagttttacctattacaggaagggatggcatacgatttgattatcggtacaacgaagcttgtcagtggccactccttgaccgaagcatttgttgagaagttgggttaacttgtaagtaaaatcctttttgtcaagagaagctgaattctggccactggtgaaggacttcaagtctctgtaacaatgatgcttaatttattttctttacgtaaggttaactccaatttagtagtgcataaatatttctaatagttggggaacaaatctcagccattgagggcatctcttgttggagtggacaaatgggtttagtcaagttttgaagtggaattttttgcagaagaagtcaagattgaaactaagggctagagcttgtggagagctgcttccactagctttacttggaaaaaaaatgttggtctcttatttattctcatggagggatttgtgtgtgtggtgtccttgggtttattgttgacataaatcagactattgatggttgtggcaattttaattctaagttattaagattgattgcgtaccactttggtactgactcatgttttgaaccctttatttataagtgtgcaaaatatgttaacaagttgaagtttggtgtagactctccaattgattttgctttccttaacaacaaccgaaaaagtttggatgtctcaagaaaatctgcatttctgttattattcttttaacattctttattatatcggtcaaagatggacaaatgtgatttcctgatctaatcaagttgttgttccttgtattatattgtattattggagtatgtaatggtgctcattaaagttattttaccaaattaaggtttgaatttttattaatgagaattagacgtggtcagtgtcttaaactgcataggaaccattttgctgataatttcaacttgttctttgtatatgggattaggatttaaaatttagaacctaaacgtcgagtctcaaacatgtttaagacatacgtaattaccaaagatatacttaattaccaatcatattatgtgtgaagagaggatgctattgtcaacctctcataaataaatgttggaatattttttatttcttttgtagtccagttacaatatcaaacatgtaaatttttaaaaaattataaataatttacagtattaataaagttgttgagattaagtttactatgtttaaaaaattactataaactatttagaattttataaaattttataatattataactataatgattcatgaatagcattataaaagaaatattttttcaacatgtaattttagatgcgaaaattaactaattagcactctaaaattagttcattgggtcaatcatttctttaatttgttggaccgcattgaatgtttgccaaacttttatgatcattctcaactactaatgagctgacaagatatgaatcctggaagcatttacaccctcaatctcaatccttattcaacaacagcattcatattatcatccaccataagaaaatgttgactttgacttttctctttctgtctaattcaggcatgaattttctgacttctaagattgattacaaacctgctattaaattacatgttataactgagaaagcaaaataaatacatttcacagtaattcaaaattcaaaaactcaatgcaacttttttttttccgtttcaaagctttacaatagcaccaacaaactatacagtaagaaaattctttacagttcaaaactcagtttcccatcctgatggaagaataatgaaaataaattaactattcaggaatatctgtatattgtgatgatttgctaaatacttacagccacagagagcagaggagggaatctttcatggaataatttcgaaccctctgattaattccacctcaaaagccaccaacttcattaatccctttgtacaagttgacacttagttcaaacgcttaaagtcatattccaaaaaatataataatctgagacctacactctttcagacaaccggcaccaaatggtttaatcacattaattgtggattaactatcactttccatcttttgaaagtgctctaaaatgctatttgcctttctcttggccctttcagtgccattctccgacaattcctttaatgcctcttctgcaccaagctctttggcaactttcaactgctgcaaatcacctgtgcataatgaccacaatacagcagctgcattctctcgattacgtggggaacctgttcttgtaacctcaaccagaacagggataggcccagcttgaccaattgccgtcttcccttcttgatggctggcaagaatagccagaattgctagagcctcatcaaccattccgccccccgcatccttcagcaagctcatcagtggggacacaataccagcccttacagcccgagccttgtttccctgatagatcgaaagattaaaaatagcagtggcagcatccttttttcctctaggagtgccctcacacagcaattttataagtgctgggattgcaccagctgctcctatagcaaccttattctcatctataacagataaactgaagagggtcgcagctgcattttctctagcctccatgctcccatttttcaacacatctactatatcaggtatagctcctgcatttacaatggttcctttgtttgcatcatttattgagaggttaagaagtgctgtaacagcatgctcctgtgttcgagggtcagaggaggagagcagttcaacaaggagaggaatggctcccgcctcagcaatgcatattctattatctgcatttctttttgccaacagacggagttcaccagctgctgctctttgttgttctggatccccaattgctagtttttgtaataaaccttcaatggcggcccgatcaaagtctgaaatagaacttcctgatttcttgcttctacaagtttctcgtgttttcggcaactcaacaccattgctctcacaccacaaagatatcaaacttttcaggacgtaattaggtgttaacgctgtgtgcataagcgtcagctgtgtcttgggacatgttttatgccctgcatttatccacttttgaatacaggatctttcatatgtctgcaaaaagattagataattaaagcaaaattattgtcaatacacatgctataatctgtgaaggcaatggcctgatattattacctgtccagtggagacaataacagggtctttcatcaattcaagcgatatagggcacctaaaatcatctggaataacaggagatctgtgcttaaccaagtccgtatcactttcagggggatcatttgctgggttctctgatagtacatactccattaatttgttaagcaatgatgacatcttttgaaatgagtcccctggattttcatcacttgtgataaacatttcatggaaagcaaccgactctcttttaaggtcattgatcgtcatcagatgcagcttgtcagtaagccttttcagaattacagggtcagggtcgtcttctttctctgctatgattaaatccttatccaactgtgagtcgagtgattcagttctctctttagctcttgtgaattgagaatgtacaagttcaatctgaaacaaattaaattacaattacacattccttagttacttgaaaatagtaaaaggtgattcaatgtacattatgaaatgacaatacttgaaagtataaactctatttggttgcagaattacctgttcttgaacttcatccgatatagctaatttcttgtaaggaatctcacacaatgctgcttcaatttgttccgtcacattgcggaacttgtttgcaacctcatctcgtttgaaagccttttagcataatttttcataaaataaaaaagtgcttataagatagagtaacataaaagaatatgtcaaaataacaagtataaataatggttaaatgttgtattcaagctctgtctacattcaattatatttgccaagcaatttagtgttacaagttacaacaatatactactccacctcatgatcaaaatcaaatgtttacaccataatagaggagaaaaatattctaaatatacagataataaaagataattttttctcatgtcacaaaaactttatttctgttcattggatgataattcattgaaagccattgcattctaatctgtaaataaataatctaaagccgtagcaattctacagcaccagtcacaaatatcccacaaaaaagctcaggcctttggctatgattgtttgctcagaacgaaaaacaaaaaatctataaaagagacaatattaatacctgataaatcttgctgccatggttagttgagttgagaagctccttagtagaaaccaaagcgattctcagagtttccaatgatttcaattcttcttcggccagggctttatcgctgtccctcaattcctcaaacagaggactcagaagcttcactctccgtaccaaatccccggttgtctttttgaacacgttccggcaatcggacaactccgatatcgccttcaccgagtccacgagttgattcagtaccgagttcctcaactcttcttcccgcaaacccatctgggtggcctccagtttagctcgaaactgggaaaaatcaatcctttagaatcagaaaattggggttcagaatttgacgaatcgaaccaaataaaatggaaacggagaattgggattttgccggtaagactagatatgagaagggtataattggaaaatgaaatataccatgtaaatgcaggcggaaaagcttggtttttcgttggaaaggagaagagaaaggttgaagttttgggtttggggtcaagaagaattagctgtggttttatcaaacaaaattttaaaattaataaaataaaacgctacttcattttggttatttataatataatcatttatttatttattttatattttattattaaattttcatcagcatattttacattttaaatatcaataattgggttggaacttggaagtccgtaataaaagaatagttaccaaataaataccaagtcattggtttggtttaaagttgaccttttatatgggagaatttggaggaggaataaaatgatatcattactgacctatattaatatatttgtgacaattcagtcctcacaacaaataaagttattattgttattttttggtgtagcagtgaaaagtttccatgagtttttaatacatggaaatattaagttatctaagtcaaaattatctaaggaaagatgagtaacaatataaattggacatcactgttagtggtttgatgtgacattaattaagttacttagatgagtttgaaattttgttgtatactatgtctaactttactctctgatcattttaaataaatattttttttaatgggaggccaatttattttattttaattgattttttcatatagaccaaatcaatagattaaagaaaataagtaaagagtaagtataatattataatttataatagatataatttaaatgatacgctagtgtattatttgtagagtataaacatatcataattgtattttatccaaaccaaaagctttatcctagacattacgaaaggacaaagataggtgttagtagctgttctattcataatcttctgcagataattatgcttgttttttgctttttgtttaatttataactttaactatacatctatatagaagtcagtctctcatttctttttatttatatatatatattgatttatagatagagaagaaaagaaaaaattagaagttctcctctcaaacaattagaataattatcactgtttgataattcatttaattttcctattttttgataaaacagtaaatatatacgtttttttaaggaaaaatacaaaaatctactcatataaaaacaaacaacgtatatattatttatttatttggaaaaggatattttggaccttaccgcgtcctcaccagaacagcggggtaccttcccgcgcacaatcatgattttcgatttcttaacggttttgatctctaaaccaatcagctcagctcagctcaatctcagaagccgagtcacgcttgactccacctatatatacctgtcgtcgactacttaaaatattaataattaattatgatttttttccttttatttaaggaaattctgttttattatttttaaaatcttaaaaagtaataaaaacatctagtggtgaggtgagccaacaagaagagaattaacagtagccgccgccgccgctgcatgggattgagtgagtgaagaacgcgttgagattaggtggcgtgggttggtgggtggttgttttggttgccggcgggcgcgtaatgacgtggagtgtctgaggtactgacgtggaagccacgtgtattaagtgggcctcacatagattttgtagctgtagtgcaatgccaatatcccattgccagccaacccctactggtttggtgaaaggttgacataaattatttatataaaaatatatctatttaatctcattatgtatactatttctcaaaagcaaccattttttaatatttgtataacatacatacgtacgtatgcatatttatattttaggataatgattgatgaccaaaagttgatactcgaagataataaaataaaattttactaattgtgcatgtggatgacttttaccatatggttggttgagagaaaagaaaatctaaggtgaatccaatgtcttaattaatgtggttttgttcggtttggataatatttagtttgagattgagcgtggtgagtataattaacaacaattaacgtttattgcatttgtctttaggtttaattttttgagacatttattgtaatttgactctctttgagaaatatgtaatctgagtttctcttataactttaaaacagttaatattgttgtccattgttaaatttgttttgtcactgacaactaacaaaatttagtagcccgattatttggtttgtacgcaaaacttaattatggttaatataatgaattgttaattaatagtgttttttacggttaaattctctcaattatcactttaaagtgtcatttttttttaaaattaattgtcaatatagaatgtttatacatacatttttgtatatatgtcaaatttatataggtaaatctaatattgttatattgaaaatataaaaataatttcaaaattaataatattttttattttttaaaatattttatttttttataattttatttaattttaaaaataatttttaaataataatattaagtgtacccatataaacgtgtcatgtcaataagagtgtgtatattatgtcaaaataggaaatgcattgaagtggtataagtttttagtgcattttataaacaacacttcaacacaccctgtgaggtcgtattagatcgtattgtattgtattgtattgaattgaattatacattatatttttatataatactatgtcaaactttaattagttacactaaaatattatatatttaggtgtctataaaatttaataccacatatagttttacataaaaatattgtataaaatacaatacaatacaatacnnnntaatacggcgttccaaatgaacccttaatgtcattcaaagtcaaaatgttggttaagaattgagcgaaaacgccaaattgagggatttcacggtcaaaaaactctttttaattaatttttatcatatatatgtgctaattcaaaatgtacagttgtacagtacatatcatcttattctacataataataacttatagtcaataatttacttatttcaatatgcattttgtcaattgtcacagttggtatcgaattcaataacgacaaacttaacacttgtttgaatcattcttttaataaaagaattagcactttcttttaatttgtgcatgacaaccttatgtgacctttgttaccattcttttttacagatataattaatcagacaaaatagttaaataacaagtattaactttaactatgttagaatatagttccatctactctttgtggaggtggtctcttaggccacatatcatcttgaaggtttgatcatatattagccttatagctaggcattactaaaccttgttttcatgctttggattattagcaccaaccaaaccataatgtggtgattataacttgtaccaatttttccactaatgagagtgcatgataattggttactaatgtttcgaaaaggatggcagagttaattactggtatcttaatttttagtagtaactagctagttaaaaaaaattcggtaactagctttcttagtttcagtttcagagtgcatggtaaccagttattgatatttaatataatataataaatgagcaaaatgagttagtaaagtataaaacctagaagaaaaagaagaagtgaagaatccgtgtttttattgactgagaattcaaatctcattatagtgaataatcctagtcccgacaaagaagaagagcaaaaagaggatcatgattctccatcaacaaagtgcttattctaataggctatgttgggtttggatttaatattaccacataaatgggatcactgatatgaataatttaattaggataatatatatttgcagtgaaaatacatgttatctttaatttttaacaagtatctaaattaaatttttatatttgcagcaaaagtactaaagttgtacttaaatgcctaaatatggctagatgcataaacataaatacattttttttatattgggttgagagaaattcgaatttgagaccttctcttagtgaggagaagtgtggaatgactaagctaacttaagtacttaaatgctacctaaatatctttttaatcaaatgtgaagcagcaaattaactgtgaaattaaaaattaattttaggtacttttgccttcaaaagataaaatttagctactcaagtgtaattatcaatacaaatacttccactgcaaatatctcaacatgaggagcccaacattaaccaacaccataagccaatgcaattcaggcccaaaccccattgtagtttgtgaagtctaattttaaagggtgcagatttagtcaaattttactatgaaagatcatgaccattcaaactcgttactctcaactcaattgcagacgccgccaaggccaggtctctcttaaccctaacctttgtacattaatttaacattataataataaagtataaaagtttaaggttaacattatgataataactcctagctagtaatagtatataagaagagattgactaagcctagtttggtaataattttaaacaaatgctatagacattatcgattaaatttgtgctgtttgaccgtgacagcagaaggtttatcattctcctgtgattaatgtatatatatatgtatgtatatgttatttgtttggatgaatggtaagccatctcttgtcatgaaagcatagatatttctatcgatattgtctctggtatttgtagatatatatagctattagctaccaatacgtaccatgatcattctttcatctcacatctttgattggcagttttaatttactttatgtacttgaaatttacgaagcattatattcaccttgcatggtttttgttactttacatctctattaaggtttatgttaagaaagaaacgaaaaacattaatatcatttttagtcagtattggatgcatcttgtttgcacttataataaataataagagtctaattaatatgatcgggtcagatttataataggcacttcaatttttttaaacacatatttattctttttcgtctgatcttttctttacattttcgtttattttgttgcagcatcacgtcaatcatctcatgtctcttctaatatatataatattatgcatttaataacaaaacataaataatattataaataaattataacatcacgtcaatcatcttaatttttttttttttaaaatgatgtatttcttctaatatataatcttacgagggccggccaaaagagtgggcagccgacagccgtgtaggtctcaggccccataatttttaaggctttaaaaaaattaaaattaatatatatatatatgtagaaacttataatatataaatatttaattcaattaattgcatcaaaatcttatagcacaaatacattctattgatggtgagattatgggtttcaattctttccacatcactttttacattttaaaatattaaaagacactgcatacacatgcacatatgtttcaaatgtttttacaaatacaaaatatatttaataaattagttaatgttatataattaaaacacctaaaaaatacattcaaatatataaacagtttaaatatttcaatatttcaaatttaaagataatattttattatctagactcagacctctaaatttttataaaatcaaatgcataagttattcgacataaatttagtttaagtgaatatacttcac

SEQ ID NO: 17848 - DNA, 8031 bp, Cannabis sativa
gttttgggttttgattgatttgaggaatgagaaagaagaaggtgaaaaaaggtttaaactttaaaaacaatattgtgtatatgtaagcaaaagattcagtctttatgtttaattaaattatcttttgttctggttctggttatggatccaatcaaatcacacccaaatctctattttgaaaaatgatttgatgtgttttgttgtgttgggttatatgcccattcccatacctcacctcacctcaacagctatatgctatctgttatgctaagctatacaaaaagcccctaaaatgttgttttggtctacaccttgttgcccttttctttcttcttctttttttagccacacaattttacctttctaccctttcaaatctgaaaaaaatttcaccttgtcttgtaacttgttgttgataatatataagtagtaaaatagcagtactactgtactgttctttttttagaatatgggtatttctttaaaaaaattatttttatttatatttttatatatagatatatttgtatgggatgattgatgatgccctgtccttttctcttctgatattttcaaaccactccctaatttctttcaaaatcgtttctttctttttttatataatatttatttaacatttttttacttaaaaagaaaaaaagtttgatttttattaatgagtaatttttatatatataaaaaataataatagaaaaatgtatatgtaaggtttaaagttttaagaggaaggttgttatgtttttaaatttaggtgggtattaaattgtgtactaaaaatgcaaatctgtctttgtttgtagttgtaaagtttcaaactttaatacctttctactatattctctttcttccttccttcccctttgaactccttttctttctttcctaaaaccaatagaaagaacgtgttttgtgttgtgttgttaacaacataaatcaattgtaataataatgagcaggaacttggaagatcgaagtggaacaaatgggtcaccctcaagaatctgtggtggtggtagtggtagatctacagttgggaaatctgagaagaaagtgtcttcttcttgtttggcaaggttgggcaatgataaggtctgtgatagactcaattccaatcatgtccactcaacaacaactgtaacagaacatcatcatcatcatcttcatgatcataataatagtgttgtagttgaaaaggtgaatgttgaagctttggaatggccaagaatatttcttgctttatcaagaaaagagaaagaagatgattttcttgctatgaaagggacaaagcttcctcaaaggcctaagaagaggcctaagaatgttgacagagctcttcaggttagaaacaagattcaattcaaatcaattcaattgtgaattcaatgattgtgtttattgatttcttgtttgttttttggtagtattgtttcccagggatgtggttatctgatttgacaaggaataggtatgaggttagggagaagaagtgtgtgaagaaggtaatcgcttgctcttttccttaatgaattttatattgatatattttcttgaataatgaaacaatggaggagtccaccaccacactaccaccactaaagtagtattattagctgtatgtagagatagaataatgaacaatggagggcctcttttattatgctcaactgcagtgaaaccaatagaataataatattaatttgtgttttgtggttgtgacttgtgtggttattgattgattggtgcagcaaaagcagagaagagggctcaaaggaatggaaagcttggacagtgattctgagtagtagtagtagacatgacacagtcagacacatcacatgtagattaggcacatccattagattagattcttcttcttcttaagcacatattttctttctttctttctttttgtattaattagccaaagtagttgtagtagtagaagaagatgttaagagtgataatagtgaggagaaaaagctctctttctctacaaagttctgaggtgggaatgaaaaagagaagatcaagtttcacctctctctctctctcctaatgtcagccatcatcatcaccaggcatgagcatgattctgttggggttgttggtcaggggacatttttttcttcctttcaattttccttgtaaaaaaagctctggttatcatgctcatcatgttgttttgtccccctaatcaatcaaatattataccaccaggcaaaagatgctgttctacttcatttatgtaatcatttttatatttaatttagcccacaattaaaataaagattaaagagtctaattttcttaaatacagagccatgaaagaaaacaaataaataaaataaataatattcaatctcaaaccagtgtaagtatatgtaaaagctcaaaactttcttcagtttcaaatggaaacaaattgtgccatgttagcagctaaacaaagtttcttcttttttccctactaaacaattaacatgttacaaaccacctgtgagtgaaatcatcaatggcatcatcctcttcccttccttacttccaactggcccgtccttccttcagactctgcaatcaatcgaaattcattggttggttagaaacacttttaacaacaccaatgtaaaagcataaactctgactgctttgcttcattaaagatgttcgttacaaaccagtcgcctgaaagatgcgttattgccccccgctttcttggaatcctctgaacccggcttagcacgatccaaagcctgtatatttggaaagttaaacagtttcatctaactttgaatgttaaaactataagtgatattcctcaatacttcttcatgataatgattcagataacttaaggtcaacatcaatatgtagagaaaatgagacaattctaactaacaacaaagacaaatttgggttgcttcttaaaagcatgacatcatcaaccaatggcttacacatcactatcctaatttcttataggataaccttacaataaccctttaaatttacataaatgtctgttctgttaaagctcccagcactggttttgaagcttgatggtattttgttttttcagattattgattgtatttgatgaaattatgagaaagtgaatagctttaaaagcaaaagtgtaaatatttctttagtcttaaagctcttaagaaagatgatgggtcaattatgagtaaaaagcactatatgatggattgcaaataagttgcctatgaatttgatcatgtactacagggcttttaaacaagttgtgctttcttatagcgctgttcctagatgtcacctcaaacatatcaatcagctaataataacgatgaccccatgaacgagctgcaaattacagtcaactagctcaaacaacacaagtaaaagcacacacaaattgatctaagacaaacaacatgttaggtgtctatttgcccagtgccatttcttaatatagataaaaaatcatcaaacagaaaagaaagtgtacatatttaacacttaaggaccatattttacctgaattaaagattccacacgacgtcgcatccgtgtatgcatgaaaccctccgaacactgtcaaagcaacagaaatggaatatgctaaagttgcatatggaagatagaatgccaacaattacaactaacaggtgaaataagtatcgcaccttaacatggtaactaacatatgcatggaaagttgataaactccaaactgtgcggtccagttttttgccttctacatgtcgaggcaaaatgactgcaatgagaggaaacattaatctattagtatttgcagagcataactaaaacataataatttgtttattacataccaattgttataaagcctgcgtttgcagataatgattcagcaggagcccccttcaattctaaaggaggtgtgggtgaccacagacaaaggggagcgttattaagtcccgctgcccgtcttgcttcaacaaattcctaaaagataaaacaaaagtttgaacatgaagtaccatgaaagaccatttcaatcaccagcagatttgcatagcaaattcaataaaatctcatccttatcagcataaataaagggatttcaccaaaccatttaatccaaaaacgaaatcacgtagaagattaagagtacctgcaggaaggaagttgcaaggacaatgtctacagagtccttaaatctcattggaaacacaacagtcactttttctgcctgccactgaaaaagaggaatgttttacgagagtcaaattcactcatcattcttctaaaatactaaaatgaacaagctccaagaaatttttaggattaaaatttaacctgaggaaggaggaagaaagactcctttgatcggtgcacaagtgcaacaaggcggtcgatattggaagcactcatccttgagccaagacctttaagaattagtcttaatggagcaccaagtaccacttctctcacagatgcaattttgatcaaaatagcatgcttgtattctgcataaacaaccataagtccattccataaacttaaatcaaacttgaccaaacataaatattggttaatacactctatggttggtttccatattgctttcatagataagtttttgacaagtgtagaatgtagaaatgtctattaaggaagtcctataaaaaaaagtggtaggtagttgttgtggggttgtaattggcaatgggcaagctgataatgattaataaccttagaaaagaaactggttgaaccttcatctggggggagtttagaaaggttgagtttgagagtgagattgaagccatctcttggaggatcaagaacttgaacaaagccactgtatgcaattttaatggcttctaaagctcccaatggaagtccaccgacgaaagcagtttctggaggtggggtgggtagtgataccgacaacaaaacatgatgtgggttcttcactgaaacctataattgttaaaaataaataaataaaaatgttttcttttattaaaaaaatgaaataaaaaaacgatctttcttacacattacacatatttatacaattgagtcacctgaatatggaagcgaacatcatcaaactcaatccaatggtaatccaattcaacacccttatcgagactgtcacagatcaaaatgagtattatatttcagatttggatgaaaatcataataattaccaaattcaaaaaccctaattagacatatatatatatataaaaacgtacttttgaactcgattgagcaaggtctgaagcagaaatctggagtgagactgcaaaagaatcatttttgagaattgggaagagaaggagagtgagggattccaaacttttgaactcaaactttggatctccccttaatagtcgttattgtttgtttgtgcttttttttggacaattaaataataattaataaaaaaatagtttcacttccattttgcatcttttttctaacaataataactcatcttcttagtaaaaataaaaataacaatatttcctcatggtgttatttatttggcaaatttcatcaactttttaagaaaaggaaaaaaaaataaaaaatcacaagaagatgttggtaggtaggaaggaaggtattttgtgaaaaaaagaaaagaaaagaagaagttttctttaggggtgcaaatgcaaatgcaactgcaatgagcatcttcttctcttcattggttgctttgcatgtgagcgtcgacttttcttttaattccaattcaaatgaattcaattgacttcaattatatattcatcataataaataacaacttttgtgaattgtgtggacaaaacatgttctctcattcatgtttacctaccaatataacaataccaaaaagatgagtttgataactactgcattacttcaaaactaactcatcaattggctaacaattttatgtaatcaatctacagaagtaagaaagagaaaaacagtggcaccaacttgtatttctactctataactcttgcatttcttctttgtaatctgaaccagtataaattttctggtttccttttctatctactgttctattgatgttttgatacttgttttggatgtgcatactttcttggtctgtgtgctgatcttggaatatgtttttactgaaattattgctaacaaggatgagagaaaactagcactactcttgcggattgactctattttataggaaagccatgcctgtgtgtgactggctaagacgaaaatatgactgctgccaacaggctgataggaactgaaatagaagaaaatatactgatattgattatctaggcaattcgagagccctcttctctcccactcggggttacaaccctttaccaatttcttttcttcacaccccacaaatgaaccctctcccctctatttattctattccttactggcttctaaaagttccaaacaagatgaccagaagaagtattaaacaagactattgtgtgagtgtgtattaatcgtcgaatctttttttgcatcttcttttccttgcttgtaccgagcaaggtgctcctgatactcttctagttctttttccaatttttctatgaactgacttgtatgctcaagggactgtaaaaacttgtacttttccaaggcctgcaattttacagaagaataccagctaatgtgaaaagaatgtctcaagaaataatacagaagacgaggaagagtaatacaacacaatttctacaggtataagcatatctcaagtactgatcaacaaagcataactaactacggttctctcgatgaatcgtctacctataagtaatctttcaaagagagcaaaccaaccaaaatgctaggaatgatgcaagaaacaatagaaaaaaaaaaagacagacaagagctgagttaccttctctttggagattgttggtggtgacatgacggtaggctggacatagttctttccccggtaaaaaagaatagtattgtcatgcttgatgtcgatgataatgcctttgctgagacgagcaaggtcctgagcatattcttgaagctgatcaggtttgcaaggacggcaaacaaccttgacagtctcatgcttcttccagtgaagatgcatattgagaacaacgcctccaaacactccacgcctgcccacaggaacataattcttctttttctcacctgtacgtttaatgtaatgcttctcttcctcggttagagcttcaggatcatgtggttctgtttcatgtggggttttgggaagctccaaattcctcagcttgtcaatcagccatgtctccttccgttttgcctgaagcaaaatggaaaatagataatgaagaattgaaataaatcgtatctgagcgcgagtcttttagtgattaagggaatgtagtaccttttcgagtttatatcgaatcctaacttctgggttgggagaattgatctttttccttgccatcaaacgatagaattttaattgattgactttggccttcttggacattttacggcgtttgaatttgggctgctgatgctgcggcttattgttcttactattgtcaacaagagaaaaccttacaacatcactctggcagttgagttcaagagaggtagctgaactcatcatcatgtatctaatactactactacttctgctagggtatgcatgagaatgggcaaaggtaaagcaagtgtttttgaataaaccaggtgttgttgttgttgtgcatgatgatgatgatgatgatgatgttgttgttgttgttgttaacctcctcctgcataaaacaataactttgtttgagttgaagaatagtgagtagtggtctctcaatgaagataaagaggaagatatacagtaccttgtgagcagggactgagccttagaaacagaacgacctaagcctttgattgaaatggaaagtgaaggcaacattgaatcgaatcaacaaagaataagagcactcactgtctgaatttttgtatcttttcacacactactttctcttctcatgcaaaaaatcataa

SEQ ID NO: 17849 - DNA, 6433 bp, Cannabis sativa
actaccggagaaattactttagaaattaaaccgtaaatttgaaaaaaacaaaaaattaaaaaaatagtatttagagtaattctaaatataagtaaaatcagaaaagattaacttaagttttaaaatagtctttcatttctaatgagaaggaaatgatgagaaatggaaactaatgtatgtatatgagagaccgcctcctatagaaaccttattctacttagtttttttggagattgagagaaacaaaaagaccaaaatcaatcactattgcaaaacattcatcttaacaaaatgtgttgaagtattttattgaagaatgataatgaccagccaactgatgcaagaggtctgtgactatggtgatgcattctgcataaagtcgacacaagtgcgacagttgcagtcgaagtatcggcatcttaagcagccaaagcagacacaagaggtgcagccatgacaccatgaattccgaggacatcccctgacgttcttacggctctccctctcttcttcatcttcacaggttattctggtatgtcaaattattcatcagaagaaaataaaaatagagcttagtttaattacagattatcatcgcaataaaaaaactacatgaagacaaaaacaagatttgtagcaatgtttaggatcttagttagtttgtctacgcaatagaaaatatggtagaaatgaaagatgtagaagttcatctctactcaactaagttaaatttctttaagaaaacctgaaaaaaaaaaactagacttgtaattcagtgtaaaacatgaacaaacaatcacaaaatacaacttacttgtcataaggcctatcagaacacttccacctcctagtggccaaagcatcatggaagattctgcattcctctttggtccttaagcgaaacctgcgttctttcttacaccgcgagcagctaatgaactcgtccctatggaagttccatttacgacgaatgcagtctcccggggttggaaggtttgagccgtgcttgtaatatttcagcagaccacttttccacaatggaactttggctctgtccaccctgacccaaacgttccttttccaatttttggggcctcttcttgatgaatgtttctcaaactcttcaagggtcaacctttctgtgccaccattaattaatgaattcagtaatagcctttgtgtttgagatatgaacccacataccaaaataacatacacgctttaatcaaatgttatttaaagtacttgccttctttgcaaccatcagagcaattgcaggatatgagaaactggcctgaactgaagaccttgagcttaccaatagagtccccaaacttctggctagtgcagccgcatgtgacttcaatgtagtctggcccacgccgaagcccatctatgtccttcagattctcatcactcaacatttcactcgctcccctaatagtactcttctttgtcccaactcctcctgcatttacatatcaacacactcacatatatatatatatatacaaatatacatatatcttcagtataacatgctgtgaagtacaggaagattgtgtgtgctgagtaccttagatgttactagctatagctatgggctatagctgcttaaccaaaatacatggatctgtatttacatgtatatatatttatacttaataaaataaactgacataaaagtatagtcgtaaaagagaagtaaacacatgtagtggtatataagaatggcaaattatattaattagacaagtgtatgagtttttttgcatggtaagaaaaagaaaagtacgtgattcaagggagagactcggctcgggtttttcttttcaatgtcagtttaaaagtaaaaaatttccgtttcttaagttaatgctttgtagctttattgatatgcacttaaaatagtaaagtcctccccattttggtttgattttgtgagaaaaattcattttatttttttatttccttgaacggttttggttctttgccaaattatgtatgtgagataaacgtgtgcaactttggatatgatatcatgttgtttatgtatattttatacacaccaaatgtgtaatatgcatttcttttaaacgtttgtttgaaagtttcggtctctagctacatttgctaactcattaacccattattgattcctgcctatgtatgacattgtcatactcctaatcattcatgtatatacctaatcttctaccttaatgtaacccattaattgattcatgcgtatgtgtggtattttagtattcctaatcatatatattgcttaagagtacctaaaaatatgtgaatgtttttcaactaattaaatttgatttaaatgacattgacacctactgtttaaaaaagcactgtcacatcattaggtctagtgttttagtatatattttttgtgtatattattaattactgattgctcaataaataccccttattgttatacttctgtaacataatttatctaaactaagtggagaatataaccactttcctaaggtttttaagtaattgctaggctatttggagcaagtttaaattgttacgcctataacttttgatctacacataaatacgtttttattattcatgtgtgatttgtgtacatgtgtgtagctttaattagttacaaaatcaatatttttaataactcaatatatattgctgccattgttgtaatgatttcggttgggttttaaagcttcaaattggttcttgagtagtttatgattaagtattatctaattcttttgaatgttctatgtgggagggttttagctttatatatctaacgataatatttattacattgttagtgaagagctaatgatttgtgaagactagttaacaatttttaagttctagaatttcatgtggtgtagcattaatgttattgttattctctacaatctttgggttttgaatagagagatagtatatgggatttttcctttctacaattttaaagatgttataatttccataacatattttctattcttcttttatgacatttcacctttacttgtaagagcaatcatgcattaatcaaaatatacattttttaagaaatcactctcattgattaaacacacaaattacataataacttataaattttgtaatttatgtatttttttccactttttctttaagttttgttaatttgattgtcatcgagaatgataatcacattattaactatatttattattatataaatttaaacagatatataagagatagatgtagtaccgtttcatacaatattattaaaacaattcaaaaataaaattacatctatgatattatacattattctgaattgcgacaccaccatataccaaaatggaactacacattcaataatatacacccataaactagccttcaaatttacacatatcaaacagaaaaaatacttttgaaaatttttcctttaagatgtttactcaaaacttcatgtgtacatccttataaatgttttgtcccaacaaagactacaaattttttttgagaaaatgtatgatttaacaaacaactccatgtagtgcacttaaaataaataaatgaaaaagagagataggggtgggatgggggaagaggaaaaaaggagaaaaaactaacctctagccattttcagtgaatgtggtaggctttcttacagctttttcttgatttaaagtttaagacttggtctctaaaacctcacttcttatgctatttgttaagttttcaaatacctcacttcaagaagagagaaatagggagagaggaaaaacttcttataaaagaagaatttaacaattatatttagcaaaagtaaaaatcatctaggttcaaataatttactgtcaatttgctaatatacaaatgtagtccttaacttccttttagcatgaaatccaagtgtagcaataaaataaatggataaataagtggcaacaactcatttccactactgtcactctggactgtctacgtggtcaatttatgctcgttaatcaaattttgcaaaatgcattttgttaacgtttatattactttctacttatttaacggtaatcatttaatagtatgaaactcttatgatatggtcaaatatacgttataaaaataagaaataatctacatgcaaaataaagaaatgataattttgaaattattcatattcaacttggatttctttgctaatatgtcatgaaccaaattggaaataggcatttgaaattttgtttccaaattttgtttccttttaaaatttccttttaaaaaaaaaaagaagaaaaaaaaaagaaggaaagacctaggcaacaagcttaaaagattaatttgatttggagacaatataccttatatatcgtctacgattttgttgaccatacttgtttgcaaacatattctcataagtttcaattttgataatgttgacctcgcttctagctaaaaacagtgagtcaagttaaagtgattagataaagtaaataatagaaagcaaaaataataagtaaagagaacatcagaatttttagaggttcggtcctgtgagaatggtaatagcttactcccctttagttgtatggacttgagagacaaagaatgcaggattctctctctctagctcttacaattgatctctgagtaactctctcttaaattgcactttttttttcttgagtgttcttccttaagtaaaattttcatcccctgaatagtgaaattgtgccactatttataagagcttattatatgaagaatgatttcccttaatctataataaataaaataggaaactaaattaattctataactacaatgcaaagaatggaaaatcaaggcttattgcctttattctctgacctaatcccacgaatgtagggattatcttcgtgccttggaagcaatgatgcttatctctgaaattaccaactcacacatcctgctcggtgcatgcaagttgatcatgcgatcgtgtcttggtcggatgtcccttgatgactctgttcagacatcctgctatgcgcggacaacataaaccttcttaccaatctttgagggcttttataagtataacttttccacatgtaggaaaatatgagacatgtgtcatccagcttactgtcacgtcatagtgcaaaaaataggataacatttgctcctaagtctgcgagggaatttcttggtcgcacgcagacttcattttgccatgcatcttatttggatggatgacaggtgtcttcgacggttgaggttgatctgacgtgactttgactaagggtgtctgagcattaagtatctcttgaaagctgtacctcgaatcatggattagcggctgagtgacagtgcatgcgtgatggttgtactttttgcaatgagtataacgttctctttgggggaaatccaaatattcgaatttaaaatagtttatttcccttttttgactgcttacaaaaggggattaaagcttttggtaatccttttagccattttcactttcaaagaactagagcaaaaatttctatttaagttttccctcaaatcttcaaagaacttgctataaaactcttaacgttatccttcgagcagatcaagaaagcttcaaaaagtgaataagtcatttatccttttgcttttagatgattgcatataaatatgcatattatttctcagtttctttgtatgaactctgctttttcttgaactgttcttgacgaactgtagaatagataactctagggtttggaactttaaccatcgttgaactgtaatgtctaattctctaattacgtatcaattttggcctaaaattgtttatttccacttgttcatgagattctagaaaataccaggtaccagctgaagttttgaacttctggattggaaattctaactctgaatgtgttggaagttgttggaagttattttactagtttactaggatttaactaggatttagatttactaacaagtatgttgattatattctacaatttgccaccctaaacatgaattcctaaaatacctaatagaattaattagcaacataattaattttcaaaatatatgaaattatttttttccatcagattattttgaaattaatttaagaaaaatacacttagtttaatgaaattaattcaagataaactatatgtatttttttgtatttaattaaataaagaatttataactaattagatttttctagatatttaaatatttaaattttcatagaaaatatatttaagttgaaaatcaatttgagaaaattgattttggatcaacttgaattgaaatattttgaaattaataattgaataaaattttctaagaaattagttattcagatattctttaaaaatatttttaagttgaaaatttgttaattttagatcaacttaaatagggatatttt

SEQ ID NO: 17850 - DNA, 2187 bp, Cannabis sativa
  modified_base (2139)..(2146): a, c, t, g, unknown or other
aactttctcattttaagttgcaaaagcatggtaagaacaagacagatctgttcaagaatgtaaatattgaggaatctaacttttgtttttggcagtttatgttttcgaatattttattgttttttatttgtctttaatggctgtgataaactctcgtgactcttcgataaaaaggctgagctgtgttacagtttggaaattcggtagattatcacaacttttctagacttcttgatttgaaatgttgattgaatattgtattgtatgtcctgtttaattgaatttcatttccggatgaaatataatattacgccagaaatgataaatatatagagaagaaactaaagcaaagtaggacaaaatcaatgtagagagaggaaactacgactatgtttaaccaatttaacagtttggtttggaaaaaactcgaatcattcaagtatttcatataaattagtacacgataaaagaattatatttgtcccttcttttttacaaatctagaatacatccccatattggtttgatgtagtgtgatatctaatgattaaaaacagttctatccattccatcaaacccaataatgaattgcatatctaaatgatttatggtgcacagcctacacaggagaagatgaaggtgcggtgacttctaaagcggaccaacctagcaccactaggaggaggcgacgttgccgtggcgccacggccaaggccagctaccgagttatggcgccgcagcttggagttgtagcgattagtactactgagatctgatgagatgttgtcgttgtaattgctctgagctgaaccagacgatagatgctcgtattgcctccttgtcttgttcttcttcattgacttgtaaaccattggcaacaacccctccattgtatattcttatttatgccttaatttcttctgttatagtagtagtttttgagaggtttttttttcgatgaaaattagaataggaagatataggaaagtttataatttgatggatatatataatctcattcccatttaatttacattctcatttttattttcattctggaccctatttggaacctaccagggaaataccaactcaattcaaaacacgtttgtattgtttttggcttttgtaattaaattatattaggttgaaagaaaatcggggtagggaagtggagagaagtccatagctaatttttattgacttgggagtttggctggtcaaaataacaattagtagtagcactactaattatggttctagtagcactactcaattatgtgtacggcggctcttttgttgttgatcgagctgtcatggaccaagaccaaccgagtccatggtttaactactctattagtattatattccaaggatttaatatgtttttagcttatttgaactaatagtagtgaaatattctatttcattctcaatttaaacgaatggagtgtttgatgtttaattcactaaacatattccatcaacttacttttaaaacattagtatcttattatatctaaacatttcttttttgatgtttttattattagtacaaagtaaaaaagaaaaaaaaaaaaaaattaaaaagtgatcttctaaaataaaaacattaaacaaaattcaaaagtccacatcaataaaaaaaaaacagtgatcttgttcactaagttttgccaaataataaacaactttatttctatcacaaaaaacaaaatgacatgaaccaatatgacaaatattcataaaatattggctgtctcgagtaatgatgtcgtccacagaataattgcactgaggttgtatggccaaaataacattcaagcaatcactctcaaaggtgaaaataagaaggttctcccgataacacgaataagagtctccaatatagccacaagttcagtagtaagtgacaacatttctgatgtgccgtaaaaacacctaatccaccgtcccttttcgtatcaaacctcctagggtacgattcttttctctgtcccttgctttattctaatattctaatatgaatattctaatacgatatgaaattaaacatataagattttagaaaatcttgcattgattgctgtggaataatatgaatcctttcgctcacatctctaacccttgttcctttcnnnnnnnnagtattattaagatctgagcctggatctctttctcttcttc

SEQ ID NO: 17851 - DNA, 4784 bp, Cannabis sativa
tataaaccctacaatacaaagggttggtgtaacgagaaaaagtcctatttaaagtaaagacaagcccgagtgttgaaaaccctaatgctaccaagccacctttcatttttcatttcttttactttcttacatatactctcactcttttcatttctatctgataaaccctagcttctcccatacccactcctactcaaccctctccttcgccgtcaaacgtatttgttcatgtgagtttctaccgattctctgtcttcaattatcttgttcatactctattgttctttcattgattgattctcttttgctttgttttcaacagtaagtactagattcagagcttcgtaacgatgtcggatgatgaaagagaggagaaggagctcgatctctcttctcctgaggtcgtcaccaagtacaagggcgcagctgagattgttaatagtaagattctatctctttctctggttttctcactcttttgtgaatttttctatgtgtatgctgttcgaggagctgatttaagaaataatttcttgatgtggatttttttatttagttgatttgtgaatacatttttaacttgatattgggaaaattttgtagaggctctgcagctagtgttatccgaatgcaagccgaaagctaagattgtggatctttgcgagaaaggagattcatatattagagagtaagtttacattgttcatggtttgagtgttgattttatctgtaatatttttcagctattgaatgaggagattaacggggtcttaattttttttatctatttataggcagactggaaacatgtacaaaaatgctaagaagaagattgagaagggagttgcatttccaacttgtatctccgtgaacaatactgtttgccatttctcacctcttgcaagtgatgagtcagtgttggaagatggtgatatcttgaagatgtaaggttttcacccaaggcttatatttgttattcaaatatttaaaaccaaacatttatttgtgaagtggacattagctatagtagaaggtaacaattaaatattataacctgttgcagtgatgtgggatgccatataagatgttttctactaaaaatgatggggtttctactgttgcagtgatatgggttgccatatagatggattcattgctgtggtcgcacatacccatgttcttcacgaaggtccagtaacaggaagagcagctgatgttatcgcggctgccaacacagctgcagaagtagccttgaggcttgtaaggccaggaaagaatgtaagttttctgtttacatttttttttgaatctagttctactttaatagtgttacttcccagtgatattgagattgtaatgagtgttttttttcgggtgtaatctttgatgttgctgtttgccattaaattatttgtcaggtctgtttgacattgcctttgcttgtttctttcctattttttcattttaaatattttccaacataacatacatacttcttgtttttcacttttagcatctcttttagtctttattgtgctatacaatttacaagaattttgtttaaatctaaggatccccttatgatgaacatatttttttggctatggatctgtatccatatgtagctttttatgtcatagttactctgatgggaattcttacacttttcattccaatttgaatgagttgatttacctatgttttggtcttttgtttttcacttcttgtaggcatgataatagatgttcatgttacagttttccagtgttttccattaaataaaatagtaaattctctgctttgttaaattatgtttcatggcaactttgccaggtcatcaattatttgttgattacctcttttccctgttgcctatattatgctggttgtacatgggatgcctttaagagactaattctttattatagaatccgtttacccttgtttgagctacattttcatttgagtataataaaattttcagcttgactttgttagtatcttgcccttggtaaagatgttgtagtcgtgtcaaattatttttcatggcaactttgccaggtcatcaattgtttgttgattacctcttttccctgttgcctatattattcttggccatacatgagatgctttttggagatttattctttatggtagactctctgtaccatgtttgtaccacatattcttttagtgtagtaatatattattgggttctgctttgtagtatttccatattttaattaaagttgttaaacttgtactcttctcaacaagatctcaacacgattgttgtggttgtcaatgcatgttaacatgattgcaaattttgttcgtgttactttttggaagtgtttattgacatgtgatagtgcttttgttttccataccaaactgtgttttgaagtttatactatggttcatggcaactttgccaggtcatcaattgattattgattacctcttttccctgttgcctatattatgcttggccatacacaagatgctttttggagactgaattctttgttgtagaatccgttacctgtttgtgctacattttgttatagggtaatgtattatgcaattttgttgtggttgaacttccatactgtttaatttgatctctagattgtgtggttgtggttgctactggttttttttacaacatttcagaactgtttttcaactagcattattgattctcatttgtgaaattgcatcttaaactgtgtttcatggcaactttgccaggtcatcgaattatttttgattacctcttttccctgttgcctatattatactttgccgtacaggtgatgcttttcggagacttcattcttttttgtagaatccgtttacctgtttgtgccacattttttttacagtgtgatgtgttattcagtttggtcgtagttgaactggtttgtttacaatataatctctagattgtggctgtgattgttgctgaatttgctacagcattttccaagtgtttttcaaccaatattattgataatcttttctgtgagtgaaactgcatgctatactgtgtttaatggcaactttgccaggtcatcaaattaattttgattacctcttttccctgttgcctatattacttcggccaatgcatggactgcttttgggtcacttcttttggataaatccatgtaccttgtttgagccacatttgtacatatattttgttcagtttggctatggagtatttctttgcccttagtgaagaactcgaactcattttttgttctgcacaatctctacatgatgaaactattactggctacggatttagtccaatgaagctattttttgtcatagttacactgatagagcattaccttaatttttgtagtcttgataaaattttctttcaagcatcttctaaagaggcatagtacatttccttcttctcttccttcctatcctttcacacgtgtcacagaggaagtggttttatttgtgttttattcccaatgatgattatttatcaaaagccatggaccatcgtccaagtgatgcttattgtcatagttactctgattggggtatgttctgtctcacttgacagacttttttttcaatgtatttttttttttgtagtagtcattatttcatgtgtttaatttgtcttggagggagtacgtctgttttcccacctttgtttttacacatttctcctttttatttttcggttcctgcattttaaatgtttaagattctttttccacaacatatattttcttttctgtattattgttaagagtattgccattttctaatttgtcttcagatttttatagtattgtttattttccccttcagaacaaggatgtaacagaagcaatccagaaggttgctgctgcttacgactgcaaaattgttgaaggtgttcttagccaccagctgaagcagtttgtaatagatggaaacaaggttgtattgagtgtatctagccctgatacgagagttgatgatgccgaatttgaggagaatgaggtctatgcaatcgatattgtcaccagcacgggtgatggcaaggtaattggtgggacttgtatgtagttatgaagatgaaccggtttattatacttccgcaatgtttttatctctatgtttgttccatcataatttttatccttaaacttgcagcctaagttattggatgaaaagcaaaccactatctataagagagcagtcgacaagagctatcacttgaagatgaaagcttctaggtttattttcagtgaaattaaccagaagtttcccattatgcctttcactgccaggtcagtcgggatgttaagactgttaaatttattcaatatgtattatattctcgtttcttctactgatgttatcttcttaataaatgttgaaaattttcttcaacagggccttggaagagaaacgtgcacgattgggtttagtggagtgtgttaaccacgaccttttgcagccgtaccctgttctccacgagaagcctggtaagagttgattaagaagtggtgttggtacacagaatgtgcctgatatttagttctctcaattctaactgttgtcttcttggacaggtgattttgttgctcacatcaagttcacagttttgctaatgccgaacggatcagaccgaatcacatcccattctcttcaggagttgcagccaaccaagactgtagaggatcctgaaatcaaagcctggttggctttggccactaagtcgaagaagaagggtggtggcaaaaagaagaagggtaagctat

SEQ ID NO: 17852 - DNA, 2076 bp, Cannabis sativa
  modified_base (1469)..(1473): a, c, t, g, unknown or other
gttttattattccgcatttaattaatcatttaattaaataatcaaactgggaatattaaaatacggaatttcacatataaaccataaaacgaataattgtacgtaaaaattaatatatttgttccttccccacaacaacagtatatgatcagtatagtattagaacaatggaattaataattaaattgtaaaatttgtgctttttcttatattaatcaaaatgttcaactcccccttggtgtttggatcatgtttaatattttcaagcttatttagatctgatttatttatatattggatgatatgttttattattatcagatccgattcaattaattttcatcatctaatcaatccaacatattcaatggatgttggattcgatcagttctatctattgaatgtatttcatgtatgtttattggtttaatttgagtttatctaatattttagacctaatacttattagatcgaattggatttgccatccaatattatagattcaatatctattggattgaattggacctattcaatcaaacaaaaaataatgttaatttttatatatgtatatatatatacatatagttttttttggtttaacaacataaaatctaattactcattcaaaaatattcactagtttgattggataatatttttggatgtattagataattttggacacgtaccttatttaacattcgatccgatccgattagatattaaaaaataacatacaatctgatccgatcacaattgaatattcaatgtttgatggccggtaataataaaatcggtcggttattattagattggatcgattcatacacaccctaacccataataacaaggtaactaggaaattaattaataacaagataagactaaaatgtatattaaaaattgtctttttgtcaaaaaaaaaaaaaataaataaaaatgaagtcttatgcaatattttccactatacccgtgaccactcaccatatgcatatatttgtcatgatatgatatgaaatagaaatagaaataaaaataaataaaaacccttcaaaagtcctaatttattgttgctagttgctacgtacatgcattaaattcaaaatatattttttatacttccaaatatttttaatttggattaactcaaacagataaggatcaaagtttgcacattatagttgcaccactagtttattatttgtgggtgcatgaatcgtactcaagtttattagaactaaaatatttaaagaccaaatgtaatgattacagctattaaaatagagattagaagtaaaagatgtacatgctaaaatgcctaagaaagttaatacagtaggcagggaatatatactttaattgtaaaaagaaggtaaattagtaatttttttccccctaaactttgacatgtaccaaatcatgttccctgaacttttaaggtcgttaaaaatgccccctaaactatnnnnnttgttgaatttaaagacttttatccaattttagaagctcattaaatacatctttttcaaacatggtaattgcaaaacaatcaccactctccttcggataatttatggctttaaagacattaaagactacttcttcaacttgaacataaagcttcaattcacccttttgaacaacaacgagagcttggcccgtcgataagaatgatcttccaagaactataggcacatatagcatcttcttccatatccaaaacaataaaatcaacaggataaataaacttatctacttttatcaaaacaataatacccagtggatgcttaactgatctgcctactaactgaagagtaactgtggttgtgcatgcatcgtgacaagtagtaaactccctaagagcgatgtcgattccacaaggattgtagttaagtacgttaaaattaaatatttacttctatttggctgaaaaaaaaaattaagaaaggattaaaactagaaaataaaaacagtggaagtataagcaattaaactaataaggatattaacagttaataagaactagggcttcgacttcaattgtttctattgattacgacctaatatgattat

SEQ ID NO: 17853 - DNA, 2658 bp, Cannabis sativa
ggtaattctatattacttctggtacaatggtattaattttattttatttacaaatttgtatatgttataattatttagaattatttttaattttaaaaaaatatatttgactattttatattactaaaaataagattcaattattttattacacttgtaattattttttttatatgtgtggcaagaaaaagaaaaagaaatgctaaagggtactagtggtgtctagcactcttctataagtcaatgtcgctatttatttaattaaatatcgggtcttatatagtttaatataatagcttttacggaatatcgctaaccaatcgcaacacgacatgtcgaggaggtactagacactactagtgcctaataacaatgctcaaaaaaaaaatatttgtacttttatttaggcattgtaaactattaaacaaattgaactaaaaagatctcttaaatactgaaatagataaaaaatataccaaaacatcattttaaaggaaatgtattactgatctattttctattttttagagtaataagtttatagtctcttgtttgcatatcctaaattatattttaataattatatttttagaacttctataagtacataatcattaagtgtcatataactattcatatgttattttttattggtatatttaaatgaattattaaataaaaaataaaaatttaataacttataccaatcaagaattgtcatgtgcctgttaactagacacataacgattaattatctatgaaagttctaaaaatattattattactatcaaaaattaattttaagtataattaaattttcttttaataggtacattatcctttttgagacttttacactatttttttttttttttgcattattattatgattgttaaccattatttggtgtgcatgtataataaaacattgcatatagagaattattttgtgtaagattacctgtatttggtgacaagttgatgaagaaatattgctagctcaagtctagataagtccaaaccagggcacagcctttgtccaccaccaaatggtgtaaacatattactattaacggtattacctgtcctctgcattatcatcaaaaacattattaattatcagaaatatatatttgaaactattattatataattaacccaattaagtgtaattaattaatgaagatcatcaaacaaactaaaaatgtttacctcccatctccatggattaaactcatatggcttttcataattctcttcattcatatgaaccgaaataaaagatgccaatacacaccagtttttgggtataaaatagcctaaaataaaaaacacaaaacaatatcaaatgcataaataataatatttataattaggagtaccattaaaataattaataagttaattataacctttgatatctacatctttagtagcttttctccaaacaccattaatgatatttgccaatctcagagtctcacttatcacctattattgagtacatgtatagatagacacatatataagagtacgtatagtactatatagtaatagtaatttatctatatatatatatatatatgttatttcatcaaagtaatgaaaaactcacattctgagtaaatggcaaacactccatgtaatcagtccatgtacaattacctaagttatcaatcattttcttcttcttcagctccatgttttcctcctgtccattaatcagtcaaattttcctaaaatagaaataaaaaactaaataacaccaaattttgagtttgtaagtgacatatatttaataaatttttttagtagtataagtacttagcatttataattaaaactgtaaattttaatacaaattctattattgtcttaaacaaggtataaagactggattttaagtcattgagtcttaatatgaagatgtagtattagttattttcaaatattttataataaattcaaaaataggatctgtaacttaaggaaagttacagttccgcaaattgattatttatgtcgctaaaaaaattatttaatttaagttgcttttaaacttaaaattttaagtatttatcttgtagtttttttttttttaaaaaaaaagaagataatcatataaatatatgtatatgaaagtgacaacactatgaaattattatactcattttgggttatctgagaaaattggataattgaatttagtatcataaggattaggtatatgtttttcttccaataactaaggattattataattattctttgtaacttttttttttttcgtttgatatatatgacttggggatagtgacttgtttgctaattcaatttgtctaacatttattttgtcacaactattttcgtgtatatatataattaattcatatatatatgtatgatgtatcaatcattgcaccattttttcttaatcattatcttgttaacaagtcctaagtattgtagttttcaatctaaacattggcctatatatcatcatacatatttatatattaataataacttatataatttataatattttatttcatgaattttaactaattataaatgaaaaaattctcaattatgaatactactttaggatatctttattttcagtgctcttaaaaaaatgataactcaatttttttt

SEQ ID NO: 17854 - DNA, 4709 bp, Cannabis sativa
ttcctttaagtaacccaaagctgctgttttgtttctcccatagaacttggaagaccaagatacaaactcccctcaggggcaatgcacatgcctaagagcgtagttaatctatccttcacttcagtactagagttggagctgaagaagattgaagacttcgagaagttaaccctttgacccgaggctaattcaaatttttgaagaacttcttttattcggagagcttcttcatgggtggctttacaatataagtaactatcgtccgcaaagagcatgtgggagatatggggggccccgttagccactttacacccatgaatccaaccacgttgttcatactttcggagaagggccgagaaaccttctgcgcaaagaataaacaaataaggcgacaagggatcaccctgacgaatacctcgtgaagggacaataggacctatttcatgctacccgtggataacatgataatgcaagatctcaaatgaaacaagaatgttatttgagattaggcggccaggaataaaaggactatgattggccaaaacaatagtgtccatgaaaggcttcattctattcaccataaccttggtgatgattttatacatgacactgcataaagctatgggtcagagatcagtcatacggtctggattcttcttttttttccgggatcaaaatgacgttagcagcatcacaatcattctcaaaagtaccattttcaaagaacttacgtacacattcgatgacatcaccgccacaatatttcaacacttctggtagaaagccggagtcataccatctagacctgggctcttgcttagggtgcatttgaaaaagtgctttcttaacctcttcctccgtaactagttgacacatctccaagttaacataatcaggcacaataggatcaacacaatcaattacctcacggcaagacgttccagatgtctgaaacaactcatgaaaataattggaaatcatataagttagcgccgtatcccatgagacccagtttcctccgtcatctcgaagttgagtgatttggttgttgcattttctagttgtagcagccttgtgaaaataattactgttcgaatccccctcttttaaccaatgttgtttagtttgtgtttccaatagctttcccgacgatcgagagcctcatagagtttcttttttgtatcctgatattgctgcacagaaacactatctcttcttggatgtaaaacttttaaataagctttgtatcgttttattcgatgatttaacgaaccagtaatttcttttccccacagagccaatttctcagcgcacagagacaacttgtcaccaaactcatggagatgattttgtgaccagcaatctttcacaatttcaaagcacaagggatccttcaaccaagtattctcaaaacaaaaacgagaaacatgagagaaactacttgataccttaggttcaagaaaaagaggagaatgatctgacgtagagtactctaggttggtaagtctagcttcaggcaatgcatggctccaagattgagagactaaagcacgatctaatctcacctccacccaagcatcggtgccccgacccttctcccacgtgaaagggtgtccatggagctctaaatccgtgagcccacattgttggagggccgtgttgaaaccgttgataagccaaagcggataccttcttcctccccgcttgtcttcatgtcgaacagtgttgttcatgtcaccaataacacaccaaggcaatcacgagtggttggacaaggttcgaaggaggttccatgtgtgttgacgtctacttcagtctagttcaccataaagaccagtgagtcgccattccctaacggtagtagaggaaacaactacatcaatgtggttatttgagaacccaagtaaagtggcttcttccttttctttccaaagaagggcgagtcccccagcttgacccagagcttcaacaacaaaaacaccttcaaaattcaacatcttggccagcccctcaatttttgatttttgacactttgtttcacacagaaaaatacaattcgatctcttttgagaaactatttctctaaggaattgaacactctgttggttcccaagcccctgacaattccagctcaagacattcataattcttggtgggtctggtaaccagcacccaccccatacaagttttttggctcgcccgaactatcacccatctcacacaccacaatttcaggaatttccatattttcaataaaagtgtcatttttgttattcttatcattaaggcccatttgatcaccaatgagcccactttccacatcacccttagccgttccactctcctccatgtggtccaccctccttcttttcacataagaaaaggaaagactcacatttgaatcaccctccaccatattagcaacaatctctctcataatcgactccctaatttcttgggatttttcgatattgcaatttgaaggatggtcaacaccaacgtgattctctctcattgatggggatcccatgaaatctcagcttgtccaccactcccaaacgtctcctgcctcatcggaaaaacagtcggccgaaccacactagtcgaagatgacccctgctttgtccccattcccgatcgaagccaccttgagccatctgcgtagttacgcctcctcggagccgctttgagatccatgctatagttcttcatgatttgatctctaagggtgtcaaataacttcttgcaaaatctctctaaataaccgagaatgccacatatgaaacagaaagttgaaagatcttcgtatttaaaaatcacatgacaaaaccagcccccttgtatttcgattttcttctttttcttcaacgaactattaaccggaatcttgacccgaatacgtaaataatcccgccatacactggaaaagttgttcggatccgacttaataaaagtgccaagaaaattaccaataccagtgataatcctttccgtcatgaaaccagttgacatattatgaagttggacccagagttctaacctcgataatggtacctgccgcgggttaacccctggtttaaccctttcgaagatcagcggagccctatcaaaggtctatggactgccctctatgaccctctcaatgtccacttcatgatagaattggaaaaggaataagttcaggtctaactccttgacgtagagacccctccccggctgccagaatgtagccatcttgttttggatcgcttgaaagtcgatggatcgattagttagaaatcgacccaccaataaccaccaatcatcgatctcctgcagttcatcctcaccagcttcaaacaataatccctcctcatcctcatcatctatattgaaagctacatactgctcctccattgtatgaataagaaatcaaatgtaacaggaaaagaaaaggacaaaactctcactaaccacatccaaacagcaaacaaaaacgaacccagaaaactatatcaccatggtagaggccaagacgcaaaggtatattataactatagagatagagaaagacataagttgaggcctccttagaagaagagagaaagtcttattctatggtccatcaaaagaagaagaaagaaaagcctttcatggctttttcatcgttatactttaataacaatactagtgagcgatacttaattatgtcagtctaaataaaatattttaacattctcacacttggactacataattaaactaacaagtgctcactgaacaataatgtctatatgcaaaaatctcaagatatacaaatgtctataaaaccaattatgcaccatattgtatcaatatgatacaaataaatatatataatacataacgagagagacattagagattcacataaacatgaaaataaatacttatttagattcactcgaaacatagcacagagacttagctactgactcacataattaagtgtacacacaatatcaaagagtgatcccaagtatgcttgtattcaacaaccaatataaatccttaatatatctatcatacatgaaatctgtaactcccacagactaaatacatctttgaaacttagctatctaactaagaaatatcatatttatgatacattttttgttacgtcctgtcatggaagtcattgtcatgttggttgtaagtgtgtattatgatgctagtaaagaaaagtatttgtaaaagaaatatatatatatcgttttgagtgtattttggtaaattggctaatagggtgaggataaacataatttgttgtaaatttttttagaaaatactagaaaacactttctctctcttgagctttctcagtaaaaacctcccacaaagaataccataaatattaaggaattttactgcaaatatatttaaattgtactaataaaattagtacatagaataaaatgactactacctacaccaaacaatactcaaattatatttgatatatatcaaatcttcttaagcaaattaatatatgatgtttctattttttttttgcttaacatatataaagttaaatgataatatctctttctaattattatgtaatttctaaattcctattgatatatgagaaaattgtaaagtctttttttgtcaagttagttgacaaaatatttttcttttatggtaagattgttttgcattcatacctgattttcttaccttgtttattc

SEQ ID NO: 17855 - DNA, 7866 bp, Cannabis sativa
  modified_base (47)..(51): a, c, t, g, unknown or other
  modified_base (132)..(132): a, c, t, g, unknown or other
gcaactaacgctgcaactactttaaaaacccaaaccgtaaatttgannnnnaaaattaaaaaaaatagtatatgtaataatttcccataaattggtatgttatttaatacttacttaataatttattaaaanatataaaataataataataatgtaaagttaaatgtaaaatttaataataataaaataataataataatacaagttatttaatccaaaagagtatgttagctaaaatttaataataaaatattaaaaatgacataataataaatataaaagtataacatttattgtaaagtaaattttgtatcatgttatattgtgatataaatttggatcacttttaattatgtaagattttcgcattataatttagcacaccattaaagtagacttttaataaagtgaactatattttatatttgtattacttatttacatttctattgaaaatactcttaagtaaccgaaaatatttgagtattatatattacatactttttttgctattatcttgctaaattagtaagcgtgaagattcatttttttttttgctattcaacttttattcattaataaaaaatacaataatttttacctcatgccacataatctcgcaaaattaagtttatctctagtttatgttatggtgtggtggtcaaatcttcctagttatcacgcgttcaaaagtagtgtttcatattgtattaaattaatctaatttaacttaatttatattaaatatgctaattatttttgttgatttagttataggttattttttaataaaaaaaaaattaattgacgtattaaattttttaacaaaggattttgaatgctaattttgagtttttgactcctttattttgcactttcctttaatattaaaaaaaaaaccattaagattttacaatcataaaaaaataaaatattttttttattaaattatctcaaatctacataatggacaaaatttactaatacgtagccagtcaacaatacattctttatgatatatgtgggaacaaattaagttactagcttcataaccaatggaaatattctccaaacaaatcgaacagaaaaattgatcattttcaaccaacaccttatccaaattttcaatcgacttttcactagctgccacaaaaccaatagcataatcttcgtcaacaaaaccaatatcatcataatcttcgtcaatatcactctcagagacgagtgatagatcatcatcatcataatcttcatcatcatcaatatcatcaccaccatcataatcttcgtcaatatcactctcagagacgagtgatagattatcatcatcattatctccatcatcaatatcatcatcatcatcaatatcatcactatcatcataatcttcgtcaatatcactctcagagacgagtgatagatcatcatcatcatcatcattaatatcatcaccatcatcatcagcatcataatcatcatcattaacatcatcttcatcattatcaccatcatcaacatcatcttcatcattaacatcatcttcatcattatcatcatcattaacaccatcttcattattatcagcatcatcatcattaacatcatctttgtcatcaacatcatcttcatcattatcaacatcatcttcatcattatcatcatcatcaacaccaatctcagagagggataatactagatcttcataagcatcgcgataattgaatcgagttggttcaggttcagcaaaagaaatattcacatcaacttttaaacttaaattattattgcagttgtgatgagtcaacatttgtcgacaataatcaataattttataagaaagaataaagtaataagaaggaagattggcctgattacgaagcatgtcatcaatagcttctttagcaataatgttgtaatagctatacaataatgtcacaaatggaagttgtacattatatgtgaaaacatctgatgaggttatatcaattgtatatttcacaaataaataaattttaaagcaagggtatccttgctttacatctgttatttcttcacaattatcatatggtgatatgttatagtagtgcctaattcgagaaggagccataataataataattttattaaaataaaggaaaggtaattgatcatatgattttgagattcagacttgcctagaaggtatgttagtgtatatatagaaaaaatttagcagctaaattttaaacaatatatcctattcctactagtactattattgttattattattcgggagaagatactatattaatatattaaaaaattgaaatggaaatttaaattaaagatgacacctaacttaaatttttaaaaataataatatctttttatcaacgaaagtatgatcttttttttaaactgaaaattaaaagatcggttaaataataatgaaatataattatgagtatttattttattaaatattgtatataaatatttattttattaatttttttatataataggcgtgtggtggtagtcgaacattattggctaaataattaatatgagttgcaacactaaaactaaatagaatcaaaatatgtaagatttattattgagaataacattctcatattatttatttgctaattatttggtgttctatagtgttaaatcaatttaaatttgagatatcaagtaatataatttatatttatattaaatattttaactgttttttaacataagatatttattcttaacagaagatctttataatgagagtatatattagtaagttagctgtttaattaatattaataattagtgaaagacaaagtaatgtcttccattaaattaattagtaaccagtgttataagaagactcgatcgtatgaatgagccaatttacaattaattgagttttttgttaaagagttaataatataaactatacaatttttttccctattaagaactatactatactatagtcactaggtatgttacactacctcaaatctacataatggacaaaatttactaactcgtaaccattcaacaacacaattgtcatgatatttatgaaaacaagttaacttagtagctttataaccgatcaaaatattctccaaacaaattgaacaattcaatagttcgttttcaaccaataatctatctaattttttaatcgacttttcactagctgccacaaaaggaataaagatattctcatcatcgtcgtcatcatcaattggatcaagtaatttagtaacaaaaacattcacatcaactcttactcgcaaattacaatctttatcgtcttcgtcgtcgttgtcgtcgtcatcccacacattccacatgtctcgacagtaattaagaattttgttagtaagaaaaaagaaagaagaaggaaggtaagtctccgaaagcatggcctcaataaaatctttagtattgtggttcccataaatcaaagccataaatggaagttgtaaagtttgtgtgaaaacaagtgatgaattttgttgttgtattcttgatgaagtattagtatcatcatctaatttaattgtgtaattggtaaataaataaattgtaaaataacaaggtcgtcgttcctttattgtaataacttcatcatctattattatatcatcatcgtcattgtatggtgagattttaaagaaagaatcacctattatttgaggaaaatccataataaaagaaatagagatttgagattagaaatattatagtgtttgtttttataaaaaactttaccagcttaatcttatatacaccctatcctattaataatattattattattattaagagtatatatatcatattatttaaatataggatgaccgaccactagctttttttttatttattttttaaataataataaataatatctattatatacgtggtctcaaatatacataaaaattaatagttaatttatagcgactcgatcaacactacattagtatatatagcttcagaactaataaaaatattttctaatttttcatacaaattactgatgtgatggtcgattgataaaacaattgagtgtttatatgatcatcaatctttatatatatttgggaaataagtgagttttattgtggcctcttcatataaatatatatatattatgtcatcttgcattagaaaggtcttatattatatatatgaacctttttatttggtggaggagagtggaggccttgtcaaaagctcgaaacaggtactcaaattcaattgacacttacattcaacatttttattacgaaagaatgaccaaggttggagacaacgatcgaaaacaagatagaacttttttggtttaagaaaagtaaccacataaaatccgaataccttttaggatttaatttttgaaaacaatacatcaattaaataatattatgaccccactaatttttagttttcaaaaagccgtatttaaagtaaaattaatttacaggaaacttaataaaagaaaaatatgacatttaaaataaaatttaatatacgtggatatgctattttaaattatcataaaagtaataactttttttttcatgtataatttcttttaaaataaaataaataaaattatagtgatcgcagaagttgtcacaggttgaaaagtttccggagtagctgtacattggcatcggaaaagtcgacagaattgctgccggcaccaaaaaagtcgtcgaaattggcattgttactagaaaaatcataaagaaactgatttcttgatttcaacgacaatgctaattccgacaatttttttttacactggcgacaactccgataactttttcacaccggcagctactccggcgtcttttccaacactagtgacaaataaatctgcctaagtaaataaaaacattaaatatgaaatttaaaaacctaatttatatatatggcatagctaaaaataaaaaaaataccatataaattggtcaaacttaaaatattatatataagtcctctttcaaaaatattataataaaccaatgagacccttattaagtagttaagttttgggggaatttaggagctttccacaaatgtctccaccaaggagcgaccctacggggagaactttctgctctttctctgctgtcaaaaatagaccactaacgtaaccactcccaactgtgtagtgtagtacccatccttaaccctaccatccatttcccaccctaaattcaaagggggcttttggcacgattcgatgagaatgtaaatgtcaaactaaattaaatttttctcattctatttctttcgtctcaactttggaggatcagacaatgtatttgcagttatcttttctgatattaaaattttattgtctagttttcctatgacatctctctcgtgcgcatcaaactttattgttgaggcttatataagcatgcatttaggatagacaatgaatttttaagaaacctttccacattttgtgtaacttttgttaccttgttattttaaccattatcggttaaaaaaatattaaattaaattttaataataagagatctgtgtttttaaatggatctacttttaaattaaaatggtaataatattaatctattttcaatactttgacttttatatattctctcaaagtttatttcttccaactctactctctctatctcaaactcatataataaatatctcattagatggcctacataccgagatattaatgaatctgaaggcttacatcccttactccaacactctgttgcggccctctattgtcgggaacctcatattcctcaactccaccgccaactcactcgctcaacgccatcccaacattgcccacaatttttggattggggtaagagtttttttaggttggggtattttatatgtaaattatttggattgtgattgaaattaatttttaataaaatggagtaaaattttgtattggtaaaaattcaaggggtaaaaatactaatttttaaccgtaaaagaaacggaacctaacaaaaggggcataattatgtaactgttatattttagatagaatttttaacaagcctattttaaaaggtaaaattaggtagtatcgaaaatttatgaggcaaaaatgttgaatattcaaaaagaaatatcaaactcaatcctcaacaaatgtcaacaaacttattgtatttttttctctaacttgaagggataatcttataattaatttgaagtaaataaaaattgtcaacttcttgactaaattatccaccacacaacttgatttttgaaattattactttatcttatattctattgtagttaattaggttataacttgatattgctaggctttgtacataataactccagcaaataacatttttttttaatgtaataccaaataaataaataatgatgacttagtgtaaattttgcaacataaaaccgtgtggttctacaaatttcaaaatcttctcaccatcttaaaacacatgtctggaaatctaaaatctagataattaattcaaaggaaaataattcatatttgttgaataaaatttatcaattaaactaacacaattctagccagccgactattaaggttgtgtttgaaaataactgtgtaaatactaaagtagtaattacattatattttaaaatataagatgtgtttacatataaagtgtggtaattacatataaattcttaatattttatttagcaaaataattagtaattccacgagataataatattttttagttcatatttaaaatgaaatttttttagtaattacactgtaattaaactcaattctcatggagtcatgaaaattggagagtataattgaaacttctcaattacttacagctatataatgtaattccatggtcaatcaaatataataaattatataattacctctaattataccttaatcttacacgccctaaatttaatcaatccgctaataaaatatatttttgtacaacaaatatgaattctattttgtaattacatgttagtgtataataacataaatcccctaatattttctcccatggtcaataaggcaacaccacgtgtttgtccgtacaaaattaatagtttagtgaataataataataataataatatggtttgttatgtattattatatatttcccttgttgtcctatagtgcttatatatataattgttaattttaccaaattcaaggatataataaactataagaaagggttaccaaattcaaggatataataaactataagaaaggacccatttgatgtacttccaatgcatgaacctctttatcattttattatttgcttaaatcataatctttgctaatgtgatcaagtggttatgcaccttgatcgtattaaaaaagcattgttagaacttagtagtaccaaatactatcaaaaattaatttgtacaattagtaattagttttacataatttactttaattaaaataagatgtactctttttgtattaatatttttgtatgattgtgtattagatgcgttaaaaataaggtttaaactataaaagacaaacttaaaatttagaggggacaaaaaagaaaaaaaaataataaacaaattataaattttggaaaaaaaaaatatatatacaacaaaaaagaataaacaaggaaatttgaaattgtatgcataatagggactaaaattggtccactaatttaaaactatacaaaatttataaaatgggataatttttactaaaacccaattttaccccctcattctaaactgactctctctctctcttcctcccctttctccctgtcttttgaattcccaccacccacggaccgaaacctatcccccccccccc

SEQ ID NO: 17856 - DNA, 5489 bp, Cannabis sativa
  modified_base (66)..(72): a, c, t, g, unknown or other
  modified_base (4933)..(4936): a, c, t, g, unknown or other
  modified_base (5375)..(5375): a, c, t, g, unknown or other
tatcaaagtctgaggagcatggtttagtacataaacaatcaatgaaacagtaaaattgaatgaaannnnnnnaaagtccttaaatctaacaatctcgatagttcagcggaaattttaacagccaaaaaaattcaggaaattggtatatgttaaagttcgggaaaaaattactaatcggccacaaaattgcggtgcttgaaaaaaaaaacaaattaaatagataattatatatgaatgagcacttattttttttttttgttattttttaacaccaaattatctagtctaggtggcaatgagtagttagttgtaattagttgtgacaggttttctcttactattttgttttttgtttttttttttaaatttaattaattaattaattttttcaaaaatttatcaatctttgttctttggtttctgaatctctctcattctctctcatcagaacacaaatcgcgaaaatcaagaaagccaaaaacaaaatattattaacaaattttatattctttttaataaaatcaaatagaatcttagggtttccaattctctctttccctctctctgcctttgattttccttccctccaaacacccgcgaaagttttatcacaaggaggaaaaacgttaccacctctatccggtggtcgattatttttctgcatatttttctttgttcattctttttagatcctgagttttctcggaacagctgcgtttcccgggaattttgttcgctctatttccagctgtaatcgacgacctagttcggtaagcctcttttttatggatttgttccaaataaataggatgagcaattttgatttttttttcttttttaattactcaactatttatgtttattcgtttataatcaaatgaaaatggttttttctccgagttaatttcgattaaattctatggtttacttgaaaaatatacatattattcttcaataacctttcttatattttagtttttggtctggaatatcagtttggttttttctctacattctttaaaattcaaatttatttattaatttttttttttaatgttttggatttaggtgcttttattttcatgtgatttgtgccggaggaaaatattgctggtggatggagtaaagaaagggaggaaaatcattattaaaggctttgagattatctgagagagatttggaactccaagatacagtttattgttttttttttcttctttgctgtggattattggtcaatatctgtagtgaaactgggttctctttgatcttgaattgtttgaatattggatgagaagtgttttatggatttggaagcgtgtccatcttctagggacttggtgaaatgttgtaattgtggttgtagttgttcctcgataagtggtacttcagggccttggtttaggtctgtgaagagaaaatatgatgagtttgaggaaaataagcggttcttcataccgggctttgaacctttatcggttgctcgggttcaagttgagaatgaatgtgctgcactacgagagatggttggtaaccagcagcaaactatacaggatttgtatatagaattagaagaggagagaaatgcttcctcgtcagctgcaaatgaagccatgtctatgatactcaggctacagagggagaaggctgaaattcaaatggaggcgcggcaatttaagcgttttgctgaggagaagatggcacatgaccaacaagagttcatagcagtagaagacttgttgtacaagagggagcaggtcattcagtcactctcatgtgaagtgcaggcgtataagcataggatgctgagttatgggctcacagaagatgaggctgagggtgagaagggttataacaacatgatggaatttgactctcaaaatgagattccaatgtttgaatacccacctttgaaatgcaatatcaatgagaacctaggttctttggaggttgatgatgacgatgttgcagatgttgaaaaatatgcatttggtgaaacacctcgcggtaaagatcacttgaaaaatttagagcataggattcaccagatggagagatgtcctagtaataatcaattggaaggggattttggaggtactaagaacattttagagaaggtgatagttggccactctcctaggcggtcaagacatttcaggaaatactcaaatgattcaccttcattttcaggcatggtcaaagaaactggcacagatttccacactgaatctcctaggttcaatgttagtttcaagaagacagagtatgttacacatgcagaggagtacaacacaagaaatacagattatggatcagagattggagacgacatgagtgatagggtttatacgattgactcgatccataatggggtgccttacaatggttatgcagaggttaaagctggagttgggaatggtgaggataacataaacactccaagaggatcttatagtcaaggtgatattggagatcccgaaatcaagaagctctatatgaggctccaggcacttgaggctgacagggaatcaatgaggcaagcaattctttcaattggaacagataaagctcaactagtgttactgaaggaaatagcacaacagttgtgcaaggatgcgtcaccctcaagacaaattactgttaaaaagccatctgtacttggaagcttttccttcatatctgttttcaaggtaattgcaattgactgtaactgattcttttgcgtctttgacatcgttttttttgttaacttcaactaattcaatgtttcttttgatgtttgatcttcagtggattgtatcctttgttttctggaaaaggaaagctcgccgaagcaagtgagtaattcattaatcacttacacaattattaaagaataggcctttgacttacttttcatgggttacattttttttattctgtgatgataaaattgaaaatgcatcttatatgctgatgattggatcaatgatatttctgattaagttgatgaacaacaatgatttgtaacgaactaaaacagtatcccatatgaaatatgcttatgcgccttttaaatatgtagcagatttatgcggaaagcattgtgatagctcaacacagaacacatagctcttgtaaagagtagagtgtacccttgagcaattcgttgatcactagttttatttatgaaagaaaataaaaaagggggttccttttaatgtattcaggctgatgtttagaatagaaattgctttctttcgtcttagtgttggcatctgatgttcgtctattgtttccgctcattctttatttatgactgcagatacatgtttgggctatcagcaaacagtatgggtttactgatgcttcttgaaaaaggtccccgtacacggcattggagatgtcttacaagcactcaggtgtacaaccaataatcaaatcatccatacactaccctattgaagataatgctcaagtattggactcctttttggattatgatagcggattttttaatttttttctttccttctttttcttcttggattgtttgtaatttgcaaaagttaagattggtttggaatgtaattttccatttgacctgtaaatcatggacgtggatgggatgtaaggccattgctttggtcatataggttgagtttgggggttggagttcaattcaaaagtatagctctcttgtacattaccaatttggttgaattccttgttcaaatatgcaatgcctaactctttcttctcttctaattaataatttctactttctcccttcttttcttttatgccggccaacgtgtgagaaaattgacactgaatgaggggtgtgtgtgtgtgacagcatagtcgcctgccaatgagatatattacagttttgttgactaagaccatttctatccaaaagaaaaaacctggagttgccttggccacgttgtatataatcaaatctacattgtgtgtggtgtatattctaaatctccaccaatgaatcgtttcaataaatatccttagattttgtcttactatgttgttgttttttcctaagagaagagtcttactatattgtagggagggaaaaaaaaaaggatgaaaaaatggtagtaaagagggtggggttttaaaagcttagttgccatgtgtattattaataggaaaacttgtatctatagtttttgagactacctttggaattttatagcttttatatgatttgggatgtttccattggattctatgacaagaattacataagaggtgtctaactaaattgtttggtcgtttgacttgtggttgttaatgcgtagatctatgaaacattatttggcaatactaccttacatcaaaagcaaacatagataataatattatattatgtgtaccactactgaaacatttgcaattactgccttgcccctcatgaaaaacaccaatattcatttattaaaacaattttgtaccacgtaatggtgcacctacacacgatttcatcgttttttgactagaagatcaagagctattgagactttggattatcattattttattagaacagtcacaatacttggtcgcttaattgttttaaacaaattaagggacacatccaaagcaccaatatgtaaacacacacatataagtggtgaagtgtgaggatggttaagatagttggaaggtttcgggaagtagttgtattaggcttgtggagttacaaaactattattaagataaggggtgaggaaacttctgctttaatggcttaattgcaaggacaggcagagagacagaacaaacaactaaagcattatttttgccaactgaacaaaccctcaacagtcaagatgtcaattatcttatcttacatcttgaaattagttaatgaaaatatttgtatttaatcaatattgcatgatcattgtaacaaataataataataataatnnnnataataataataataataatccctcaaaaattgaatgaatgaaactaaccattacgaaatcatattaaacaactcatccaaaatttgcaagttggattaaccccgcaaaaagaaagcagaaaaaaatgttaggtctaacccgacaaaaaattactaagttgggtaagttggcgaaaaaatgagtttagctcatcgtgcaaaaaagtttagcaagttgacttcaatttgtctttaaccatttgaggtcagcttaagtcgctatatttaggagatatggaatggtgcgtgtttgtgggaagttttaggttcgagttcgagattgtacaaaatgttgtgtatatataaacgctttaataaaaaaaattaaaaaaaaaattaatttatcttttcttcctaagcaagtttctatcacgtgttcatttattatagggtaaatacnattttggaccctgtgttttgcacaagttaccaattggatcttgttttttgttaaatgacaaaatgtaccctgtattttttaaaatagtacaaataagaccctgaattgattttt

SEQ ID NO: 17857 - DNA, 4483 bp, Cannabis sativa
aaacccttatgtctatatttcattgttttagagaattcatatttaagatgttaatcaacattcttgttagtaaatctagattctggtaaaatattcccaacagtttggacatgcaaatcagtcaccatgggatctgtagaatcaataggttgagttcttcgaattgttactgccatttgaattaaacataatcaatccaattgtgttcttgagttttgctctcaaagaaagcaccaaaatattgacctcacttttggccaacaacactaagttctaaaagcgataaggaatcaataagattcacagagaatataattaatattaagagaaactaagaacatgatatattatagaggtttatccccatttttcggtaatagtttacttccctttttgttgtatttaacttatgagtagagaagcaaaaatggcttgatctccctcgaaagctttacaaagaaaatgagcagagtaatagctctcccaaataaatgatttcagatcccattacaatggaattgctctactattaataggagaagtttacaacaaatattggttttccaaaagctgttagtccacgaaaatagggaataaatgactttcctaaatcaggagaaatatatatgtggaattccctttaaattaggatttgattacatataaaatgaagaactatattaaatatattctgtcacgcgttttccccttggttggttcgtatgaggttcagaccgcttctctccaatcaggtcagcttatgcttattttatgcggtaaactatacttggtcatctattattacatccgattgagtgtatatcttgggcagacattttgtgaggctcttttctctgcccaaactttgatgcgatgatacaggtcacacgaagaaatgtgctacgtcatccggattaaattcaggataacaaatagtattttcatggtcataagaatcagatggtgcgccaatatctagtgggtgtctttgatggaagaagagtgaagataaaatctttcctcgagtctggcactagggtcaagtctgagtccgggtccaatgtctatgtttgggtttgggtccagataggggtacgggttttaggtctggggtttagtttcaggtcagggttagggtctggggctcgacaccgacactgggaccgaggtttgggtccaaggtggggatggggctggggtctaggtccaggtctggggttggggtctgaatcttggtctagggtcggggtttgggtctaggtcggggttggggtctggggttggggtttgggttcggggttcgggtctggtgtttgggtttgggtccacagtctgggtccgagtctgagtcggggttcggattcagggtcggggtccgagtctgagtcagggtttgggttcggggtcggggttcgagttcgggttgacgcttgagtttgggtctgggtcggtgtcggagtctgggttccaaggtctaggttggggttagagtctaaaatattgactatgaaaaaaaaaactgtttgaaaaaatattgaaagtaactttttttttgttttcaaaattttcaaaatttgattctgaatttaaaaattgaaaagtgaaaacaattttatagaatataattttggaaaaataattttacttttctaatttaaaggacaaaaatttaattaaaaaagtgttaagagacgctccctaaaacattcaacaattaaatttttgagttttttcagtattatacctaaaattaatgttatttacaaaaatacttttaaaaaaattatttgcacaaataccaatgtagcatgtcagcatacatatcgaaattcaaaaaaaaattactgaaaataggaaaaaaatttgaaaaatcttgtttcagaaattttttctttttgggagttttaaaaaaagtagccatttagttacttttgttgtgaataagaaattaattggttacttttctattaaaaaatttatttcagaatattacacatatataaataataaaataaccattttaatatgtgagaaatagatatatttttgtgtctccaaaaaaaaatgactaatattaaaagtaacttttttgttttttattttttttttgttttgttttgttttttttatatttttaagttaaacattatgttattttattgtttaagataccttaagattaccttttttttttaatgtaaatatataatctttaagatactatctgattttcttaccaattattatagaaatttattaaaattaattgattaatatactattttaatttttttaaaaaaattaattatttatttgttatttaaattaaaaaaaaaaaaaaagtaacaaattagtcttccacatattgaatagtataattcttgagactaaataataactcgtgttggttagaaattttttaaacttttgaaaaaaagaaagataaaaaaaaagtgagaatgtgtgcaaaaaaaaaacaaaagaatgattaggtgggtgtatgtattagcttaatttaagagacaatagtgaaacatgttcacttttggtaaccattacaaaaacagtgggtatattaataaccaacaataatttcgtaaataatatgttatttacatcgtgggatgtaattattcttacattaaaatgatcgtcttaaaaaataggtcgcaataatattactttttaattaaaatgattaacgctataattttttttttttaaattatagacaagagaaataaagatagataaaaaaattaattaaaacttaataagtcacccataaaaagaagtggtagaaattttgacgaaaagagaaaaaagaactgaggggtaatatatatttggcacctgcctagcgagtaatatagtttaatttcattatttttattaagaatttatctttttttaccccctgtacttatgacactatactattatgccccttaatctattcagcttgttacaaatagtccttgtataattttatatgcttacatttactccttttgtttattttgtttaaaaaaaccgtttgtattgatgatgtggtattataataaaggatagagtagtaatttcacctctgtttagagggaaaattgactatgaggtggcataataactgacaatgaaatatgattaaaaaataatttcataaccttttaaaaaaaattaattttattaaaataattgcaatcgttttttagcagttcaaaatagaaaaggtgtaaaattagggttctacagtattattgactgaagagatggatatcactggaaagaacatgggattttttgaaaatcaaggtaatgatattctattttatgggatgttatttttcattttttttttcctgtgagttgtattagctagttttagagttttgaatgtttaaaggaagaagacgaagaaggaggttgtaggcactctttttgtgtcatttttaactgatatttatagaggaaaaaaattagggatttgatcattgtgctatttattttatccattcataatgtgaacccacatggtaatattttcaagcttttttattttaatattgaaaggttgtatgtgtaggtggggtttgtgtgtatctgtgtgtgggtggggtatgtgtgtgtgacagtgacagtgacagtgacagtgacagtgacaatgtgtattttaacttttatatacttataatggtttaaatattgtaaaacatgatttaggagcaataatttatctttctttttattgaaaaaatagctttataattttgtttgtttgttgtacagggccaattacaagggtagataataatgaggttggggttgagttaggtgatggaaatgggacacaagataatgatatttggctttcacaacttgatgaaagtgagcttatttttggtaagggaaatctgacaaaatttgacgacagtgtagctgcttgtgttgacctagaaattgtaacaaacgatgctgctgaaatagcttcaaatgttagaggaaagactgtagttgaaacaactaatggggctgatgaacatgatatgtttggaacaggtatgtttgctgattttggtgaggatagtggtgaagaagatgaatacgaccatgacactgagtatgaacaggatgatgatgacctggttgttggtgagacagttgagaaactcctaaaagggttagggaaaaggccagtagaaattgacagagatgatgagggcatcattgaatctgatgatgaatatgtaccatgtgatagtggtactgatgcagagaaagaggatgagatgcccactaatcataaacaaaagaggaaatataaaggaattatactactggtattgtaagagtttgatccagaaattgacattgacaaacctatatttaaagtcgggttgtctttttcttcaggggcaaattttaaaaaagctgtgagggaatatgccataaaaaatggtaaggacattttgttgggttttatgcc

SEQ ID NO: 17858 - DNA, 4139 bp, Cannabis sativa
cacatagaaaaatttcactaagtgttgattacataacatggccgagatgctctttcagggatcgtcgatgtaatatcccaaaaatctaattatgattaattagggcattttataaaatatggattaataagagtatattgggtaagattatgatcttactaatttaattctgtgagaattagggaattttgtcataaatgattaaataagtgtaattaattacagagattttgttagaatatgtggataacatacatagtattttttaaatgaaaatatttttttaggtctaacaaccatgaaggcccaatttggggctaaaaatatcacaacagtatttaattgcagaattagtgaaatcagcaagttaggttgattttggaatactggagtatttcagggtatttagttatgaccaaaatatccctagggttggattttggatttgtttaagtagtaaggtaaggggtaaaatggtcattttgcctaattatagtaatttcctaaagtattattcttttgtttctttggttagtaattagaaggctgtagatagtgggataagttataaaattttaaaaaacaaccatagagaaagtcaaagaaactaaaacaaaaacaatcactctcatccttcttcctctacctttggctaagaaaaaaacccaaagcaagactaagtttctaattgtttcttttctgtccaaactcatctattctcatcctagttgtagttaggaggtgattcaagctaattatgaagttaaaggtaaggttctatgtcctcctcttctttttagttatggtatggataagtttagtttggaaattatgtttgttgactgctctgagtgttgaaaaggattcggaagtgtttctaggattggttagaagttgtttgagggtttacaatcatatttagtagcttttagaggagcataatcgagcttgagttcttggaactcatgcttggagcattaatggcgaatcttgtttggtaatttgtttttactttctgtgattgggctatgctctattggtagtatgtaactgttctataaagtttgggactatttggacaggtttgatgggtgttgagagcaagctaggctcaaggttcgttttctgtagaacaccggtagatcgattttccaaaactggtcgaccattttttttgggcaagaaaacataaaaatggtctaccgttttgagtgatgttcgggaccccaatttttcttgatgtttaggatatttccacgctatttatcgatagggaaacttctggttaggaatttaaagacctagaatgggttaagtcaagttgttgatcaatttactgttgttgtaacttagggccaaaattggccggcgtttctccattgggttgaccagcatgcatgaatctggaattaaaggtaagaaaagtactattttactacataacatgtcatgtgaaaatacgattattattgtttgtaaattgattgttatcgagactaacatacggtgattaccgttatatgatgaaaatatattcttattaggaaatgatgaaaaggttgtcttattaggcaatggtgaaaagattgtcttattagacaatggtgaaaagtcatgactataacttattgaacaacgctcaatgagtggaacaacgctcaatgatctcgggtcctatgtcacgacaacaaagctcgataaataacttattcaaaactctagaataaccctaactttgtaaccggacatatctaactccccagtggttcaaaataattaaacatcactaaaatatcctaatctaggctctgaaaaacaccctaaacaaaacaagtttcgaggctaaaaaccagagttttcccctactggcaaaactggttgaccggtttcatagcacctgtaaaaccggttaaccggtttctctgctggcagaatcgggaactttggtttttcacgccaaaaaccaaccaaatctcctccaaaccttttcaaacttcccagaactgttcaaaaccataaatacaatgtatcccatgcaccaatttacaataattcatccatttaatcaaaattacacacttaaatgaaatcaaacaataatcttcacctaaaccaattcaaatcaaacagccactatttctaaccaattcaagctttaacaaattttaaatcaagcctaaaaacacattcaaaactcaccttaacatctcagccccaaaatcattgaaccctaacccaaaactcaacctatatcataagaaattcaaagagaagggaaataaatcttacctccaagcttgcacaacttctaaacctcactacttcaaccaaattctgcttgaaatggagtgaaaaatttctggttatgcttattctctagggttgttgagagaagggaaaaagaagaagaggctttcttggatttttggttcattattcttatttatccctatcttgataaacttaataaaataaaataaaataaaaaaaacataattaatttaagttaaagttcagcctaaagaaacacttaagggaaaaattctaacattacacaaaaatgaccattttgcccctccttaaaaacttaaacttagaataaaaccttagggtaatttagtatttttctactcagtctcatcaaaccgttaacttaaagttctaaactaatttggtataaatccacatatcacaacttgattaccgtgacatttttgaccaccctgttgagtttccatggccgccgaacccgaaaatattttattttgaaaatagtatctacaacacccccataattcgataaaatctccgtaattaataaattacgctctatttattcatttactcatatttcactaattaactcgtaactaggttaagtgagattataatcctactaaatgtccacataatcacatatttaataaaatacgtccgattaaatatcattatatttttcgagatattacaagtaccatgtgcatgaagggtttccccttgtgcgcttgttcccacaaggccagttggcacatgaggattgtttccagctctagcaaaagcagctcttggaggagttgttctgtttctagattcataggcttctcagattcattgagcaagatttgcacttcgctgttcttgtttagcacgttaattcttaacgtttctccaatgttccatgaaccaggtttgaaatcgtttatgttacttgtcaagagaatcttccagtagttgttgctggctagccactatttggctaagttgttcaacctgaggatcgacctctttggtgtcttctagctccatacgtggctctccaggtgcgattcagtcaaagttttagtaccacaatttggtggccctgggggatgagctttgtagcttgttctgaggcctccacctagcatctgagatgcaggtgtcatcctatcaccagttctagtgactggcgtgcccccagtgggttggccagttgtggtgcttctttcaacactggttggtcttgttgcaaccttcttaataagtgtctcgagttgtggctctcaatgaaagtaccataataattatgcagaaatcttaacacagatctgaccacaacttcttgctagattggcaagagtgtaatgagagttaaatataagtaaaagagagacaacaatttatagtagttcactctctgtgacgcgacggtaatggagctacatctactttgaatttttatttctcacaaaaattacaaagatttggctaattgtggggctcaaaattctagagagacaaattagagaaagatgttctgaccttatggggacttagaagaatgtgaaaaattacctagaggagctctccttttatagggaaggaagtcctattaaattaatggttaaaaatacaataaatatgaaaataattattttatgcttatcttggccattgatgatgattcatgatgatccaatggtaaagattgaatcttggtggaaattgtcaattttcgaactttgaatctcgttcgtcggattgtttttgagttatatgctagaaaaatcaaaaatttgttgagggtaaattttggacccaaaatcttaagaattgtgatatgtgtgtgagacatgactgttggtttttatgccctaaat

SEQ ID NO: 17859 - DNA, 16184 bp, Cannabis sativa
  modified_base (9734)..(9745): a, c, t, g, unknown or other
  modified_base (9820)..(9828): a, c, t, g, unknown or other
  modified_base (11324)..(11324): a, c, t, g, unknown or other
aaattttttgattttctaagcatagaaaatcaaatttccctttttattattaataacaaaaaatacaagaaatatggttcttgttatatatattggccatggccaactaaataaagctttaaataacttttaggaataattatatctaacaataccggtcaaagttctagctgtagaaatacagaaaattataatttttcacacataacatattggatttttatctacactttttctcctccaaatccaatgaactaactcagcccaaattttgatgccaaaaggcaaaagctactagatggtggtgctggtgcacgcgtgttagttgcataattggccgagattcttaccacgccaatggtaacgaagagcattgctactaggcaccagtacttagtacttctaaatatattgctttgcaatttgctaacgatattttttaaaagttattatattaaattatatgggacctaatagttagtcagatcaatagttatattgacacgtaaaaaggtattaggtggctctttaggtcccataaaattcagctcttggtggtgccgaacctgattcagatcctctcttccagagtttttgacttttaattttgggagggaaatagaatgagaacctgatccaatctaatctagttgtaggtagtcaaaatttattagatgctgtacaaaataccaaataatatccgcacacatatcagaccagatgctgtacattaaagcaattgatattgatactgattcattaaaccaattgaagggacccaacccccaaaatcaaaccaaaaaaataacagaatgaacgtgtcaaatgattaactaattattaaactaagacgctcctcaaataataactttaatctcttttttaagctaccagatataactaaagtctaaatcatcacactattcaacggccttatagccaccatgttcactcattcttgataagatttgcacaattgaccatttttctcataatattaattcttaattgaaagtaaaagaaaatgtaataagaataagtttcagtagattgtggagaatgttggaaaaaggtatgatattataacatctgttgatatgataaatgtacatatgcttcaatagctttgcctaaatttctaaactaattagcaaaacaaaactaaaagtcaataagtaggccaactgatctgatcaccaagaattgagatctcaaacctttatgatcaccaaaaagttgaaaatacctttaaccaagaggcttgatatctatctgagcttaattacaacttgggtactcttcaatttagctcatctcaactcaactaattaattcaatcagctagcataagccaggtgatggtgatgaactcagtcatgccagcaaaggagcaacacggtacacctccaaatgatgtaaagccttgctctctgttctctaatttgctttgaacaccttggccatgtcctgaccttggaactactacttgaacttcttgtgtttgagaaagcatttgcagctgccattttttctcagtataagaccaaagtaattaatgctgctgacttggaattatgggtttggatcagtgttttgtgtatagtttttggtgggtagagaacagaatttgatgatcagagtatattagtagtgatgatgatatggtttttgaaatcattgagatcatacacatgtatttatagcctagatttgaaaattttgtggtgcatgggtgacaaagggttggccctgaggaccagagcagaccccactgttttggttacgtgacaaatcagacctattaagccttgtcccctttgacacacccctttgataaagacccaacagcaactttcccctttcaagggtcatcttgtcttccatttgctacattaatattatgcatgcatttgaaacaataaataacaatttttcattccaaattcgaaactaccatttggtagtggtaataatttaataagaggcacaattagataatttacagttatgatatttggaagggtgtgaaatgattacatatcaattttaacgtatgagcatgatttaataatggtaataataatttaagagaaatttaaaacaacatcagatagtggtaatagggtctgggtcaaaaatcatatctattcaatataaatgtatatgtattatgtatattcattgatgtatgttgtagattcatatgtcgtcctttttgttaatttaataatatttaagattaaaatagtgactaattggtagacatgaaaacatatgtatttttcttgatttaaagatgattgattacgttcatccatgcagataaggtgtatagaataagattggtgggaaggtatattattgatatattcgctatatatcagctatagctattagctataattaatttttgtattgagaatttaattaaataatactttttatacccacatcttgctttgtaggcacaagttgatacaataggaatctgtgcagctaagtgtttgagaattgattgtgactcctcaccattaaattttttggccagttaaatgttaaaaattactagtgtgtaatattttattacgtgttaatatcgctattgatcgaaataagtatcaaataccatatagtttaatgtaaactttagtaagtatctaataagatccaatgaaaatactcattacataagtacataggttaattaatgtataaacctatatacaatacatacatatattaattatatattcgtctaatattgtttaattattagagtaggggtacgtgaaaggattaaaaaaagattaggtgacattatataattttatattatttataaaaaaaaaagactaaaatttcacacgtaaataataaattaattttaagaagtttatttgggcggatcaattccttgtatatatttatattacatagatttgatattattatttgtggattaccgattgatcgatataacatagcacatgacaattaaagtgatgcgtgaatggttatactacacttgttctacctgttcttttattaattgttctttatatatattcattattttttgatatggatgtgtaaataatagtcaaataaaccttaattaatatagcattattattgttaattgttatatatcactagaagtaagctaactaataagctgcaatgacccatgaggggcccatggtactggattggtggtatgaatatgtatacgttactatatgtatgtacatatatatacattattattattaaatgtagagatagagaggttcaaaagaaaaccccacaagaaaacatgtggtctctaaacagagttcaagacaaaccaaactcagaatattgcgttgaagctgcggtgagtacgtagttagtaattagggatttatacgtataaacaaacagggacaagaagggggcaactattcttgtagtggataataatatataattaaatttattggtggataaaacaagcaatattgttattgatggtcaaatcatgctcacacctcttgagttgacacaaaattattatttacaaaattaatagtaagccctttaacagacatactttagtagttattaaacagaaaaacaaaattcaaaaaatgactttcttgtattaatattcttaaaggaggtactaaagaaggactcaatctctagccaaatatgggccatcccctcttagtatagtggatatatatatatatatcaacatatataatatctctttttcaatgctcatgcaacctgcttttgaattgtagatttaatatcttttttaatattaattatatatgatctcatgaactgttaatttatacacaaaactttagatgccatatttttaaaaccccacatttataataatttagttaataattttttttaatgaatcaggtaagtttgtattgcctcaaacatatatatacaacctaacaacactttaatagggcctgaaaactgtcatacaataactcctttttacagttgtataatccaattcctaactgaaatattaactttctttggcattctaatatgtaatttacttctaatgtcagatgtaatagatttgaaaattacacttggaacctgatttttttttttttgggacaaaaaggcttgatttgggattgtctaaccatgaaaacttacttcctagtcttcaaataccttgcatcttctaatcgctttgaccatggcagctgtttttcattggagccaatcattgacttcctcaaacacgtagattggattggaataataaatgatctatggtcttggcaccataaccacacaccaaacataagccatttttcactctatatgtttattcgctgtaacttgtcttttgcaccccaacctgtcaagcatgactaaccacaaaatgtatttgtgctttggtgtactaaatccctcccaaacttcttttctccaatctaatttactttgactcaatctcaatttctcatggccccaatttatgtgatacaaattggcagtgacactgtgcacttctgtacaacttttaaaatgatccttcactaattcgatttgttgccaagtaaacattatggactgatgatttgatgcataagttattctttttaattgtaatagcccaaatatacttgcctgacgcaactatgttccatgtaataatgtctctaaattcaagaccccaactgatttagacaaacaaactttgctccatgccaccttccccagtcctccatacttggttgcccttttctataggattgctctacaaacagagttaatttcctttaaaacctcctttgagagaattataatttgagaccaatatgtatgtgtggtgaattaacacctatttaagaatcaaataaaacaagaattaactaactagaatggcgttatcaatcaatgacataaaccaaaaattaagtgcagaataaactaaatgaaatagagacagaatataactaggttcccattttgtggtgactaatccccggaatgaactgtcctttgaccaagctctattcgatcttcaacaatggaggaatacagaggagaatacagagtttaatctcattaacaatggtgtcttgcacctcactaatgatgtcttgcaccttacaaatcaactcacttgagagagatgtgatcaaacatacacaccctctttgacaaccctcctcactcattacaaatgtaattatcatttaagtttctctctagatcgtcacctaaagaagtagtactcccaaagccttatatagaaaactcaaaaatgagtggtacacgagttagtaaactgaaataactaactcagaagctaactggacagacctgcaacatctagcaggtcaccaaatgagactaacagtagaagtaaatccacctattttagtcacttggtaaaagatatccttgtattcctttaaagttttgacaatgcctctaaacacagaggacttttagtactcttcaatgtttaacaagtttaggcaatgcttaaaattttctcttgttacactcttggtgaacatattagcaagattcttattggtgtgaatcttctttactgaaatctccttgctaccaatgatatcacttataaaatacagcttgatttgtgctttgaccattcatgaaatatggaattcttcataaggtgaagaacactttgattgtcacaataaccaatcaactcatctatcttgataccaagctcatttgtgaaccctttaagccaaatggcttcctttgttacctttgttgatgttatatattgaaccttagtggatgatagagcatatatcttttggaggttagatttccaactcacataacctccaaacacagtaaacacatattaaggatcttctagtgtctaggttagtagtaaaatttgagtcaacataacaaatcaccttttctttgaaattacctagttttcccaatactaggccagtgatgagtgttcctttgatgtacctcaacatccatttaagtgttgtcagtgttcttctctagggtcttgaatgaatcggctcactaaactccttctatgtgttaggtcaggtctggtgtagaccatggcatacatgagactgccaactccactagcataaggcacatcatctatctttctcctttctgtctcagtcttgggagattactctttagacaatttaaagtgcagatctagaggagttgcaactggtttagcatcagtcaacccaaatttctcaattactcttgaggtagctgccttggcttaacatgactatatggggtttgttcctctttatctcaatccccaaaatcttcttgaaacaaatcctgatagaatttttttgatttaacaattctcaattattgtcttcgaaataaaatatataaagaggcctaggtcgatcaccccaagagtaatttttcctattcatatgcctacctattcatcaaagaatagaatgtgaaagggcaagatagcaatcctcacaattttatctctgcccaaatcttgtgctacaaaaagacaagcagtctcatagaatattgttttgatatttttttgtaattgtcctatctttaccaacaattagtatgtcatctacatacaacaagaggtaaatctgattgttgaaatacacacaagtgtcatatttgcttttggtatagccaacttctaccataaattcatcaaacctcaggttccattatcttggagcttgcttcaaaccatataaagacttatttaaagaaaaatcttatctggatcattattttcatagccttctgaaatctccatgtagatttttcttccaaattctcatgttaaaatacagttcttacatccatttgatccacctcaagatcaaattttgtagctaaggaaaaaattactcctattgatgtttgcttgaccacaggtgaaaaaatatcattgtagttagtgccctccttttgaataaaccctttggcaattaaccttcccttataccttgttccttccactcttggaattctttctttccacttaaaaatccatttacatcttataagtctcttattcaattgtctctttactataatctaggttttattcttctcaattgacacattttcctcttgaatggcactcaaccattatgcaccatctttacctgtaatggcctctatgtagcttttaggttttacactctcaagatcttcagctactgataatgaaattgatgtaaagtcagcatatccatacttttctggtgctttggtgatcctcctctgtctgtccctagccaatcgatagcctttcaggcctatttaagcatcttatgtggttgtagatttatgtagatcatcttgtgattcatcaattataaatttagacactaagtccatctcaattcgaggtctactactccctgcttcttgagctgaggtaatatgtgtcttctttaccacgaccatttcttcttcattgaagacagaatctctgcttataatgcacttcttgtagccaagctctaaacaccacaatttataccccttcacaccatcaggatagcttagaaaaagcttgtcctacctaatatgagcatatgcaatgcatccaaacactctcagttgttcaagcttaggtacttgacctgtccacaactctggtggagtcctgaagctcattggacagaaggacatctattcaccaaataacaagctgttttgacagattctccccaaaatggtctttccagaccttctcctttgagcatgcaccttactctctctatgagagttctattcatcctctcagtaagtccattttgttgaggtatgtctcgcacagttaaatgcctagctattccatgttctttgcaaaattcatcaaactaatttaagcaatattcccaaccattgtttgttctcaacttcttaatcttacatctggtctgatttttaatcagcttcttccatgtgacaaaagtgttaagagcctcacatttgctttttaacaataacacccacacttttattgaataatcatctataatactgataaaacagctatcaccacccaaggtcttaactctgaaaggaccctagagatcgaaatgtatataggccaatctctccttagcaatatgcacatgtaataaccgcatgattacaatatagattagtagagtaattagcattaattatctttattttatagttgtatatatattgtgggtcctatttttataaaatggacattaaagttataatttctcaatttcagatattttagtaaatcgaagtgtattattcttaatatatgtgaaatttataattttcatgatttgtcctcgataacgatggaaaatatgatggatggccattagagttacatgggtgagtttagaaccttttacctagtgggataaacattagagatatttagaatatcgagtttaggcggggtggtggtttatgaccattttacccctaagccttaagtttgcataaatgtaaatgtagggcaaaatgggaatttaacatgagatttctattttgtctttagtattttaagtgagctttatctagtataatctgaagttatttttaatttaaggaaaatagtattttgatggataaacatgatgaattaaaccaaaaaccattctcttagtctctctccctctctttctcgttcttcttgaaaccaaagaaccaagggttcaacttagttttctgttgattcttgttggaaattaaagggaatctagtagcttttgaaaggggaaaattaaggtagccctagaattaatctcttttaagctttaaaaattccttttaggttatgcatggaaatattaaattagattttgtttgttaggatttcgtttgagattattttctacaacttagtaatgatgttttatgcttgttttagctggatttgttggtttggtgagttgttgaacaagtttgagtttgaaaactcaaacttgactcaacaatggagttttgaataactatatgattttttttgctgttattggatgtttttacatgtagtctaaaaagttttgtgaagtttgggaacgttttgagtgagatatgaaatttttaaagttttccgccatgaaccggttaaccggctctgctgtaactgtagaactggttaaccgtttcaccaggcaagaccgtaagaaccagttatccatgttagacttttttactaaaattagaaaaaaaaaatccttgaattcaacaatctcaatggttcatggggtatttttaacgaccttaaaagttgaagggacatgatttgatacatgttaaaattcagggggcaaaaatcctaattagcttattatttttatacaattttttttaaaatttaaacttgggacattgatctttttgtgaaatagagaaatatacataactattagacatctctacgaccacttaaatttatgatttaagtttgttataaatttaacattatcctcaccccacctaaagtttgttcttatgcccgccctctttacatagagtaatttgtgatataaatactgaagttaaacttccagttataaataaatacataaatttaatttttagcagtaataatacataagttataattctgaaacttttaagtgttatggtaaattgtcacgtgacaattcttaattggtctaagtaattaaatttttattttttttaannnnnnnnnnnnatataccaataagaaaatgatataataacttaatttaacagtcaagtacatacaaagttttaaaaatataacttnnnnnnnnntaccgccaaaaattaaacttatgtatttatttgcaactaaaaataaacttaagtatttataccgcaaaaaattccttatacatattgttttttctctgcttaataccaccatttattcacctttcaaaaaaaaaaaaaaaaaaaaaccacaatttatccataatcttacatgttttcgttaattttttttatattttgcctaatttttataatctgttttcttttcttttatttttgttatcaatataaatattttataatctgtaaaattatttaattttaacttcaaccaatgtctattttttttccagattacctttaatctcaattgattatatcgataatataatataattcaaaagtaacatgcatgagcatagacgacttttttttttcagaaactatatttaacactctgtatgcagtttcaaaataaattctaatctttcgatttgaaaatttatgaatgatagatatttttttattttttgtttgaaaaatcttaagagagtactcatatatttttattattattattatacaaaaaaaatatcacctcagaaactagattgattgattaccaaatctaatgtaactaaaactaattagcatggtctgtcaatgtcacaccacctttaaatttaatcaattggagaccctacaataatactaaacacgtttattgttatataaccacataattcagcacacaaatctatgttaatcattatgattagccctaaccagatagttttgattaacaaattatatgtaatcaagctgaaaagagagagacagagagagagagagtggagtggagcccatatgcatggaaaaatgaaatggagacatcataagaaagtctcccttagtcacgtgcaccatgtcaaccactaccaccactcattctcaacaccccaactcaactctaataataataataataataataataataaaattttgtaagcaaaatagtccgacatatgccggccacttatcattgccggccgtcactacatgtgtataaatctttattcaaactcaattagtcaattgctatgctaaaccactcttctcttttgaggcaaaaaaaaaacctcatttcgccttcacagcttaactttacaattcaccagccttccaatttcaggcccacacagctcaaacattccgggcccactctttatcaaaaacgagtgggcttcgatcaccacacgtgtattcctgggtcattgtccgtgggccctttctctctctcgtggtgtactaaaggattatgttttggatgggcccggcccacgtgtgaaaccatactgtgttgtgtaagtagagacaaggggcccataaagagcttatctggaactggaagtcttccaaagtggaaaaggaaactacagaaagagataaggataaatgaaaaatcgcctgtctatacaagttgagataattaataatactgtcgcagatgttttattgatatatatatatatatntatatatatatatgtatgtgtatgaagctcttgagtgaggtgaatggtgagaatatttttcacgtgggtttgtatgaatagagatatatttaaaagataagaatgtttgttcctgaaatcctttctcaaatagttaatgaataaatcagaattcaaagctgtgtgtggggactgcaacgcgtcgtttgtctgttttgtaatgcaccatactaatttcacattatacatatttgatatattacaattacaattacacatactaaacagtcgcgatgaatttattattatgaacaaaacaaatattagttgagaagtaaaaatgagagaaaaatacagctagggacagatagtgggacaaaagtaatataaaacagcagcaacaatcagagacattatgcacttcaaaatactcttcctttccttttttccctttcattccagtagtaacaactaacaacaattttatgataaaatttgatttgaacacatgatgttagtcctcacacttctcccaaggctttcttgatgtcatcctgtgccaaaaacatcatggaagagaaaaacaaaagaattttagttgctccaaagagtttttaacagtgcacaagtgtgtgtgtgtgtgtgttttagagagagagagagagagagagagagaacctcaatggcaagaggagcagtgcttgtgccatagcgctctatgacttggccatctttgtccactaagaacttggtgaaattccactttatcctagatcctaaaaatccagatttacttgttttcagatatttgtacacaggtgcagtgtctggcccattgactcgtacctacgataaagagggtgcacagaataatgtcaagttcatgacagtctgcatattgcacggtcgttgaatttatccaaagatgggttggttaacaagcagtactccaggacatgttaaggccccatagcccttcttttttgatatatatcatgtacataactcgggaaatattctattaatgacaagacaaatttagtcggctatactctatgttttctttattttaacttgatagcaaacagataagataaacttatagacagtttggtaaatatcagttctatgtttattttaattaaaaaactataaagaaatcataaaaatttgttaagcagaataagagaaaacaaaaaattggaaatgcaaccaaacagtaccttaatgtttcaaacgatttgaacaacagtgttttctagcatgggtaatagagagacagaacgacagaaaaatgaagaaatatctaacacaattccaaaatatctagttcatttttggtctccaaatgaatcgttattgtcttttctctattgcctggatttatttgtctacttctgagaaagattatcacatacattatcagagtttccaaaaaaatctaaaacattattaacaaaaatcagaattatgtcgaatatctagaagttttgacgcttataatgctacacaagattgcaactgagcctcaaaaagttttgaaaattcgacctacctatatttcacacggaatcatgtcacgtcaaagataagagggctgtctaaaaatatcactccttcattttcaagtgaagaaagtgaaaggataaaaggaacgggaagtaataaaatagtgacagcagttgaaagccaaggtttgtacgatttgtaaactacttacaatcgaggatgtgaatcttccctttattcatgagctttaatcaaactgaagtctaggagaattagactatgctgaccaactagacttaaagttctttttggagaagtaaaaaacaaattgaaaaaaaatactcgaaacattttttcaactcaaccatgcaaacgttcaagagctaatcaatactccttaactacaccttcacataaatagaagtaatctgaagaggcaaaacaatggcttttagaataatgatattaactcaacttgttttcctttggattgtctttcctttaaatcctacaagaaggctcaaaactcacaaatatgaggtgaggtgcagctcaaaaaggaggcataaggtaaaatcatatgagtaagaatttgatacactcctaacaactaacagcttgacaggatttacttccaagccttttgtttaaacaaattaaaatgaaagctaaaaggttgttttcattttcaaattttaaagtaaaaatatgtgtaagatgtacgtcttttacttttcaaatttgtttaagaacacgaaattacgataaattttttatacctccttgaaaattttggtaacaatttaaaaaaaaaagtttgctaagcaaaccttttttacacacacacatgtagacaacatgtgtgaatctaagctaactgtaagtatattacaaattgtgtctcgtcaatttttataataacaaaagctaaccagcaaaacgactcaaagaaaaaaaaaagaattaacaacaaaataaaaacaagattgcaccgtagacaattggtaaacaatgatcttatggaggaaaaaattgtaattaaaagctcttttatgtattacaatttctttttaaataaattgtatttttattatcagatccattattaattgaaattttaacatatgtaaattgtaagtatcatatacaattgagttgaggacatgaatatttaggtgtttaaaatttatgtgtataaaccagggtatgattctttcgttcttcaagctacagaagagtttgtcccactgggacacgccattggtcagggttccttaggttccaatgccaacggtagcaaatctagttagtctacgaaagaaactacagaacagttctgtcccagaagttaatctactggttcctcaagagtaagacaagtgggtgagtatcacactcaagatgaacctcagcctctcaagtgtaataggtttctatgatcatgtaagatccaaaaccgttaaaaccccacatgccacacaaaatttataaaaatcttgcatcactttctttcttgtatagtgatctgcatgaactctaaacccacctacgtacaacgacattcaatattataattagattttcaattaccttttgaaatatcggatattcggccttgtatcgctcacaagcaaatttttgagcatcctcactcgacccaggctcttgctttaagaattgattgcaaggaaatgccaagacttcaaaccctgcaactcactcaagtatataaggcaattcaatagcttatatttacacgaatggaaaggattagtgataacttgacatgaattcatatatggaaagtaaacactacatcaatacaagctaatcaaataagggtttcagcttaatcataaatataacaaaattgaaaccatgggaagaaaaagactcggaaccttcaatgaccaaaacaataaatctagcaacacatataaaaggaaacattccaacaaaagtaatgaaaatttcaaaaaaattattatattgcgtgttaatacgaatccgtacacactttccatacaagactccgaaacgtacatacatataaatctctacgtatagtatatagatataaaagaaagacaaacctttgtccttgtatttgttgtaaagctcagtcaactgtgtataattcgaatccgtaaagccactgcataaacattattgaaaaaataaaaaacaaatcaaaaatcagattcgagaaataaatccaaaaaaagaataaaataaaatgaatcaaaagggctaagagaatttaaccatttagaagcaacattaaccacaagaagaaccttccctttgtaactgctaagttcgacatctttacctctggcatcctgctcaataataaaaaggaacaacatcacattttcaaaagaagaaacaaaaaaatactttgattttcccgggaaaagaaaagcaagagaagaagaaaaagaaaggaatcgattccagaattaaaaacgaccttgactgtgaattcgtgaatggatttctcagatacggattgagcagcacccatttctccttctctttctctgtgctgtgtctcaggtcgaaagaaacagattataattttaactgttaactaatattatttattattattattattattattattattgtaattacacaaaataaataaaatgattataattagagagaaagagacggtagttttggggtttggggaccaattaattatccgctgttgaatatcgtcgtcccacgacacaaccttaattcgagggcaccgccttagagaatttctaattgtaaaatttcaagaaaaatgctaattaggatcttctattataattttttagtcaatctctatgtctgaaattacatgttaaaatttttttttttcatagttgtattcgttaaatttttgaaaaattccaaatagtatacagtaccgaaaatagaattcttgatattataatttaccacgcgtgttcaaaaaaacatcaaacgtatttttggtactgtaaactatttgaaattttttaaaaatttgcaaggataatgttgtaagcataacgaacactcacgtgaaaaaagaaatgaaaaaaaaaaatattctgatatgtgttttcagacgtgaaggttgactaagaggttgtaacaggaagttgactatagcacttctcaaatattatgtagcaaaatattgagatgctatactactagagggaaatgaatatcattctaaaaatttatatgaatgttatattgtgacattgatgttattcattatttaaataaaaaattgaaatcaaaaagctattgtagttaaaaattaagatatatataaagagtaatttgcggcataaatacataagtttaactcccagttgtaaa

SEQ ID NO: 17860 - DNA, 7241 bp, Cannabis sativa
gtacctagtaggccggccatttttatgtatgtgctggatttttatagtttgggagataatcatcttcaactactatgtgtaggtggtgtcatgatattggccgtgagcaagctgcaaataagcctcttctaaaaactgtcttccaggtctttctgctgttctctcttctatccattgtttagaagctagctcaaataccagaaataataatgtatttagcttttatcatttattttcttgcaggtgatgatgcggttgtttagtccacgtaaaacaactttgatgtttgtcatacgtgataagacaagggtgtgttcctctttttcgttgatctgtgttgtagtcatggtttgagataattcctgtcaagagttgggttttatagtgagatttattaattctttgtttttttaatagacaccattggagaatttagaacctgttcttagagaagatattcagaaggttagtgttttttccctttctttctatcttttgttgggttttctatatgttacttttcaacatctctttcctttcctttttttttcttcgtcagatatgggactcggtgccaaagcctcaagctcatttggaaactcctttgagtgaattttttaatgtgagatgccatactctttataaaaactactattccctttcacttatgatacactttttatttgacattggtttctattgttgaccaaattcgctataggttgaggttgtagctctttcaagttatgaagaaaaagaagagctatttagggagcaggtatggaatttgcttctaatgtgtacaagatgtcgatacattgtgtgaaatgttctaatttcttcttgcttctctaaatcattgtttgtaaatatcaaaaggaagattgtattgaaagaaaagtaaactaaaggaaaagttgctgaactcttgaaatattttacaagaaatagttttctattgttgagaaatggcagtgaatgtttaccttatctcttcttaatttatttttagtgttgcatgcattggaaaaaataaaaataaaataaaaaatactgttgcattaaattatttaaatatttaaactaaattagtttattttatgaattttataaaatggtaaagtagagatgtctattgtaattcttgttgtttacatgttgaagaccttggattggttgaaggtataacttgttacacctggttttctttcgctcgttgccctttctatgaatcaggttgctaacttgaggcagagattctttcactcgattgcacctggtggacttgctggagatcgaaggggagttgttcctgcttcagggttttcttttagtgcacatgaaatatggaaagtcatcaaggaaaacaaagaccttgatcttcctgcccacaaggtaaattatcgtatcaaattccagctcattgcagtagccagggtatactgtggcttgtactgctatatacagaaatattgacatttggaagagacaaattttaataattcattgttcacaggttatggtggctactgtgcgctgtgaagaaattgccaatgagaagttctctggtttttcaggaaatgaggtaccatattttcatacatttacatcttttccacgacttaagttaatttggtatttaaacttgtgggagggtaattacttgcttaaacaatgatacagtactggctggcactcgaggaggctgtgcaacttggtcctgttactggatttgggaagaagctcacttcaattcttgatacctgtctgtcagagtaagatttgtttggttttttatgtaaacaaaaattaatcgcaagtgtgattggaggatgatttttatgcattttagaaattgatttcctcctttcctttggggttatcctcagtatgcattctgcagatacgtgctttgtcattaacaaccatgttctgtatattgacaatttcagctatggctttgactgttccaatctttgtcttgattattaaattaactgtaaaaatttaattgctgctacttgttctctacttacactgtagtttaggggataatgtttgcaacaatattttacttcagattaagaatcacacaacatagtaaattagccagtgtccaacgtttaggataatttccttccaagcaatagacctgggttcaactcccggcagatgcactttattggtagtgattttcttggcgatggatttgagatggctcaaaagttcatgctcctctgtgagggtagttgattccttactttcttttgggtcacagatgtataaagtcttaagcaagtcaaccatttcagactatttaaagtcttaacgtcatccttatcaactgtttgaagaaacctgagaaataagtccattgtttctaagaagtattttgaatggtttttgtacatcaacaaaatctccagtgcaatgaggttgagagagaaagcgatggattctttcatagagtgatgaatgatcgtcaagtggagatcattagaatttggaaaaaattggaaaattgtttcttgttaccaagtactttaattaaacaacataattgtgtctgcatgccaaaaatctttaatttattgatattaccttctcagatacatgaaatgacaggactgctatgtgattcttttgattaagaaactcatgatgctcaagatcttatttgcatttctttaattacttattgattatctgtttattgaaattaatgtttaggtatgatgcagaagctacatattttgatgaaggtgtccgatcttcaaagcggaagcagcttgaagaaaaactgctacaagtattcacttttctgatctccaacttaatctttagtcaatattttataaactttctgtttgaaaaccactttggctcccaccctttcatgaaatttctccaggaattgagattaaaaaacacacacaatcatgagtgtaacattattttcttgatgatttgagggtgtaaaattttaggttttcactttatattgatcaaaattcaaaggggtgagctaatttgcatggaattgcttttgatttggcttattaaaaatacataacaatagcataaagtaccctgagtcatttctcaacaagattctatcataaaagatactggaattgggtttgcttgttaataacacattacagagaactctgtgggaggctattgagcctatagtgtggatttaagttagataaattaatttcacattgtgaatgtttctcacaatgatttttaattctcatttgcagtcttattcattgattattattttcttgtctttgcttttttttttttttttgctgtcttgaagcttgtacaaccggcttttcaaactttgctgggacatataagatctggaactttggataaatttaaggaagcatttgagaaggctttggatagtggcgagggattttctgctgctgctgctgagtgctctcattcttatatgtctctttttgatgaaagatgtgcaggtttgttaacattaacttaagttatggtcaattaccatagcataatgaaattaagtacttaaaatgaaaagcaaaaaaaaaaaaaacagagacattaaaatggtaggttcagagcataaatatggggaaacctaaatttgaaatgcattgatgtatgtattgcaatttcacttttaagtattcataaggtgtagtattaaatttaattcatttttatgattcaatatgctttactagtggttttaaaatttcatgtttgatttgctaaatgagcttgagagcaaaccttactttatgtatgtaaatcttgctttccattcccactacaacattgacacaaattattgcagatgctgttattgaagtagcaaactgggacacgtctaaagtaagggacaaagttcgacgtgatatagatgcccacatttctttagttcgtgatgccaagatatctgaaattactgcattttatgaggtaattcggtttatggctcgtctttaatgttagtaaccatagtctctatgtggtgtcgtatcacgaaaatttaacctggaagttcattttagatattttatacgacaataaaaattttatcagttagaaaaacggtgactaaaatctcttttatgtttgtaataagtttggtaaagttttccttgggactatcactgatgttaataacacatgcagggcaaactgaaggaagcattatcaggaccagtagaagcactgctagatggagcaaatagtgagacttggccagcaataagaaaactccttcgacgagagactgaatcagctgtgtctgggctttccaatgccctttctgggtttgacatgtatgaagaaacaagaagtaaaatgcttacaaatctagaggattatgcaagaggagttgttgaggcaaaagcgaaggaggaggctggaagagttttgatccgtatgaaggacaggtacctgcctattttgtattcaaattttcttgtttactttcagcttctattttcatgcattgacatttgaactgctattaggttcacaacaatgtttagccacgattctgattcaatgcctcgtgtttggactgggaaagaagatattcgagctattacaaaaactgcacgctcttcagtatggcaatataaatactgttaatattatatttttttatattaactttatatgatcctgactgtttaactttttaacagtccttaaaattgctttcggttatggctgctatacgtttggacgattctgatgctgataccattgagaccactttaaccgtagctttggtggattccactagtggtgccaatagagataggagcattacaacggctgacccactggctacgagctcatgggaagaggtatctcttataatttcatttgtgtagtgattttgaagaagttcccaaacctactaagctatttctctgtggttctcttataacaagacctccatatgtataagtttcaagttgagatgttcttgtaatttgttttgcattcagttgacattagtcaccagtttaaccttgttttggattaacagaatcagtatttaagacatattttgcagtggactcaatatctatcaatgataggaatctcattctgttagatgtgctcattatgtgtaggagcttcttatgtctgtgtaacattgatatatttacattgattgatacaggtcccaccaacaaaaacattgatcacgcccgtccagtgcaaatctttatggaggcaattcaagactgagacagagtacactgtatcgcaggcaattgcagcacaggcatgattcgaaaccaattaacaatttaaattattttctgtttgcgatgtacttcatgttgttgattcataagaccagctggaatcgtgcgtggtatatagatatatagatacagtgaaaacattgacatttttacaggaaaagaaaaaatctaaaacagcgattgtaacttagatgcatttatcaaccacatatatggatgcagtgaaaacattgacacttatacagtaaaaaaaaaatctaaaacagtgattgtaacttagatgcatatatcgaacacatgtttgctccttcatttctccagtaatgggtcactactatgctgttgttataataaagtattttaagatggctatggttaaagtcaacatagggtgcatatatcaacctcatggctcatattatgctgttttaagagtagtgtaatttaagatggccttggttaaagtctgtctctgtttattatttatgcggtgatgaaaaatccaaaagcacttcaattaatttttgactcttctagtttatatttttaacaaatggtctttaagtattagctaaataaatttgtctatctccagatagtttgttacagtcctgcacttttttttggctatatcatttatatgtaatttctacaattattggactcaaaatttgtgtgacatcgatgagactttggatactgcatggaatttatatatattaataaatatttattttaactgctattcaggaagccaacaagagaaacaacaattggttaccacctccatgggccattgttgccttggttgttttaggattcaatgaatttatgacgcttttaaggtacgctgtttccatctttatagttttactggtgttatatttttgtgtttgtatttatttcttgtattttggttgcagaaatcctctgtatctgggagtgatctttgtggctttcttacttgtcaaagccctatgggtgcagctagatatctcgggtgaattccgcaatggtgctgtaagtatctaaattgcgttctttaatacgtatagcctccttgtcaaaagctagtttagtaaaagatgcaatttcatggacttactgatgtgaaatattaaaaaacgcactactattattgtaggctgcatttattaatcagtttatacatatatttttaattagtttatatatatatatacgtgcatgtatatatgtatattagtatactcttaatagctattacccaataagtattattaaaaaaattgaattttctatacttaattttgctttctaattaaaaaaatatctctttaatgggtggttatatggctgaagttgctctatcagttgatagagataaggaaaattgaattagagatagatatttttgatataaacatacttttgatatggtttacaaagaattttttttttaattaactaaattagtcatagaaactcaaatttttcttttattattgaccatttaatcaaaataatggtttactatttttaaaattgatatttctagttatttttttttttttaaataaccattaatgattcaataggtattacccattgagaagtattctatatattacccattcagtttatatatattatatatatatatggttgcactctttatgggtattactcttaaatgggtaaatttgagtttttaagcttaaattttctatctaattagtttaatctttcattttgataggtttggattgttttatcggctgaaaaaaaaaaattatgaaaaaaagttttttggcaaaaaaaagataaaaaaaaagttgagagtgtgatttaaatgttttgtatctaaatatattattgatatagtgtaaaaaagatattttttaaatttttttaattaagtagctaaattaagcatagatattaaaatttctgtttttattattctttattggatca
